United States Patent Application Publication US 2009/0181380 A1 - sequence listing, part 3

SEQ ID NO: 3147 - DNA, 7444 bp, Homo sapiens
ggggtctctagtgacccgaggcttccggaggaggctgcccttgctccgcggtccctcgcggctcaaatccgaaaggtcggagatttcagaaagaagaggcgtgtgcagggcgcctcccaagaccccgccagccgccggcacacccagcatctttgaagtggggcttcggcactgggccggggcgcacgcggggcggccggggctcaagatggctttagccgggctctgcgccctgctcgcctgctgctgggggccggcggcggtgctggccacggccgccggcgacgtggatccatccaaggagctggagtgcaagctcaaaagcatcacggtgtcggcactgcccttcctgcgcgagaacgacctgagcatcatgcacagcccctcggcctcggagcccaagctcctcttctcggtgcgcaacgacttcccgggagaaatggtcgtggtggacgacctggagaacacggagctgccctacttcgtgctggagatctcagggaacacagaggatatccctttggtgcgctggaggcagcagtggctggagaatggcactttgctttttcacattcatcaccaagatggtgccccaagccttcctggacaagaccccactgaagaaccccaacatgagtcggcagaagaggagctgaggatcctccacatctcagtcatgggtggcatgatcgctctgctgctgtccatcttgtgcctggtgatgatcctgtatactcgccggcgctggtgcaaacgccgccgggtcccgcagccccagaagagtgccagtgctgaggcagccaatgagattcactacattccttctgtgctgatcggcgggcacggacgggagagcctgcgcaatgcccgcgtgcagggccacaactccagtggcaccctgagcatccgggagacacctatcctggacggctatgagtatgacatcactgatctgcgccaccatctgcagagggagtgcatgaacggaggggaggactttgccagccaggtcacgcgcaccctcgactccctgcagggctgcaatgaaaagtcggggatggacctcacaccaggaagtgacaatgccaagctgtcactgatgaacaagtataaagataatattatagccactagccctgtggactccaaccaccagcaagccacccttctctctcacacctccagcagccagagaaagcggatcaacaacaaagcaagagctggttccgccttcttgaaccctgaaggggattctggcacagaggcagaaaacgacccccagctgaccttttacacggatccttcaaggagcaggaggcgtagtagagtgggttctccccgaagtcctgtgaataagaccaccttgaccctgatcagcatcaccagctgtgtgattggcctcgtgtgctcctctcacgtcaactgccctctcgttgtcaagatcaccctgcatgtccctgagcacctgattgctgatgggagccgcttcatcttgctggaggggagccagctggatgccagtgactggctgaaccctgcccaagtggttctcttctctcagcagaactccagcggaccctgggccatggacctctgtgcccggcggctcctggacccctgtgaacaccaatgtgaccccgaaactggggaatgcctctgctatgaaggctacatgaaggatccagtacataagcacctttgcattcggaacgaatgggggacaaaccaggggccatggccttacacaatatttcagcgaggctttgacctggttttgggagagcagccctctgataaaatatttagattcacctacactcttggggagggcatgtggttgcccctcagcaagagctttgtgattccaccagccgaactggccatcaatccatcagcaaagtgcaagacggacatgactgtgatggaggatgctgtggaggtcagagaggagctgatgacttcatcctccttcgacagcctggaggttctcttagattcctttgggccggtgcgcgactgcagcaaagataacgggggctgcagtaagaatttccgctgtatttcagatcgcaagctggactccactggttgcgtgtgcccatctggactcagtcccatgaaggacagctctggctgctatgaccgccacatcggggtggactgttccgacggcttcaacggcggctgtgagcagctgtgcctccagcagatggcgcccttcccggacgaccccaccttgtataacatcctcatgttctgtgggtgcatcgaggactacaagcttggtgtggatggacgctcttgccaactcatcacggagacctgtccagagggaagtgactgtggggaaagcagggagcttcccatgaaccagaccctctttggggagatgttctttggttacaacaaccattccaaggaagtggctgccggacaggtgctgaaaggaacattcaggcaaaacaactttgctcgtggtttagaccagcaactgccagatggtcttgtggtggccactgtgcccctggagaatcaatgcctagaggagatctcggagcccacccctgaccctgacttcctgactgggatggtgaacttcagtgaagtgtctgggtaccctgtgctgcagcactggaaggtccggtctgtgatgtaccacatcaaactcaaccaagtggccatctctcaggccctcagcaatgctctccactcgctggatggggctacatctcgtgcagattttgtggcgctgttggaccagttcggcaaccattacatccaggaagctatctacggctttgaggagtcctgttctatctggtacccaaacaagcaggtccagcggcgactctggctggagtatgaagacatcagtaaaggcaactccccatcagatgagtctgaggagcgggaaagagaccccaaggtgctgacattcccagaatacatcaccagcttgtcagactccggcaccaagcacatggcggctggagtccgcatggagtgccacagcaagggacgatgcccctcgtcctgccccctgtgtcatgtgacatccagccctgacacccctgctgagccggttctgctggaggtgaccaaagcagcccccatctatgaactagtgaccaacaaccagacccagaggctcttgcaggaggctaccatgagctctctctggtgctcagggactggagatgtcatcgaggactggtgtcgatgtgactccactgcttttggagctgatggactccccacctgtgcgcctctcccacagcctgtgctgagactctccacggttcacgagcccagcagcactcttgtggtcctggagtgggaacactcagagccaccaatcggggtgcagattgtagattacctcctccgtcaagagaaagtcactgacaggatggaccactccaaagtggagacagaaacagtgctgagctttgtggacgacatcatctctggagcaaagtctccttgtgcaatgccatctcaggtgccggacaagcagctcaccaccatctctctgatcatacgatgcctggaacctgacaccatttacatgttcacgctgtggggagtggacaacacaggacggcgctccaggccaagcgacgtgatcgtgaagaccccatgccccgtggtggatgatgtcaaggctcaagaaatagcagacaagatctacaatctcttcaatggctacactagtgggaaggagcagcagaccgcctacaacaccctcctggatctgggttcccccaccttacaccgggtcctctaccactataaccagcactatgagagttttggggaattcacctggcgatgtgaggatgagttaggtcccaggaaagctggtctcatcctttcccagcttggggacctcagcagttggtgcaatggactccttcaggaacccaagataagcttgcggcgcagctcactcaagtacctggggtgccgctacagcgagatcaaaccctacggacttgactgggcggagctcagccgggacctcaggaagacgtgtgaggagcagaccctgagtatcccctacaacgactatggggacagcaaagagatctagcaccataaggccagggagctgctgccagaatgaagtaggaaagaggagggatccatctgggttggtctgtggatttttaatattttttaatggaacatgaaaacctccacagcaacatcgaaaccagggagaaagtgatccttgctccctgcagaacttcttcagtatgatgttctccatctgcatgattgggaaatctgccagccagtggcttcatgcagtgccatatttctttagaggattactttggggtttgctttgccattaatttgttccattcatttttttttccctgagaagtttaccaaaatgctcaagagctctgccgtgctccccatgaaaagtctattaagtaggcaccctgtgctcactcagttcctaaatccattgcaactgggagcagaggtgaggccagaaagttgttaggcctgccgcaggccccaccctcaagcattcctcaggaagcgtctcactctgggagccttggccctgctcacagagagagacaatagaaaattgaggaaggtggcccttgtctgtgtctcctggttttcttcctaggccttgctatcactatttccatacccgaaaggtgaaaccagctttcattataggccccagtgggccacttgggttttgagatccttccttattttaagccaggactgggattaaatctccctctgtcagatctctgtcccttcctctgaacaacatgatctttgagagggaacaagatgccatctgtcaactgcaccttcagaaaagtctacctgggagactagttagcagtccacattcaagaggagacttggagtttattgttttttaaaaaaaccatgcttcctttggatagacttctccagcctaccaatatatatccatgtgcctggattatctttaacccccacacctcttaccttggacaggtaaggcttggccgatgtctgattgggaccaggaggggtcaacactttcatatcagtgttacagtgaactaaagctattattgatcacaaaaaacttctgttcatccccaccttgctaaatttgcttgtgttgctagttttgcaaatcgtttctctgatgaccataagcaggaggattccaccatggtcactgcccatccagtcacagggattctgtgtagggaagcaccactgattgcagttaacatctagagtgttgtttccatcccactgcccaagcattggcatggtcatgaatggtggcccagccaacaggaagcccagcctttcagaaagagcctggcaaggccctgttgactagcaatggccttagctgtcccacacaactcagtggcctgaacacacaccttcagccaccatgcctttgaccagggctcctcatctggaaacatatgagaaaggtcagcaaacagatgcaagacctataaggctagtcattgagctatattggttttttttctaaatagtagtagtgacagataacatttattgagtgcttgctgtatgccaggcgctgatgtaagcactttaggtatcattgaattctcacagcaactcctgaggaaagtgctattcttgtctccattttagtgttgaggaaaacgaggcaaagagaggttatacaacttgcctcaaatcccttgtgcactgtaactcacactgagtttcagtgtgatttcaggctgttggtctccagggcacaggatcttagctactctgggatacccagttctgttttcagtatcatctggcacacaactgtccaagctctcagccccacagggaacctgcccagagagctttacctttcccaagcatctgtggcatggacatgtcctctgtgcagtggaaggaggaggggcgaaagtacgcccttagcctttggagctagagcacccttgggacccctagttccactgcacatggccctcctccccaccctcatgactgggaaggaagcctgtgatgaggctgagataaagcacagggtggtttcactctcctctctccttctttccaaacactgaaggatttatttcaaactctctaatgcacctgcctcagagattcccctactttcaaagcaaagatcagcagaaaaattggctgtcccacctgtggcaaatgctggagcctcagttaaagtgcctcaaggggcaaatatttcaccattgccagagaagatgtgacaggccaatcagacagggcccagagcatctctttgctgctactgttttgccatccttctattcatatctgtgcagaacacggtgttttaagcttgagtgaaaggagggtgaggctgccgatgccttcctgcccagaagtggatgatgtgggagttgacaggccagggagagggtgaagcaggtatcagagtcactcctctgtaccctctccttctgtttttattttaggcacactatcttcctctctcctatctttccctcagtctcccaagttcctctaccttctttatctttgtcttttacttcttctttctgtgaccctccttttttggcctcctctttccccaagactttcttcctcctgtttctcgttgagttctccccactgaatgtgtgtatgtatgtacacacacacacacgtgtgcacacacaatgcacacaactcctatgactggctcctacttacattcaagttaaaaaggctgatatgaacagggcaggggaaaatcttaggatggttgtacaattgactggaggattttttccccttggaagacactattgatctcaacctgctgacttttcctaatgcttacctgaaggaacccatcctggctagaaagggtgatggtactggaccggtattcaaccttgagttttcaagctgccaaacaggtcttaagggaggtgcttatatcccaccaacactctcccagctcccatgtccccaagacctctggagtttcctcttgaatgtacatgaaccactgtaatagcattagacttttaattgagtgtgcaatcgttttccatggagtttggtccgttcattattttttagttaactacacttcttgatattcaaatgttctattaaaaaaactgagtatgaagaaaaacactttactactgcagaaggaagaaagaatataatatgaccatcttcaggtataacagtgttgtttaaaagagaattattgtatgattataaaagatgaaataattaactgaataataaaacaaagctattagtaagcattgggtatgtggatgttgtgtctttcagtaatctgagtgaactggttagactcatcagggaacttgttaaggttttaaaggttacacttcagattccagacataatgggccttatagtcatcattctaactgga

SEQ ID NO: 3148 - protein, 1294 aa, Homo sapiens; identical to SEQ ID NO: 194

SEQ ID NO: 3149 - DNA, 7317 bp, Homo sapiens
gctccgggaaacaaagaatccggggctctccagacatcagagcttaaacccaggactctgcaagcggcatctcattccggggtccagggctctcccggctctccatcccctccctaacctcccccgcctcccgcgctcgctccctcgctccctccccgctcgcttcctcccccaccatcgcagcgctaggaggaaggcggccggggctcaagatggctttagccgggctctgcgccctgctcgcctgctgctgggggccggcggcggtgctggccacggccgccggcgacgtggatccatccaaggagctggagtgcaagctcaaaagcatcacggtgtcggcactgcccttcctgcgcgagaacgacctgagcatcatgcacagcccctcggcctcggagcccaagctcctcttctcggtgcgcaacgacttcccgggagaaatggtcgtggtggacgacctggagaacacggagctgccctacttcgtgctggagatctcagggaacacagaggatatccctttggtgcgctggaggcagcagtggctggagaatggcactttgctttttcacattcatcaccaagatggtgccccaagccttcctggacaagaccccactgaagaaccccaacatgagtcggcagaagaggagctgaggatcctccacatctcagtcatgggtggcatgatcgctctgctgctgtccatcttgtgcctggtgatgatcctgtatactcgccggcgctggtgcaaacgccgccgggtcccgcagccccagaagagtgccagtgctgaggcagccaatgagattcactacattccttctgtgctgatcggcgggcacggacgggagagcctgcgcaatgcccgcgtgcagggccacaactccagtggcaccctgagcatccgggagacacctatcctggacggctatgagtatgacatcactgatctgcgccaccatctgcagagggagtgcatgaacggaggggaggactttgccagccaggtcacgcgcaccctcgactccctgcagggctgcaatgaaaagtcggggatggacctcacaccaggaagtgacaatgccaagctgtcactgatgaacaagtataaagataatattatagccactagccctgtggactccaaccaccagcaagccacccttctctctcacacctccagcagccagagaaagcggatcaacaacaaagcaagagctggttccgccttcttgaaccctgaaggggattctggcacagaggcagaaaacgacccccagctgaccttttacacggatccttcaaggagcaggaggcgtagtagagtgggttctccccgaagtcctgtgaataagaccaccttgaccctgatcagcatcaccagctgtgtgattggcctcgtgtgctcctctcacgtcaactgccctctcgttgtcaagatcaccctgcatgtccctgagcacctgattgctgatgggagccgcttcatcttgctggaggggagccagctggatgccagtgactggctgaaccctgcccaagtggttctcttctctcagcagaactccagcggaccctgggccatggacctctgtgcccggcggctcctggacccctgtgaacaccaatgtgaccccgaaactggggaatgcctctgctatgaaggctacatgaaggatccagtacataagcacctttgcattcggaacgaatgggggacaaaccaggggccatggccttacacaatatttcagcgaggctttgacctggttttgggagagcagccctctgataaaatatttagattcacctacactcttggggagggcatgtggttgcccctcagcaagagctttgtgattccaccagccgaactggccatcaatccatcagcaaagtgcaagacggacatgactgtgatggaggatgctgtggaggtcagagaggagctgatgacttcatcctccttcgacagcctggaggttctcttagattcctttgggccggtgcgcgactgcagcaaagataacgggggctgcagtaagaatttccgctgtatttcagatcgcaagctggactccactggttgcgtgtgcccatctggactcagtcccatgaaggacagctctggctgctatgaccgccacatcggggtggactgttccgacggcttcaacggcggctgtgagcagctgtgcctccagcagatggcgcccttcccggacgaccccaccttgtataacatcctcatgttctgtgggtgcatcgaggactacaagcttggtgtggatggacgctcttgccaactcatcacggagacctgtccagagggaagtgactgtggggaaagcagggagcttcccatgaaccagaccctctttggggagatgttctttggttacaacaaccattccaaggaagtggctgccggacaggtgctgaaaggaacattcaggcaaaacaactttgctcgtggtttagaccagcaactgccagatggtcttgtggtggccactgtgcccctggagaatcaatgcctagaggagatctcggagcccacccctgaccctgacttcctgactgggatggtgaacttcagtgaagtgtctgggtaccctgtgctgcagcactggaaggtccggtctgtgatgtaccacatcaaactcaaccaagtggccatctctcaggccctcagcaatgctctccactcgctggatggggctacatctcgtgcagattttgtggcgctgttggaccagttcggcaaccattacatccaggaagctatctacggctttgaggagtcctgttctatctggtacccaaacaagcaggtccagcggcgactctggctggagtatgaagacatcagtaaaggcaactccccatcagatgagtctgaggagcgggaaagagaccccaaggtgctgacattcccagaatacatcaccagcttgtcagactccggcaccaagcacatggcggctggagtccgcatggagtgccacagcaagggacgatgcccctcgtcctgccccctgtgtcatgtgacatccagccctgacacccctgctgagccggttctgctggaggtgaccaaagcagcccccatctatgaactagtgaccaacaaccagacccagaggctcttgcaggaggctaccatgagctctctctggtgctcagggactggagatgtcatcgaggactggtgtcgatgtgactccactgcttttggagctgatggactccccacctgtgcgcctctcccacagcctgtgctgagactctccacggttcacgagcccagcagcactcttgtggtcctggagtgggaacactcagagccaccaatcggggtgcagattgtagattacctcctccgtcaagagaaagtcactgacaggatggaccactccaaagtggagacagaaacagtgctgagctttgtggacgacatcatctctggagcaaagtctccttgtgcaatgccatctcaggtgccggacaagcagctcaccaccatctctctgatcatacgatgcctggaacctgacaccatttacatgttcacgctgtggggagtggacaacacaggacggcgctccaggccaagcgacgtgatcgtgaagaccccatgccccgtggtggatgatgtcaaggctcaagaaatagcagacaagatctacaatctcttcaatggctacactagtgggaaggagcagcagaccgcctacaacaccctcctggatctgggttcccccaccttacaccgggtcctctaccactataaccagcactatgagagttttggggaattcacctggcgatgtgaggatgagttaggtcccaggaaagctggtctcatcctttcccagcttggggacctcagcagttggtgcaatggactccttcaggaacccaagataagcttgcggcgcagctcactcaagtacctggggtgccgctacagcgagatcaaaccctacggacttgactgggcggagctcagccgggacctcaggaagacgtgtgaggagcagaccctgagtatcccctacaacgactatggggacagcaaagagatctagcaccataaggccagggagctgctgccagaatgaagtaggaaagaggagggatccatctgggttggtctgtggatttttaatattttttaatggaacatgaaaacctccacagcaacatcgaaaccagggagaaagtgatccttgctccctgcagaacttcttcagtatgatgttctccatctgcatgattgggaaatctgccagccagtggcttcatgcagtgccatatttctttagaggattactttggggtttgctttgccattaatttgttccattcatttttttttccctgagaagtttaccaaaatgctcaagagctctgccgtgctccccatgaaaagtctattaagtaggcaccctgtgctcactcagttcctaaatccattgcaactgggagcagaggtgaggccagaaagttgttaggcctgccgcaggccccaccctcaagcattcctcaggaagcgtctcactctgggagccttggccctgctcacagagagagacaatagaaaattgaggaaggtggcccttgtctgtgtctcctggttttcttcctaggccttgctatcactatttccatacccgaaaggtgaaaccagctttcattataggccccagtgggccacttgggttttgagatccttccttattttaagccaggactgggattaaatctccctctgtcagatctctgtcccttcctctgaacaacatgatctttgagagggaacaagatgccatctgtcaactgcaccttcagaaaagtctacctgggagactagttagcagtccacattcaagaggagacttggagtttattgttttttaaaaaaaccatgcttcctttggatagacttctccagcctaccaatatatatccatgtgcctggattatctttaacccccacacctcttaccttggacaggtaaggcttggccgatgtctgattgggaccaggaggggtcaacactttcatatcagtgttacagtgaactaaagctattattgatcacaaaaaacttctgttcatccccaccttgctaaatttgcttgtgttgctagttttgcaaatcgtttctctgatgaccataagcaggaggattccaccatggtcactgcccatccagtcacagggattctgtgtagggaagcaccactgattgcagttaacatctagagtgttgtttccatcccactgcccaagcattggcatggtcatgaatggtggcccagccaacaggaagcccagcctttcagaaagagcctggcaaggccctgttgactagcaatggccttagctgtcccacacaactcagtggcctgaacacacaccttcagccaccatgcctttgaccagggctcctcatctggaaacatatgagaaaggtcagcaaacagatgcaagacctataaggctagtcattgagctatattggttttttttctaaatagtagtagtgacagataacatttattgagtgcttgctgtatgccaggcgctgatgtaagcactttaggtatcattgaattctcacagcaactcctgaggaaagtgctattcttgtctccattttagtgttgaggaaaacgaggcaaagagaggttatacaacttgcctcaaatcccttgtgcactgtaactcacactgagtttcagtgtgatttcaggctgttggtctccagggcacaggatcttagctactctgggatacccagttctgttttcagtatcatctggcacacaactgtccaagctctcagccccacagggaacctgcccagagagctttacctttcccaagcatctgtggcatggacatgtcctctgtgcagtggaaggaggaggggcgaaagtacgcccttagcctttggagctagagcacccttgggacccctagttccactgcacatggccctcctccccaccctcatgactgggaaggaagcctgtgatgaggctgagataaagcacagggtggtttcactctcctctctccttctttccaaacactgaaggatttatttcaaactctctaatgcacctgcctcagagattcccctactttcaaagcaaagatcagcagaaaaattggctgtcccacctgtggcaaatgctggagcctcagttaaagtgcctcaaggggcaaatatttcaccattgccagagaagatgtgacaggccaatcagacagggcccagagcatctctttgctgctactgttttgccatccttctattcatatctgtgcagaacacggtgttttaagcttgagtgaaaggagggtgaggctgccgatgccttcctgcccagaagtggatgatgtgggagttgacaggccagggagagggtgaagcaggtatcagagtcactcctctgtaccctctccttctgtttttattttaggcacactatcttcctctctcctatctttccctcagtctcccaagttcctctaccttctttatctttgtcttttacttcttctttctgtgaccctccttttttggcctcctctttccccaagactttcttcctcctgtttctcgttgagttctccccactgaatgtgtgtatgtatgtacacacacacacacgtgtgcacacacaatgcacacaactcctatgactggctcctacttacattcaagttaaaaaggctgatatgaacagggcaggggaaaatcttaggatggttgtacaattgactggaggattttttccccttggaagacactattgatctcaacctgctgacttttcctaatgcttacctgaaggaacccatcctggctagaaagggtgatggtactggaccggtattcaaccttgagttttcaagctgccaaacaggtcttaagggaggtgcttatatcccaccaacactctcccagctcccatgtccccaagacctctggagtttcctcttgaatgtacatgaaccactgtaatagcattagacttttaattgagtgtgcaatcgttttccatggagtttggtccgttcattattttttagttaactacacttcttgatattcaaatgttctattaaaaaaactgagtatgaagaaaaacactttactactgcagaaggaagaaagaatataatatgaccatcttcaggtataacagtgttgtttaaaagagaattattgtatgattataaaagatgaaataattaactgaataataaaacaaagctattagtaagcattg

SEQ ID NO: 3150 - protein, 1294 aa, Homo sapiens; identical to SEQ ID NO: 194

SEQ ID NO: 3151 - DNA, 7313 bp, Homo sapiens
ggggtctctagtgacccgaggcttccggaggaggctgcccttgctccgcggtccctcgcggctcaaatccgaaaggtcggagatttcagaaagaagaggcgtgtgcagggcgcctcccaagaccccgccagccgccggcacacccagcatctttgaagtggggcttcggcactgggccggggcgcacgcggggcggccggggctcaagatggctttagccgggctctgcgccctgctcgcctgctgctgggggccggcggcggtgctggccacggccgccggcgacgtggatccatccaaggagctggagtgcaagctcaaaagcatcacggtgtcggcactgcccttcctgcgcgagaacgacctgagcatcatgcacagcccctcggcctcggagcccaagctcctcttctcggtgcgcaacgacttcccgggagaaatggtcgtggtggacgacctggagaacacggagctgccctacttcgtgctggagatctcagggaacacagaggatatccctttggtgcgctggaggcagcagtggctggagaatggcactttgctttttcacattcatcaccaagatggtgccccaagccttcctggacaagaccccactgaagaaccccaacatgagtcggcagaagaggagctgaggatcctccacatctcagtcatgggtggcatgatcgctctgctgctgtccatcttgtgcctggtgatgatcctgtatactcgccggcgctggtgcaaacgccgccgggtcccgcagccccagaagagtgccagtgctgaggcagccaatgagattcactacattccttctgtgctgatcggcgggcacggacgggagagcctgcgcaatgcccgcgtgcagggccacaactccagtggcaccctgagcatccgggagacacctatcctggacggctatgagtatgacatcactgatctgcgccaccatctgcagagggagtgcatgaacggaggggaggactttgccagccaggtcacgcgcaccctcgactccctgcagggctgcaatgaaaagtcggggatggacctcacaccaggaagtgacaatgccaagctgtcactgatgaacaagtataaagataatattatagccactagccctgtggactccaaccaccagcaagccacccttctctctcacacctccagcagccagagaaagcggatcaacaacaaagcaagagctggttccgccttcttgaaccctgaaggggattctggcacagaggcagaaaacgacccccagctgaccttttacacggatccttcaaggagcaggaggcgtagtagagtgggttctccccgaagtcctgtgaataagaccaccttgaccctgatcagcatcaccagctgtgtgattggcctcgtgtgctcctctcacgtcaactgccctctcgttgtcaagatcaccctgcatgtccctgagcacctgattgctgatgggagccgcttcatcttgctggaggggagccagctggatgccagtgactggctgaaccctgcccaagtggttctcttctctcagcagaactccagcggaccctgggccatggacctctgtgcccggcggctcctggacccctgtgaacaccaatgtgaccccgaaactggggaatgcctctgctatgaaggctacatgaaggatccagtacataagcacctttgcattcggaacgaatgggggacaaaccaggggccatggccttacacaatatttcagcgaggctttgacctggttttgggagagcagccctctgataaaatatttagattcacctacactcttggggagggcatgtggttgcccctcagcaagagctttgtgattccaccagccgaactggccatcaatccatcagcaaagtgcaagacggacatgactgtgatggaggatgctgtggaggtcagagaggagctgatgacttcatcctccttcgacagcctggaggttctcttagattcctttgggccggtgcgcgactgcagcaaagataacgggggctgcagtaagaatttccgctgtatttcagatcgcaagctggactccactggttgcgtgtgcccatctggactcagtcccatgaaggacagctctggctgctatgaccgccacatcggggtggactgttccgacggcttcaacggcggctgtgagcagctgtgcctccagcagatggcgcccttcccggacgaccccaccttgtataacatcctcatgttctgtgggtgcatcgaggactacaagcttggtgtggatggacgctcttgccaactcatcacggagacctgtccagagggaagtgactgtggggaaagcagggagcttcccatgaaccagaccctctttggggagatgttctttggttacaacaaccattccaaggaagtggctgccggacaggtgctgaaaggaacattcaggcaaaacaactttgctcgtggtttagaccagcaactgccagatggtcttgtggtggccactgtgcccctggagaatcaatgcctagaggagatctcggagcccacccctgaccctgacttcctgactgggatggtgaacttcagtgaagtgtctgggtaccctgtgctgcagcactggaaggtccggtctgtgatgtaccacatcaaactcaaccaagtggccatctctcaggccctcagcaatgctctccactcgctggatggggctacatctcgtgcagattttgtggcgctgttggaccagttcggcaaccattacatccaggaagctatctacggctttgaggagtcctgttctatctggtacccaaacaagcaggtccagcggcgactctggctggagtatgaagacatcagtaaaggcaactccccatcagatgagtctgaggagcgggaaagagaccccaaggtgctgacattcccagaatacatcaccagcttgtcagactccggcaccaagcacatggcggctggagtccgcatggagtgccacagcaagggacgatgcccctcgtcctgccccctgtgtcatgtgacatccagccctgacacccctgctgagccggttctgctggaggtgaccaaagcagcccccatctatgaactagtgaccaacaaccagacccagaggctcttgcaggaggctaccatgagctctctctggtgctcagggactggagatgtcatcgaggactggtgtcgatgtgactccactgcttttggagctgatggactccccacctgtgcgcctctcccacagcctgtgctgagactctccacggttcacgagcccagcagcactcttgtggtcctggagtgggaacactcagagccaccaatcggggtgcagattgtagattacctcctccgtcaagagaaagtcactgacaggatggaccactccaaagtggagacagaaacagtgctgagctttgtggacgacatcatctctggagcaaagtctccttgtgcaatgccatctcaggtgccggacaagcagctcaccaccatctctctgatcatacgatgcctggaacctgacaccatttacatgttcacgctgtggggagtggacaacacaggacggcgctccaggccaagcgacgtgatcgtgaagaccccatgccccgtggtggatgatgtcaaggctcaagaaatagcagacaagatctacaatctcttcaatggctacactagtgggaaggagcagcagaccgcctacaacaccctcctggatctgggttcccccaccttacaccgggtcctctaccactataaccagcactatgagagttttggggaattcacctggcgatgtgaggatgagttaggtcccaggaaagctggtctcatcctttcccagcttggggacctcagcagttggtgcaatggactccttcaggaacccaagataagcttgcggcgcagctcactcaagtacctggggtgccgctacagcgagatcaaaccctacggacttgactgggcggagctcagccgggacctcaggaagacgtgtgaggagcagaccctgagtatcccctacaacgactatggggacagcaaagagatctagcaccataaggccagggagctgctgccagaatgaagtaggaaagaggagggatccatctgggttggtctgtggatttttaatattttttaatggaacatgaaaacctccacagcaacatcgaaaccagggagaaagtgatccttgctccctgcagaacttcttcagtatgatgttctccatctgcatgattgggaaatctgccagccagtggcttcatgcagtgccatatttctttagaggattactttggggtttgctttgccattaatttgttccattcatttttttttccctgagaagtttaccaaaatgctcaagagctctgccgtgctccccatgaaaagtctattaagtaggcaccctgtgctcactcagttcctaaatccattgcaactgggagcagaggtgaggccagaaagttgttaggcctgccgcaggccccaccctcaagcattcctcaggaagcgtctcactctgggagccttggccctgctcacagagagagacaatagaaaattgaggaaggtggcccttgtctgtgtctcctggttttcttcctaggccttgctatcactatttccatacccgaaaggtgaaaccagctttcattataggccccagtgggccacttgggttttgagatccttccttattttaagccaggactgggattaaatctccctctgtcagatctctgtcccttcctctgaacaacatgatctttgagagggaacaagatgccatctgtcaactgcaccttcagaaaagtctacctgggagactagttagcagtccacattcaagaggagacttggagtttattgttttttaaaaaaaccatgcttcctttggatagacttctccagcctaccaatatatatccatgtgcctggattatctttaacccccacacctcttaccttggacaggtaaggcttggccgatgtctgattgggaccaggaggggtcaacactttcatatcagtgttacagtgaactaaagctattattgatcacaaaaaacttctgttcatccccaccttgctaaatttgcttgtgttgctagttttgcaaatcgtttctctgatgaccataagcaggaggattccaccatggtcactgcccatccagtcacagggattctgtgtagggaagcaccactgattgcagttaacatctagagtgttgtttccatcccactgcccaagcattggcatggtcatgaatggtggcccagccaacaggaagcccagcctttcagaaagagcctggcaaggccctgttgactagcaatggccttagctgtcccacacaactcagtggcctgaacacacaccttcagccaccatgcctttgaccagggctcctcatctggaaacatatgagaaaggtcagcaaacagatgcaagacctataaggctagtcattgagctatattggttttttttctaaatagtagtagtgacagataacatttattgagtgcttgctgtatgccaggcgctgatgtaagcactttaggtatcattgaattctcacagcaactcctgaggaaagtgctattcttgtctccattttagtgttgaggaaaacgaggcaaagagaggttatacaacttgcctcaaatcccttgtgcactgtaactcacactgagtttcagtgtgatttcaggctgttggtctccagggcacaggatcttagctactctgggatacccagttctgttttcagtatcatctggcacacaactgtccaagctctcagccccacagggaacctgcccagagagctttacctttcccaagcatctgtggcatggacatgtcctctgtgcagtggaaggaggaggggcgaaagtacgcccttagcctttggagctagagcacccttgggacccctagttccactgcacatggccctcctccccaccctcatgactgggaaggaagcctgtgatgaggctgagataaagcacagggtggtttcactctcctctctccttctttccaaacactgaaggatttatttcaaactctctaatgcacctgcctcagagattcccctactttcaaagcaaagatcagcagaaaaattggctgtcccacctgtggcaaatgctggagcctcagttaaagtgcctcaaggggcaaatatttcaccattgccagagaagatgtgacaggccaatcagacagggcccagagcatctctttgctgctactgttttgccatccttctattcatatctgtgcagaacacggtgttttaagcttgagtgaaaggagggtgaggctgccgatgccttcctgcccagaagtggatgatgtgggagttgacaggccagggagagggtgaagcaggtatcagagtcactcctctgtaccctctccttctgtttttattttaggcacactatcttcctctctcctatctttccctcagtctcccaagttcctctaccttctttatctttgtcttttacttcttctttctgtgaccctccttttttggcctcctctttccccaagactttcttcctcctgtttctcgttgagttctccccactgaatgtgtgtatgtatgtacacacacacacacgtgtgcacacacaatgcacacaactcctatgactggctcctacttacattcaagttaaaaaggctgatatgaacagggcaggggaaaatcttaggatggttgtacaattgactggaggattttttccccttggaagacactattgatctcaacctgctgacttttcctaatgcttacctgaaggaacccatcctggctagaaagggtgatggtactggaccggtattcaaccttgagttttcaagctgccaaacaggtcttaagggaggtgcttatatcccaccaacactctcccagctcccatgtccccaagacctctggagtttcctcttgaatgtacatgaaccactgtaatagcattagacttttaattgagtgtgcaatcgttttccatggagtttggtccgttcattattttttagttaactacacttcttgatattcaaatgttctattaaaaaaactgagtatgaagaaaaacactttactactgcagaaggaagaaagaatataatatgaccatcttcaggtataacagtgttgtttaaaagagaattattgtatgattataaaagatgaaataattaactgaataataaaacaaagctattagtaagcattg

SEQ ID NO: 3152 - protein, 1294 aa, Homo sapiens; identical to SEQ ID NO: 194

SEQ ID NO: 3153 - DNA, 3859 bp, Homo sapiens
gctccgggaaacaaagaatccggggctctccagacatcagagcttaaacccaggactctgcaagcggcatctcattccggggtccagggctctcccggctctccatcccctccctaacctcccccgcctcccgcgctcgctccctcgctccctccccgctcgcttcctcccccaccatcgcagcgctaggaggaaggcggccggggctcaagatggctttagccgggctctgcgccctgctcgcctgctgctgggggccggcggcggtgctggccacggccgccggcgacgtggatccatccaaggagctggagtgcaagctcaaaagcatcacggtgtcggcactgcccttcctgcgcgagaacgacctgagcatcatgcacagcccctcggcctcggagcccaagctcctcttctcggtgcgcaacgacttcccgggagaaatggtcgtggtggacgacctggagaacacggagctgccctacttcgtgctggagatctcagggaacacagaggatatccctttggtgcgctggaggcagcagtggctggagaatggcactttgctttttcacattcatcaccaagatggtgccccaagccttcctggacaagaccccactgaagaaccccaacatgagtcggcagaagaggagctgaggatcctccacatctcagtcatgggtggcatgatcgctctgctgctgtccatcttgtgcctggtgatgatcctgtatactcgccggcgctggtgcaaacgccgccgggtcccgcagccccagaagagtgccagtgctgaggcagccaatgagattcactacattccttctgtgctgatcggcgggcacggacgggagagcctgcgcaatgcccgcgtgcagggccacaactccagtggcaccctgagcatccgggagacacctatcctggacggctatgagtatgacatcactgatctgcgccaccatctgcagagggagtgcatgaacggaggggaggactttgccagccaggtcacgcgcaccctcgactccctgcagggctgcaatgaaaagtcggggatggacctcacaccaggaagtgacaatgccaagctgtcactgatgaacaagtataaagataatattatagccactagccctgtggactccaaccaccagcaagccacccttctctctcacacctccagcagccagagaaagcggatcaacaacaaagcaagagctggttccgccttcttgaaccctgaaggggattctggcacagaggcagaaaacgacccccagctgaccttttacacggatccttcaaggagcaggaggcgtagtagagtgggttctccccgaagtcctgtgaataagaccaccttgaccctgatcagcatcaccagctgtgtgattggcctcgtgtgctcctctcacgtcaactgccctctcgttgtcaagatcaccctgcatgtccctgagcacctgattgctgatgggagccgcttcatcttgctggaggggagccagctggatgccagtgactggctgaaccctgcccaagtggttctcttctctcagcagaactccagcggaccctgggccatggacctctgtgcccggcggctcctggacccctgtgaacaccaatgtgaccccgaaactggggaatgcctctgctatgaaggctacatgaaggatccagtacataagcacctttgcattcggaacgaatgggggacaaaccaggggccatggccttacacaatatttcagcgaggctttgacctggttttgggagagcagccctctgataaaatatttagattcacctacactcttggggagggcatgtggttgcccctcagcaagagctttgtgattccaccagccgaactggccatcaatccatcagcaaagtgcaagacggacatgactgtgatggaggatgctgtggaggtcagagaggagctgatgacttcatcctccttcgacagcctggaggttctcttagattcctttgggccggtgcgcgactgcagcaaagataacgggggctgcagtaagaatttccgctgtatttcagatcgcaagctggactccactggttgcgtgtgcccatctggactcagtcccatgaaggacagctctggctgctatgaccgccacatcggggtggactgttccgacggcttcaacggcggctgtgagcagctgtgcctccagcagatggcgcccttcccggacgaccccaccttgtataacatcctcatgttctgtgggtgcatcgaggactacaagcttggtgtggatggacgctcttgccaactcatcacggagacctgtccagagggaagtgactgtggggaaagcagggagcttcccatgaaccagaccctctttggggagatgttctttggttacaacaaccattccaaggaagtggctgccggacaggtgctgaaaggaacattcaggcaaaacaactttgctcgtggtttagaccagcaactgccagatggtcttgtggtggccactgtgcccctggagaatcaatgcctagaggagatctcggagcccacccctgaccctgacttcctgactgggatggtgaacttcagtgaagtgtctgggtaccctgtgctgcagcactggaaggtccggtctgtgatgtaccacatcaaactcaaccaagtggccatctctcaggccctcagcaatgctctccactcgctggatggggctacatctcgtgcagattttgtggcgctgttggaccagttcggcaaccattacatccaggaagctatctacggctttgaggagtcctgttctatctggtacccaaacaagcaggtccagcggcgactctggctggagtatgaagacatcagtaaaggcaactccccatcagatgagtctgaggagcgggaaagagaccccaaggtgctgacattcccagaatacatcaccagcttgtcagactccggcaccaagcacatggcggctggagtccgcatggagtgccacagcaagggacgatgcccctcgtcctgccccctgtgtcatgtgacatccagccctgacacccctgctgagccggttctgctggaggtgaccaaagcagcccccatctatgaactagtgaccaacaaccagacccagaggctcttgcaggaggctaccatgagctctctctggtgctcagggactggagatgtcatcgaggactggtgtcgatgtgactccactgcttttggagctgatggactccccacctgtgcgcctctcccacagcctgtgctgagactctccacggttcacgagcccagcagcactcttgtggtcctggagtgggaacactcagagccaccaatcggggtgcagattgtagattacctcctccgtcaagagaaagtcactgacaggatggaccactccaaagtggagacagaaacagtgctgagctttgtggacgacatcatctctggagcaaagtctccttgtgcaatgccatctcaggtgccggacaagcagctcaccaccatctctctgatcatacgatgcctggaacctgacaccatttacatgttcacgctgtggggagtggacaacacaggacggcgctccaggccaagcgacgtgatcgtgaagaccccatgccccgtggtggatgatgtcaaggctcaagaaatagcagacaagatctacaatctcttcaatggctacactagtgggaaggagcagcagaccgcctacaacaccctcctggatctgggttcccccaccttacaccgggtcctctaccactataaccagcactatgagagttttggggaattcacctggcgatgtgaggatgagttaggtcccag

SEQ ID NO: 3154 - protein, 1214 aa, Homo sapiens
MALAGLCALLACCWGPAAVLATAAGDVDPSKELECKLKSITVSALPFLRENDLSIMHSPSASEPKLLFSVRNDFPGEMVVVDDLENTELPYFVLEISGNTEDIPLVRWRQQWLENGTLLFHIHHQDGAPSLPGQDPTEEPQHESAEEELRILHISVMGGMIALLLSILCLVMILYTRRRWCKRRRVPQPQKSASAEAANEIHYIPSVLIGGHGRESLRNARVQGHNSSGTLSIRETPILDGYEYDITDLRHHLQRECMNGGEDFASQVTRTLDSLQGCNEKSGMDLTPGSDNAKLSLMNKYKDNIIATSPVDSNHQQATLLSHTSSSQRKRINNKARAGSAFLNPEGDSGTEAENDPQLTFYTDPSRSRRRSRVGSPRSPVNKTTLTLISITSCVIGLVCSSHVNCPLVVKITLHVPEHLIADGSRFILLEGSQLDASDWLNPAQVVLFSQQNSSGPWAMDLCARRLLDPCEHQCDPETGECLCYEGYMKDPVHKHLCIRNEWGTNQGPWPYTIFQRGFDLVLGEQPSDKIFRFTYTLGEGMWLPLSKSFVIPPAELAINPSAKCKTDMTVMEDAVEVREELMTSSSFDSLEVLLDSFGPVRDCSKDNGGCSKNFRCISDRKLDSTGCVCPSGLSPMKDSSGCYDRHIGVDCSDGFNGGCEQLCLQQMAPFPDDPTLYNILMFCGCIEDYKLGVDGRSCQLITETCPEGSDCGESRELPMNQTLFGEMFFGYNNHSKEVAAGQVLKGTFRQNNFARGLDQQLPDGLVVATVPLENQCLEEISEPTPDPDFLTGMVNFSEVSGYPVLQHWKVRSVMYHIKLNQVAISQALSNALHSLDGATSRADFVALLDQFGNHYIQEAIYGFEESCSIWYPNKQVQRRLWLEYEDISKGNSPSDESEERERDPKVLTFPEYITSLSDSGTKHMAAGVRMECHSKGRCPSSCPLCHVTSSPDTPAEPVLLEVTKAAPIYELVTNNQTQRLLQEATMSSLWCSGTGDVIEDWCRCDSTAFGADGLPTCAPLPQPVLRLSTVHEPSSTLVVLEWEHSEPPIGVQIVDYLLRQEKVTDRMDHSKVETETVLSFVDDIISGAKSPCAMPSQVPDKQLTTISLIIRCLEPDTIYMFTLWGVDNTGRRSRPSDVIVKTPCPVVDDVKAQEIADKIYNLFNGYTSGKEQQTAYNTLLDLGSPTLHRVLYHYNQHYESFGEFTWRCEDELG

SEQ ID NO: 3155 - DNA, 4079 bp, Homo sapiens
gcttaggtacggagcgcggagtcggagcggggacgcgccgggctgcagctctgggatgcaatccgcctgcctcgcaagctgctcgccgctgcgctggcagcgcttacgctgagctcggaggatcccattaggacttgcccggggatgtgcacctgccgtgcgctccgaggtcagtggcaggtctgcaggcagccgagggagcggtgaagccggaagacctgtctctgcccatgtgcaaggcagtgatttcgggtgagagagcgggtgggtgagtctctttagagttggaaagaaggcaaaatcttgggtttctcctcggcggagggacaggggactcccccagttgggtcttgcacttcccttacctctcccaccccgcgtgcgccccggcccagtgccgaagccccacttcaaagatgctctgggagaccgggatcctggctgctcagcgggaaggcagcaggcaagtggtctaacgttggcggcggtggcggtggcggcggcggcggcaccgacagtaaagcggggagcaagagaatttgaaaagagacatccgctccctctcacacgctgagggggaggcattcgcgtttccccaaatgagaaagaaccacaagaaatcatgaagtaaaaactttggaaagctgccactggagatgttgcacaaaaacctggaatcttttaggagtctcctcccagtcgttgaaggtttggggagcagctgatacagcaaggagggctcttgcaaggattcaagctccgagccctggaggagcagcacggagcgggagagcgtggcgagagaatgaagaaaccaatcgcccgggagaagcatgaggtggcagtgtggcactcggtttagagggcttcggccggcggtggccccatggacagccctgctggcactgggcctgcctggctgggtgttggctgtctcagccacggcggctgctgtggtccccgagcagcatgcctccgtagctggccagcatcccctggactggctgctcacagaccggggccccttccaccgcgctcaggagtatgctgacttcatggagcggtaccgccagggtttcaccaccaggtacaggatttatagggagtttgcccgttggaaggtgaacaacttggctctggaaaggaaggacttcttcagtttgccattgcctcttgccccagagtttatccggaacattcgcctccttggaaggagacccaatctgcaacaggttacagaaaatctgattaaaaagtacggcactcatttcttactttctgccacccttggaggagaagagtccctgaccatttttgtggacaagcagaaactgggaagaaagacagagacaacaggaggtgcctctataatcgggggcagtgggaacagcacagctgtgtccctggagaccctgcaccagctggccgcctcctacttcatcgacagagagagcacgctgcgacggctgcaccatatccagatagccacgggggccatcaaggtcaccgagaccaggaccggtcctctgggctgcagcaactatgacaatctggactcagtcagttctgtcttggtacagagtccagagaacaaagtacagttacttggccttcaggtgctgctgcctgagtatctgcgtgagcgctttgtagctgcagcactcagctacatcacatgcagctctgagggtgagctcgtctgcaaggagaatgactgctggtgcaagtgcagccccaccttccctgaatgcaactgccctgatgctgacatccaggccatggaggacagcctgctgcagatccaggactcctgggccactcacaaccggcagtttgaagagtcagaagagttccaggccctgctgaaaaggctgcccgatgaccggttcctgaactccacagctatctcccagttctgggccatggacaccagccttcagcaccgctaccagcagctgggagctggcttgaaagtgctgttcaaaaagacccatcggatcctacgccggctcttcaacctctgcaagcgctgccatcgccagcctcgcttccgcctgcccaaggagaggtccttgtcctactggtggaaccgaatccagtccctcctctactgtggggaaagcacctttcctggcactttcctggaacagagccacagctgcacctgcccctatgaccaatcttcctgccagggccccatcccatgtgccttgggcgaagggcccgcgtgtgcccactgtgctccagacaatagcacacgctgtgggagctgcaacccgggctatgtgctggcccaggggctgtgccggccagaggtggccgagtccctggaaaactttcttgggctggagacagacttgcaggacctggagctaaagtacctgctgcagaagcaggatagccgcattgaggtacactccatcttcatcagcaatgacatgcggctgggcagctggtttgacccttcctggaggaagcgcatgctgctcaccctgaagagcaacaagtacaagcctgggctggtgcacgtgatgttggccttgtccttgcagatctgtctcaccaagaacagcaccctggagcctgtcatggccatctacgtcaacccctttgggggcagccactctgagagctggttcatgcctgtgaatgagggcagctttcctgactgggaaaggactaacgtggatgcagctgcccagtgccaaaactggactatcaccttggggaataggtggaagactttctttgagacagttcatgtttacctacggagccgaatcaagtccctggatgacagctccaatgagacaatctactatgagcccctggagatgactgatccctctaagaatttgggttacatgaaaattaacaccttgcaggtctttggctacagcctgccctttgacccagatgctatccgggacttaattctccagttggactacccatatactcaaggttcccaggactctgcactcttgcagctcattgagctcagggaccgggtgaaccagctttctccacctggcaaagtccgacttgaccttttctcctgcttgctccggcatcggcttaagctggccaacaatgaggtgggcaggatccagtcctccctgagggctttcaattctaagctgccaaaccctgtggaatatgagaccggcaaactctgtagctaatgggcggcccacttcagcactgggcaaggaggggatccatgaatctggggtacaaagataatctaagccctcaccttagtgccaacagggtgtgctcccacgagactttcagcatccagtagatgggacctcgaggctcgagctgaagcaggcgagagagaaacagctactgcgtgcgtgcgcgcacgcatacacacacacacacacacactggcacagggaggctacaactaagcagcctcagatctgtaaagttgattggtgctttctaaaatgaatgcaattgaaagaaaggagccaaggaagagattaagaaaaagaaccagctgaaccatgaaacaaacaaaaatcctaaaagtgattcttgtcattcaagaaagcaagaggggacaacaatgggaggggtcggagctcttccttcccctctgtggagtcacttttgtattctttttaaccagatttcttaaaatgttgttgttttgtgaatcctgacattggttcttacttttgtatgctgcctcctctgtgccctcccagacgctgactgggaaacacaagaagtacaaccaacaggaaccagcgccaagggcaggcagcggcctccttgctcccctcccttactcctccctctgctgcctcctccccccaccaagtttcagggccctggattgttcccagttcccattgtggtcccttcagagctcctttccaacagcatctctctgtcgaagaaagaagctctgtcaagttagagagagacaatgtgtaggaaatgttcttttttaaaaaaaaataacaaaaacaaaacaaaactatttattttgtgattgttttccttgttaatctgctccaaccacctgaacatctaagtaaacatttatctggtttaatata

SEQ ID NO: 3156 - protein, 783 aa, Homo sapiens; identical to SEQ ID NO: 198

SEQ ID NO: 3157 - DNA, 777 bp, Homo sapiens
caatgattccattatcagataatctctcagatagtgatgcctataatattgtttataaagacatgtccttgtctgttttcctttcatcacaggataatggaagtaaaccaaggaggtatacgtgtgggattgtgtccggaattggtgggttcttggtctcactgacttcaagaatgaagccgcggaccctcgcgcatgtatttcctattctgtctggttggcttgctgcttaaaaatcagaatacagaagagaagacagtcttgtggagggtcaaaggagccactgtttgtagttatttgggatctttgaggaaacccctgctaaaataacttgattggagattttccttagtctggaccaaaccttcccattattggacacagatggtcagctagtaatcaatcatctataattatgctttggaaaaacctcatgagcaaagaccctcgacttgtagtcaaagctacaatttgacatttcccaggattggacgaggccagtaaggtgaaagagtagaggcctgaagattccagagagctagtaacaacttcactgaagtggctgagatccacagtgtgtcaggaggtgtttctagagaggtacagtagatgggaaatgagaggacatgaattcagtaagctccttaacctcctgcctcatttatcaaatgggtctgatgaaagtgatatatatgaaagcacctggcataatattggtcagattgtggtgcttgatgatggaatggtgcataaataaataaacacgggctctcaatc

SEQ ID NO: 3158 - protein, 76 aa, Homo sapiens
MIPLSDNLSDSDAYNIVYKDMSLSVFLSSQDNGSKPRRYTCGIVSGIGGFLVSLTSRMKPRTLAHVFPILSGWLAA

SEQ ID NO: 3159 - DNA, 4993 bp, Homo sapiens
tgatgctaagaagcacaaactgcattttgaatctaagtccctgtattttctgtgaaggagctgtaagtagggtgggacagagatggcacctgggggttctgaggcacccgctcctctctgagacagacagggatcaggagccggactgggaccagaccaccagcaacacaccagaggatgttctctaaataagaccatggcacttaagaacattaactaccttctcatcttctacctcagtttctcactgcttatctacataaaaaattccttttgcaataaaaacaacaccaggtgcctctcaaattcttgccaaaacaattctacatgcaaagatttttcaaaagacaatgattgttcttgttcagacacagccaataatttggacaaagactgtgacaacatgaaagacccttgcttctccaatccctgtcaaggaagtgccacttgtgtgaacaccccaggagaaaggagctttctgtgcaaatgtcctcctgggtacagtgggacaatctgtgaaactaccattggttcctgtggcaagaactcctgccaacatggaggtatttgccatcaggaccctatttatcctgtctgcatctgccctgctggatatgctggaagattctgtgagatagatcacgatgagtgtgcttccagcccttgccaaaatggggccgtgtgccaggatggaattgatggttactcctgcttctgtgtcccaggatatcaaggcagacactgcgacttggaagtggatgaatgtgcttcagatccctgcaagaacgaggctacatgcctcaatgaaataggaagatatacttgtatctgtccccacaattattctggtgtaaactgtgaattggaaattgacgaatgttggtcccagccttgtttaaatggtgcaacttgtcaggatgctctgggggcctatttctgcgactgtgcccctggattcctgggggatcactgtgaactcaacactgatgagtgtgccagtcaaccttgtctccatggagggctgtgtgtggatggagaaaacagatatagctgtaactgcacgggtagtggattcacagggacacactgtgagaccttgatgcctctttgttggtcaaaaccttgtcacaataatgctacatgtgaggacagtgttgacaattacacttgtcactgctggcctggatacacaggtgcccagtgtgagatcgacctcaatgaatgcaatagtaacccctgccagtccaatggggaatgtgtggagctgtcctcagagaaacaatatggacgcatcactggactgccttcttctttcagctaccatgaagcctcaggttatgtctgtatctgtcagcctggattcacaggaatccactgcgaagaagacgtcaatgaatgttcttcaaacccttgccaaaatggtggtacttgtgagaacttgcctgggaattatacttgccattgcccatttgataacctttctagaactttttatggaggaagggactgttctgatattctcctgggctgtacccatcagcaatgtctaaataatggaacatgcatccctcacttccaagatggccagcatggattcagctgcctatgtccatctggctacaccgggtccctgtgtgaaatcgcaaccacactttcatttgagggcgatggcttcctgtgggtcaaaagtggctcagtgacaaccaagggctcagtttgtaacatagccctcaggtttcagactgttcagccaatggctcttctacttttccgaagcaacagggatgtgtttgtgaagctggagctgctaagtggctacattcacttatcaattcaggtcaataatcagtcaaaggtgcttctgttcatttcccacaacaccagcgatggagagtggcatttcgtggaggtaatatttgcagaggctgtgacccttaccttaatcgacgactcctgtaaggagaaatgcatcgcgaaagctcctactccacttgaaagtgatcaatcaatatgtgcttttcagaactcctttttgggtggtttaccagtgggaatgaccagcaatggtgttgctctgcttaacttctataatatgccatccacaccttcgtttgtaggctgtctccaagacattaaaattgattggaatcacattaccctggagaacatctcgtctggctcatcattaaatgtcaaggcaggctgtgtgagaaaggattggtgtgaaagccaaccttgtcaaagcagaggacgctgcatcaacttgtggctgagttaccagtgtgactgccacaggccctatgaaggccccaactgtctgagagagtatgtggcaggcagatttggccaggatgactccactggttatgtcatctttactcttgatgagagctatggagacaccatcagcctctccatgtttgtccgaacgcttcaaccatcaggcttacttctagctttggaaaacagcacttatcaatatatccgtgtctggctagagcgcggcagactagcaatgctgactccaaactctcccaaattagtagtaaaatttgttcttaatgatggaaatgtccacttgatatctttgaaaatcaagccatataaaattgaactgtatcagtcttcacaaaacctaggatttatttctgcttctacgtggaaaatcgaaaagggagatgtcatctacattggtggcctacctgacaagcaagagactgaacttaatggtggattcttcaaaggctgtatccaagatgtaagactaaacaaccaaaatctggaattctttccaaatccaacaaacaatgcatctctcaatccagttcttgtcaatgtaacccaaggctgtgctggagacaacagctgcaagtccaacccctgtcacaatggaggtgtttgccattcccggtgggatgacttctcctgttcctgtcctgccctcacaagtgggaaagcctgtgaggaggttcagtggtgtggattcagcccgtgtcctcacggagcccagtgccagccggtgcttcaaggatttgaatgtattgcaaatgctgtttttaatggacaaagcggtcaaatattattcagaagcaatgggaatattaccagagaactcaccaatatcacatttggtttcagaacaagggatgcaaatgtaataatattgcatgcagaaaaagagcctgaatttcttaatattagcattcaagattccagattattctttcaattgcaaagtggcaacagcttttatatgctaagtctgacaagtttgcagtcagtgaatgatggcacatggcacgaagtgaccctttccatgacagacccactgtcccagacctccaggtggcaaatggaagtggacaacgaaacaccttttgtgaccagcacaattgctactggaagcctcaactttttgaaggataatacagatatttatgtgggagacagagctattgacaatataaagggcctgcaagggtgtctaagtacaatagaaatcggaggcatttatctctcttactttgaaaatgttcatggtttcattaataaacctcaggaagagcaatttctcaaaatctctaccaattcagtggtcactggctgtttgcagttaaatgtctgcaactccaacccctgtttgcatggaggaaactgtgaagacatctatagctcttatcattgctcctgtcccttgggatggtcagggaaacactgtgaactcaacatcgatgaatgcttttcaaacccctgtatccatggcaactgctctgacagagttgcagcctaccactgcacatgtgagcctggatacactggtgtgaactgtgaagtggatatagacaactgccagagtcaccagtgtgcaaatggagccacctgcattagtcatactaatggctattcttgcctctgttttggaaattttacaggaaaattttgcagacagagcagattaccctcaacagtctgtgggaatgagaagacaaatctcacttgctacaatggaggcaactgcacagagttccagactgaattaaaatgtatgtgccggccaggttttactggagaatggtgtgaaaaggacattgatgagtgtgcctctgatccgtgtgtcaatggaggtctgtgccaggacttactcaacaaattccagtgcctctgtgatgttgcctttgctggcgagcgctgcgaggtggacttggcagatgacttgatctccgacattttcaccactattggctcagtgactgtcgccttgttactgatcctcttgctggccattgttgcttctgttgtcacctccaacaaaagggcaactcagggaacctacagccccagccgtcaggagaaggagggctcccgagtggaaatgtggaacttgatgccaccccctgcaatggagagactgatttaggagcattgtgtcccttcgagatggggatccacacactgtgaatgtgatgactgtacttcaggtatctctgacatacctgacaatgttaatctgcaactgggattacactggaactacaggaatgattcctttgaccaccttaaaaactttcacagtggttccgctcgacaccattgttttattatattatatcagccaattgcaaaaaaagtctgtgccagtaatttcagccttataattagcaaaaacatcttccagagaataaagtcttctgtggctttagtggctatcactgaaactctttcctcttttcaacctgggaacaaattttagttttcattttaggtttctgtactttctgtagtttctgtgtaaactgccatatgtttacatggaaactacaggaaaaaattggctacatttctcacttctcctatcatgtggtcaaagttattgttgtataccagcgatgggatgtatacttttgtccttcattcatggattcagagaaagctctgggaatgacttatggtccaaaaaagtgacccaatggcaacaaataaaaattgaaatgca

SEQ ID NO: 3160 - protein, 1406 aa, Homo sapiens; identical to SEQ ID NO: 200

SEQ ID NO: 3161 - DNA, 5235 bp, Homo sapiens
tgatgctaagaagcacaaactgcattttgaatctaagtccctgtattttctgtgaaggagctgtaagtagggtgggacagagatggcacctgggggttctgaggcacccgctcctctctgagacagacagggatcaggagccggactgggaccagaccaccagcaacacaccagaggatgttctctaaataagaccatggcacttaagaacattaactaccttctcatcttctacctcagtttctcactgcttatctacataaaaaattccttttgcaataaaaacaacaccaggtgcctctcaaattcttgccaaaacaattctacatgcaaagatttttcaaaagacaatgattgttcttgttcagacacagccaataatttggacaaagactgtgacaacatgaaagacccttgcttctccaatccctgtcaaggaagtgccacttgtgtgaacaccccaggagaaaggagctttctgtgcaaatgtcctcctgggtacagtgggacaatctgtgaaactaccattggttcctgtggcaagaactcctgccaacatggaggtatttgccatcaggaccctatttatcctgtctgcatctgccctgctggatatgctggaagattctgtgagatagatcacgatgagtgtgcttccagcccttgccaaaatggggccgtgtgccaggatggaattgatggttactcctgcttctgtgtcccaggatatcaaggcagacactgcgacttggaagtggatgaatgtgcttcagatccctgcaagaacgaggctacatgcctcaatgaaataggaagatatacttgtatctgtccccacaattattctggtgtaaactgtgaattggaaattgacgaatgttggtcccagccttgtttaaatggtgcaacttgtcaggatgctctgggggcctatttctgcgactgtgcccctggattcctgggggatcactgtgaactcaacactgatgagtgtgccagtcaaccttgtctccatggagggctgtgtgtggatggagaaaacagatatagctgtaactgcacgggtagtggattcacagggacacactgtgagaccttgatgcctctttgttggtcaaaaccttgtcacaataatgctacatgtgaggacagtgttgacaattacacttgtcactgctggcctggatacacaggtgcccagtgtgagatcgacctcaatgaatgcaatagtaacccctgccagtccaatggggaatgtgtggagctgtcctcagagaaacaatatggacgcatcactggactgccttcttctttcagctaccatgaagcctcaggttatgtctgtatctgtcagcctggattcacaggaatccactgcgaagaagacgtcaatgaatgttcttcaaacccttgccaaaatggtggtacttgtgagaacttgcctgggaattatacttgccattgcccatttgataacctttctagaactttttatggaggaagggactgttctgatattctcctgggctgtacccatcagcaatgtctaaataatggaacatgcatccctcacttccaagatggccagcatggattcagctgcctatgtccatctggctacaccgggtccctgtgtgaaatcgcaaccacactttcatttgagggcgatggcttcctgtgggtcaaaagtggctcagtgacaaccaagggctcagtttgtaacatagccctcaggtttcagactgttcagccaatggctcttctacttttccgaagcaacagggatgtgtttgtgaagctggagctgctaagtggctacattcacttatcaattcaggtcaataatcagtcaaaggtgcttctgttcatttcccacaacaccagcgatggagagtggcatttcgtggaggtaatatttgcagaggctgtgacccttaccttaatcgacgactcctgtaaggagaaatgcatcgcgaaagctcctactccacttgaaagtgatcaatcaatatgtgcttttcagaactcctttttgggtggtttaccagtgggaatgaccagcaatggtgttgctctgcttaacttctataatatgccatccacaccttcgtttgtaggctgtctccaagacattaaaattgattggaatcacattaccctggagaacatctcgtctggctcatcattaaatgtcaaggcaggctgtgtgagaaaggattggtgtgaaagccaaccttgtcaaagcagaggacgctgcatcaacttgtggctgagttaccagtgtgactgccacaggccctatgaaggccccaactgtctgagagagtatgtggcaggcagatttggccaggatgactccactggttatgtcatctttactcttgatgagagctatggagacaccatcagcctctccatgtttgtccgaacgcttcaaccatcaggcttacttctagctttggaaaacagcacttatcaatatatccgtgtctggctagagcgcggcagactagcaatgctgactccaaactctcccaaattagtagtaaaatttgttcttaatgatggaaatgtccacttgatatctttgaaaatcaagccatataaaattgaactgtatcagtcttcacaaaacctaggatttatttctgcttctacgtggaaaatcgaaaagggagatgtcatctacattggtggcctacctgacaagcaagagactgaacttaatggtggattcttcaaaggctgtatccaagatgtaagactaaacaaccaaaatctggaattctttccaaatccaacaaacaatgcatctctcaatccagttcttgtcaatgtaacccaaggctgtgctggagacaacagctgcaagtccaacccctgtcacaatggaggtgtttgccattcccggtgggatgacttctcctgttcctgtcctgccctcacaagtgggaaagcctgtgaggaggttcagtggtgtggattcagcccgtgtcctcacggagcccagtgccagccggtgcttcaaggatttgaatgtattgcaaatgctgtttttaatggacaaagcggtcaaatattattcagaagcaatgggaatattaccagagaactcaccaatatcacatttggtttcagaacaagggatgcaaatgtaataatattgcatgcagaaaaagagcctgaatttcttaatattagcattcaagattccagattattctttcaattgcaaagtggcaacagcttttatatgctaagtctgacaagtttgcagtcagtgaatgatggcacatggcacgaagtgaccctttccatgacagacccactgtcccagacctccaggtggcaaatggaagtggacaacgaaacaccttttgtgaccagcacaattgctactggaagcctcaactttttgaaggataatacagatatttatgtgggagacagagctattgacaatataaagggcctgcaagggtgtctaagtacaatagaaatcggaggcatttatctctcttactttgaaaatgttcatggtttcattaataaacctcaggaagagcaatttctcaaaatctctaccaattcagtggtcactggctgtttgcagttaaatgtctgcaactccaacccctgtttgcatggaggaaactgtgaagacatctatagctcttatcattgctcctgtcccttgggatggtcagggaaacactgtgaactcaacatcgatgaatgcttttcaaacccctgtatccatggcaactgctctgacagagttgcagcctaccactgcacatgtgagcctggatacactggtgtgaactgtgaagtggatatagacaactgccagagtcaccagtgtgcaaatggagccacctgcattagtcatactaatggctattcttgcctctgttttggaaattttacaggaaaattttgcagacagagcagattaccctcaacagtctgtgggaatgagaagacaaatctcacttgctacaatggaggcaactgcacagagttccagactgaattaaaatgtatgtgccggccaggttttactggagaatggtgtgaaaaggacattgatgagtgtgcctctgatccgtgtgtcaatggaggtctgtgccaggacttactcaacaaattccagtgcctctgtgatgttgcctttgctggcgagcgctgcgaggtggacgtaagcagcctctccttttatgtctctctcttattctggcagaatctttttcagcttctttcttacctcattttgcgtatgaatgacgagccagttgttgagtggggtgaacaggaagattattaacatacatttgaacattcccaaatgaaaaaaaaagccattgaatttcaagaaatgccttgattcattttagatctctggggaagaaaaaggaaataaaaaccatctcaataattaagttggcagatgacttgatctccgacattttcaccactattggctcagtgactgtcgccttgttactgatcctcttgctggccattgttgcttctgttgtcacctccaacaaaagggcaactcagggaacctacagccccagccgtcaggagaaggagggctcccgagtggaaatgtggaacttgatgccaccccctgcaatggagagactgatttaggagcattgtgtcccttcgagatggggatccacacactgtgaatgtgatgactgtacttcaggtatctctgacatacctgacaatgttaatctgcaactgggattacactggaactacaggaatgattcctttgaccaccttaaaaactttcacagtggttccgctcgacaccattgttttattatattatatcagccaattgcaaaaaaagtctgtgccagtaatttcagccttataattagcaaaaacatcttccagagaataaagtcttctgtggctttagtggctatcactgaaactctttcctcttttcaacctgggaacaaattttagttttcattttaggtttctgtactttctgtagtttctgtgtaaactgccatatgtttacatggaaactacaggaaaaaattggctacatttctcacttctcctatcatgtggtcaaagttattgttgtataccagcgatgggatgtatacttttgtccttcattcatggattcagagaaagctctgggaatgacttatggtccaaaaaagtgacccaatggcaacaaataaaaattgaaatgca

SEQ ID NO: 3162 - protein, 1376 aa, Homo sapiens
MALKNINYLLIFYLSFSLLIYIKNSFCNKNNTRCLSNSCQNNSTCKDFSKDNDCSCSDTANNLDKDCDNMKDPCFSNPCQGSATCVNTPGERSFLCKCPPGYSGTICETTIGSCGKNSCQHGGICHQDPIYPVCICPAGYAGRFCEIDHDECASSPCQNGAVCQDGIDGYSCFCVPGYQGRHCDLEVDECASDPCKNEATCLNEIGRYTCICPHNYSGVNCELEIDECWSQPCLNGATCQDALGAYFCDCAPGFLGDHCELNTDECASQPCLHGGLCVDGENRYSCNCTGSGFTGTHCETLMPLCWSKPCHNNATCEDSVDNYTCHCWPGYTGAQCEIDLNECNSNPCQSNGECVELSSEKQYGRITGLPSSFSYHEASGYVCICQPGFTGIHCEEDVNECSSNPCQNGGTCENLPGNYTCHCPFDNLSRTFYGGRDCSDILLGCTHQQCLNNGTCIPHFQDGQHGFSCLCPSGYTGSLCEIATTLSFEGDGFLWVKSGSVTTKGSVCNIALRFQTVQPMALLLFRSNRDVFVKLELLSGYIHLSIQVNNQSKVLLFISHNTSDGEWHFVEVIFAEAVTLTLIDDSCKEKCIAKAPTPLESDQSICAFQNSFLGGLPVGMTSNGVALLNFYNMPSTPSFVGCLQDIKIDWNHITLENISSGSSLNVKAGCVRKDWCESQPCQSRGRCINLWLSYQCDCHRPYEGPNCLREYVAGRFGQDDSTGYVIFTLDESYGDTISLSMFVRTLQPSGLLLALENSTYQYIRVWLERGRLAMLTPNSPKLVVKFVLNDGNVHLISLKIKPYKIELYQSSQNLGFISASTWKIEKGDVIYIGGLPDKQETELNGGFFKGCIQDVRLNNQNLEFFPNPTNNASLNPVLVNVTQGCAGDNSCKSNPCHNGGVCHSRWDDFSCSCPALTSGKACEEVQWCGFSPCPHGAQCQPVLQGFECIANAVFNGQSGQILFRSNGNITRELTNITFGFRTRDANVIILHAEKEPEFLNISIQDSRLFFQLQSGNSFYMLSLTSLQSVNDGTWHEVTLSMTDPLSQTSRWQMEVDNETPFVTSTIATGSLNFLKDNTDIYVGDRAIDNIKGLQGCLSTIEIGGIYLSYFENVHGFINKPQEEQFLKISTNSVVTGCLQLNVCNSNPCLHGGNCEDIYSSYHCSCPLGWSGKHCELNIDECFSNPCIHGNCSDRVAAYHCTCEPGYTGVNCEVDIDNCQSHQCANGATCISHTNGYSCLCFGNFTGKFCRQSRLPSTVCGNEKTNLTCYNGGNCTEFQTELKCMCRPGFTGEWCEKDIDECASDPCVNGGLCQDLLNKFQCLCDVAFAGERCEVDVSSLSFYVSLLFWQNLFQLLSYLILRMNDEPVVEWGEQEDY

SEQ ID NO: 3163 - DNA, 10269 bp, Homo sapiens
gcgagaaagaggtgacattgaagaacaagcccacacttctggatatggtccaaaatgatcagaaactcactctgtcaacctagtaggtgtttggatggatacctcttttttaacagaaagatgtttggagccaggacacatggttttcacattttaatggcaatgctcataggaatccactgcgaagaagacgtcaatgaatgttcttcaaacccttgccaaaatggtggtacttgtgagaacttgcctgggaattatacttgccattgcccatttgataacctttctagaactttttatggaggaagggactgttctgatattctcctgggctgtacccatcagcaatgtctaaataatggaacatgcatccctcacttccaagatggccagcatggattcagctgcctatgtccatctggctacaccgggtccctgtgtgaaatcgcaaccacactttcatttgagggcgatggcttcctgtgggtcaaaagtggctcagtgacaaccaagggctcagtttgtaacatagccctcaggtttcagactgttcagccaatggctcttctacttttccgaagcaacagggatgtgtttgtgaagctggagctgctaagtggctacattcacttatcaattcaggtcaataatcagtcaaaggtgcttctgttcatttcccacaacaccagcgatggagagtggcatttcgtggaggtaatatttgcagaggctgtgacccttaccttaatcgacgactcctgtaaggagaaatgcatcgcgaaagctcctactccacttgaaagtgatcaatcaatatgtgcttttcagaactcctttttgggtggtttaccagtgggaatgaccagcaatggtgttgctctgcttaacttctataatatgccatccacaccttcgtttgtaggctgtctccaagacattaaaattgattggaatcacattaccctggagaacatctcgtctggctcatcattaaatgtcaaggcaggctgtgtgagaaaggattggtgtgaaagccaaccttgtcaaagcagaggacgctgcatcaacttgtggctgagttaccagtgtgactgccacaggccctatgaaggccccaactgtctgagagagtatgtggcaggcagatttggccaggatgactccactggttatgtcatctttactcttgatgagagctatggagacaccatcagcctctccatgtttgtccgaacgcttcaaccatcaggcttacttctagctttggaaaacagcacttatcaatatatccgtgtctggctagagcgcggcagactagcaatgctgactccaaactctcccaaattagtagtaaaatttgttcttaatgatggaaatgtccacttgatatctttgaaaatcaagccatataaaattgaactgtatcagtcttcacaaaacctaggatttatttctgcttctacgtggaaaatcgaaaagggagatgtcatctacattggtggcctacctgacaagcaagagactgaacttaatggtggattcttcaaaggctgtatccaagatgtaagactaaacaaccaaaatctggaattctttccaaatccaacaaacaatgcatctctcaatccagttcttgtcaatgtaacccaaggctgtgctggagacaacagctgcaagtccaacccctgtcacaatggaggtgtttgccattcccggtgggatgacttctcctgttcctgtcctgccctcacaagtgggaaagcctgtgaggaggttcagtggtgtggattcagcccgtgtcctcacggagcccagtgccagccggtgcttcaaggatttgaatgtattgcaaatgctgtttttaatggacaaagcggtcaaatattattcagaagcaatgggaatattaccagagaactcaccaatatcacatttggtttcagaacaagggatgcaaatgtaataatattgcatgcagaaaaagagcctgaatttcttaatattagcattcaagattccagattattctttcaattgcaaagtggcaacagcttttatatgctaagtctgacaagtttgcagtcagtgaatgatggcacatggcacgaagtgaccctttccatgacagacccactgtcccagacctccaggtggcaaatggaagtggacaacgaaacaccttttgtgaccagcacaattgctactggaagcctcaactttttgaaggataatacagatatttatgtgggagacagagctattgacaatataaagggcctgcaagggtgtctaagtacaatagaaatcggaggcatttatctctcttactttgaaaatgttcatggtttcattaataaacctcaggaagagcaatttctcaaaatctctaccaattcagtggtcactggctgtttgcagttaaatgtctgcaactccaacccctgtttgcatggaggaaactgtgaagacatctatagctcttatcattgctcctgtcccttgggatggtcagggaaacactgtgaactcaacatcgatgaatgcttttcaaacccctgtatccatggcaactgctctgacagagttgcagcctaccactgcacatgtgagcctggatacactggtgtgaactgtgaagtggatatagacaactgccagagtcaccagtgtgcaaatggagccacctgcattagtcatactaatggctattcttgcctctgttttggaaattttacaggaaaattttgcagacagagcagattaccctcaacagtctgtgggaatgagaagacaaatctcacttgctacaatggaggcaactgcacagagttccagactgaattaaaatgtatgtgccggccaggttttactggagaatggtgagtcacattagagccttctggaagagaattctgagctaaagaatgatgggattactcaaagttcattttctcctctaattttttatctcagttcccataggaaaatctatgctgaaatagaggttcagacagaatgaaacaataaaaaagaagaaaaactacagtttaggtcaaaggggagaacattttattagacaaaacttcaaatagggaaaaatgatttttaaaaaatgtataatgtgctatttttctttcttataagtacttctgaattcatgtctcttttttgttgctaactctaatacatgatgcaaatatggttgctgtcgaggtaaaataaattacaactaaaagattgcctcatagaattgcctacaacccaaaagtatatataccttatccatatgagtctacttttcccagagaaactcttcaactgttcttcacctcatacaggaattcttaaaatggagttggtcaatggcttcaggcaatctgtgacctgctgaaaatacaggaaaattagaatatgtatttgagtggctaggggtaagttcaggggtagaaataatgcatactgaatagcttttatcagctgcttaaagggatttatgtccccaaaacagttatgaactggggctctatagaatacagatactatataagcagataattgttaaccttttgttttagcactgtgccatgcaccttacaaataccatctctaattcttatagctctgtaaagaaggtttcatgatttttattttgcatatgtgtaaactgaggctgagaggttgagtgacgtataaagggcctatccacacgtttgctgcagtaaggttgagctgccttcaaagcctctgctcttctatttgatgtgccagcataactgtatgaataaatctttgctcaacacaatttctttttttttaatgagaaaggtgttcttccatctcatgtatcatcgagggtaagataagtgatctctgatcaaacttcctacattgaaaaaattaaataaactgagctcagacatatttgacaaagatattttgactgactcaatatttcccataagcatagttaataaaataatggatatgtgagtgctccctggcaagtgccctttggattaattggaattttctgttttctagctggcctcttttgcatcacaaagacacaggtcttttgccatttttacaaaacagcggggagtctagggtatacctgaatttgacccttttaacgttcattttcatttgcagcctgccttctgtggttggttctttgtggtacaggcattccaagtctatatgtgcatgaaaggagatagccttgagtcacattctgctttctgttgcaccaattttggttctgcaacttattaactgagatcgtttagttgtattccaattccatgtatctttcaaaatattgcaaatattttcttgtcattaattttgagtaatccaactattgtcaagggtgggttgcttcctggttgaacgtcacactttctgcctaatggcacaatgcatggaactcatccaaaaccctggattatttttctctgccactcacacattgtttctatttacaacaaatatctccctgtcttctgatatttattagtttacaaaatttatatttgacatttaaattcagatatatttgaaatatagaaagaaaagaaagcttagagttttccttcttttcccaggagacttttcaactggaaaaacttacatgatgctagatatttctaaaacattgaacctgtgttcagtagattctatgctttcaaagtccttaaccatcattacttaattgactagatgttaatggatttatttttacttttcatgcattaattaacctctaataaaaatgccaatgatgctgataatacatgtgtatctattgttgactgtttagttcaacagagaaataggtgagaaagtgatggagtagttagaggaagacagaaaatagtgggctatctcccatggcctagggaaatgtgacttccatcacatccaaggatattgaaaagctatcctcaaataaattggcttctctcctgccttggttaaaccttcagcttaatagtgtcatcctggcaggttttgaatgatggatggtgtgaacactctggcccacccaagaccgagaatgcttggcaggctcctgagggttgtcaagttttgctcagatctaatcagagaagtctccctccagtccagaagcataagccaaaaaaggaaaacaaaatgtctcagctatgcttggtatccaaagggataaggagctgtttttcttggaagaaatctttgttttcctttataccttgggctggccttgccccactacctcaccccctttcattttgagcctagtgattagtctctgacccatacgtgcaagttttacattttggaaggtgagggaaagaataagggaaaattaaaaattgtttacatacaatttcaacattataagctgcactatagagatcttggagctaagattttatataaattttcaaaagtaaaatagccgccttagttgctgttctatcccaaggtcttagcagagtgtttgtcacatagtatgtgttaaataaatatccactgtgtgactgaatacatgattggtgacttaatccatgaatatacagaaaaacaaattcttgctggaaaattagtttaaaaaaatgacaatatcccaggaagaagaaaacttcaatttacctgagacttgatgtcacttgtcttggaaaatttggcttttgaaagtcattctacctcaacatttcagaaattatgcttggctattggaacacagatttattagcaagtacaatcttctaattattgatttttgcttttgttataaaaaaaggatttccacagaaaataattcaaaatctctcagaataaacctctcctcttcctcctcctcctccttccctccttcttttttttttttttttttttttttggtttctctttggtgggctttttccttagcctgagggctctgatgcatgaggatcctgatagcctgaatgtaggtctgccctgcagactccagatggcaaaatacagcctctctccttgtgcccctaataaactgaacatttatataaggtggcaaccacactaatgctcttgagcattgacactggtgtaggcatggcccacttttctcttggtttctaaatatttgcatctattttctcattctaattaattccgtgtgtatatgtatatatatgtgtacagattatttccattaaaccccaaatgtgttaaagaaattttaagaaacatctccgacattatcaagtatgtataaagtatgtgtggatgggtagataagactgtgctgttccagagagataaggcaaactttttcttcccatttcacaaccaatgtattcaacagggacctgggtttctgctgttctgtttattttgaaggtgtgaaaaggacattgatgagtgtgcctctgatccgtgtgtcaatggaggtctgtgccaggacttactcaacaaattccagtgcctctgtgatgttgcctttgctggcgagcgctgcgaggtggacgtaagcagcctctccttttatgtctctctcttattctggcagaatctttttcagcttctttcttacctcattttgcgtatgaatgacgagccagttgttgagtggggtgaacaggaagattattaacatacatttgaacattcccaaatgaaaaaaaaagccattgaatttcaagaaatgccttgattcattttagatctctggggaagaaaaaggaaataaaaaccatctcaataattaaggtaaattcaaggcttattttaaacatatcagaagcactttgtctgtgtataaaatattttcctattctaactttaaatatgaaaaaagtgttcttaatataactagaaatatctccttattgtgtgtatttagtacaaacatattatcattctcaacacttctatatgtgaatgaccactgcaatttcttcccactccatttctgggtattttcacattttaagttgccctccatcactatgattctattttcatttctgttctttcattcttatctattatttatgacacaaaaattgagaattacaggccaggtgtggtggttcactcctataatcccagcactatgggaggctgaagtgggcggaacacctgaggccaggagtttgagaccagcctagccaacgtggtgaaaacctgtctctactaaaaatacaaaagtaactgggagtggtggcacatgcctgtaatcccagctactcaggagggtgaagcaggagacttgcttgaacccaggaggcggccgttgcaatgagccaagattgtgccactgcactccagcctgggcgacaggtgagattctgtctaaaaaaaaaaaaaaaaaaagagagaattaccgattaaaattactgattatattcatctatgtttttacatgaagctattcaaatgaattgttacgttttctctgatatatgattaaatatataaagagaaatcaggaatttacatcgagtccctaaattgtagaaaaacaattatctagtatcagtactcaaattatacctccctggtataatttctgattccataaaactgtctctctaacaaagttacaaataatcctttctctatttcctttcctgcaatactttcccttttcctaacaaatagaacaatttttctgttgtttctaaatttatgagctccttgacttttctatcaaatggactaatttcagttgcttttcaatgaatatttaataaaaataagcactgtagtttatacataaatttaaaagtatatattgtaaaacttgaattttcttagaagcatggttttctaagatttgcaagtaaatttattttcttaagtatctttcagaaaaaaatatgaaagcatagtatacatcataaccaaaatatatttgacattatgattttttaaaataaatgtatacctgaaataatggatctataaagtatactaagatatgcaaaaattaatatattctttattataaatatttcagagattataaaataataatttaaaaaaactttcttaatgtttttattgtttccaccagtacgttatcatttatgctaaatatctttgtgtagatatacccttccaaagaagacgttatttgtgttcatttaaaggaaaaatagtttgatcctatgaattaattcagaaagcaactaaaataacaatggcctgccaaatgtcattttgtaaatatacgtctatgactttaggagctgtcctggtttgaaaacatgaggacagtttatccattggatgccatctatttagtcccaattaagaaagttgtttttttgtgagaatgaccaaggtaaatttaaatataccattcaaacaaacaaggacaaaataatatccttgttatagagtacatgtagcatatagtatgaagtaatatactacaaaagcaaagaaagtgtattctatcttgcaatagtaatagacaatttttatatagcaaattcatatcctttggagtagtgacaatcatttcaaactgggagcaactaattgtgaagattttccttcttactcatccattttcttcacatccaaggctgaacgtgtgatgctgctgcttcagatgatttgttccaaagttaaattttgtgacaaaagacatggggaaaaccttcccatcaatatttacattcacaagtatttgcaataagcataaaatagattatagccagaccatatgtatagttttcacatttactcccttctagacatacctgtacttatgtacttacaggctgttccaaatgtaatatgttctctaccaaatgtggttaagaaatattcactcacaatttctttctgtgtacaattctgatgcctctgttgtcactgtaattgtcagttgcttttctgttttccaaatgtcttcttgtcataaggtatctgactttaaaaaatgttttcccttttctttttattcttctgtattttccagctgcatgtgtgtgactatggcttttacatatttgcacagaaaaataaaacctttgtttctgtatcttctctttctcatcttctaatggtacttgtacttgtttgccttgactatgtcttgtatgataaaatttccaccagccatgcatacacacacacacacacacacacacacaccacagaagtactggtactgatcttcctgaatcgtgatctctttctgtgaaagtgtcactgtgagtaaacactgtggtatccaagtaaagttgcatgtactctggcaagtaatcctctagttggcattctaaagttgattacaaccctaattgttcttattattggtttacattgtccctgccaaagctagccatagttcaacctggttctaaagaggggctgttttacctaaatgacagaaatttacactaactcctctggaccaagcttctaaaacatagcctatatttacttgaataaaaactaattccattttgctgcgtttttcagatttaacattaaactaaacagggctatgtctctatgtttggccatgcctccttttttgtgtgcgtacgtggcaagtgggtttttatcaccctcccttttgcaaaataggaaaatagagagaataggcaaatttggaaaaatcagtgtttgaggaggagagacaactaagttcaattaacaccactgaggacttactctatgccaggaactgtgataagcctttttaaatactttatcttttcaattatcttttttcaatacaaggtcaaccaaaatctttttatcttccaaattcttcactaaattttcttaaaatatcttttggccatttgtaggtttaaaaatagaaactgttaagctttaattttgcaatattaaaattaaacttcttctgcaaatggtgctgcataaaatttgagtttagtgagttaggcaggaaatcagtgaagaaatctgtttctcaactgccagtattattactaatataaactattttacttctctgcttttgtacttattcaacaaatgtttaatgtatgtctactatttgccatactgtatactaggtcctgggaatagaactatgatttagacacaatgcttgctcaaaataagctgaagttatggtaaggaatgtgggttagactgggtgtggtggctcacacctgtaatcccagcactttgggaagccgaggtgggtggatgacctgcagtcaggagttcaagatcagcctgacaaacatggtgaaaccttgtctatactaaaaatacaaaaattagctgggcatggtggcgcatgcc

SEQ ID NO: 3164 - protein, 942 aa, Homo sapiens
MIRNSLCQPSRCLDGYLFFNRKMFGARTHGFHILMAMLIGIHCEEDVNECSSNPCQNGGTCENLPGNYTCHCPFDNLSRTFYGGRDCSDILLGCTHQQCLNNGTCIPHFQDGQHGFSCLCPSGYTGSLCEIATTLSFEGDGFLWVKSGSVTTKGSVCNIALRFQTVQPMALLLFRSNRDVFVKLELLSGYIHLSIQVNNQSKVLLFISHNTSDGEWHFVEVIFAEAVTLTLIDDSCKEKCIAKAPTPLESDQSICAFQNSFLGGLPVGMTSNGVALLNFYNMPSTPSFVGCLQDIKIDWNHITLENISSGSSLNVKAGCVRKDWCESQPCQSRGRCINLWLSYQCDCHRPYEGPNCLREYVAGRFGQDDSTGYVIFTLDESYGDTISLSMFVRTLQPSGLLLALENSTYQYIRVWLERGRLAMLTPNSPKLVVKFVLNDGNVHLISLKIKPYKIELYQSSQNLGFISASTWKIEKGDVIYIGGLPDKQETELNGGFFKGCIQDVRLNNQNLEFFPNPTNNASLNPVLVNVTQGCAGDNSCKSNPCHNGGVCHSRWDDFSCSCPALTSGKACEEVQWCGFSPCPHGAQCQPVLQGFECIANAVFNGQSGQILFRSNGNITRELTNITFGFRTRDANVIILHAEKEPEFLNISIQDSRLFFQLQSGNSFYMLSLTSLQSVNDGTWHEVTLSMTDPLSQTSRWQMEVDNETPFVTSTIATGSLNFLKDNTDIYVGDRAIDNIKGLQGCLSTIEIGGIYLSYFENVHGFINKPQEEQFLKISTNSVVTGCLQLNVCNSNPCLHGGNCEDIYSSYHCSCPLGWSGKHCELNIDECFSNPCIHGNCSDRVAAYHCTCEPGYTGVNCEVDIDNCQSHQCANGATCISHTNGYSCLCFGNFTGKFCRQSRLPSTVCGNEKTNLTCYNGGNCTEFQTELKCMCRPGFTGEW

SEQ ID NO: 3165 - DNA, 1286 bp, Homo sapiens
ttggtttcagaacaagggatgcaaatgtaataatattgcatgcagaaaaagagcctgaatttcttaatattagcattcaagattccagattattctttcaattgcaaagtggcaacagcttttatatgctaagtctgacaagtttgcagtcagtgaatgatggcacatggcacgaagtgaccctttccatgacagacccactgtcccagacctccaggtggcaaatggaagtggacaacgaaacaccttttgtgaccagcacaattgctactggaagcctcaactttttgaaggataatacagatatttatgtgggagacagagctattgacaatataaagggcctgcaagggtgtctaagtacaatagaaatcggaggcatttatctctcttactttgaaaatgttcatggtttcattaataaacctcaggaagagcaatttctcaaaatctctaccaattcagtggtcactggctgtttgcagttaaatgtctgcaactccaacccctgtttgcatggaggaaactgtgaagacatctatagctcttatcattgctcctgtcccttgggatggtcagggaaacactgtgaactcaacatcgatgaatgcttttcaaacccctgtatccatggcaactgctctgacagagttgcagcctaccactgcacatgtgagcctggatacactggtgtgaactgtgaagtggatatagacaactgccagagtcaccagtgtgcaaatggagccacctgcattagtcatactaatggctattcttgcctctgttttggaaattttacaggaaaattttgcagacagagcagattaccctcaacagtctgtgggaatgagaagacaaatctcacttgctacaatggaggcaactgcacagagttccagactgaattaaaatgtatgtgccggccaggttttactggagaatggtgtgaaaaggacattgatgagtgtgcctctgatccgtgtgtcaatggaggtctgtgccaggacttactcaacaaattccagtgcctctgtgatgttgcctttgctggcgagcgctgcgaggtggacgcgaccctgagattgccatactgtgaagaagcttggaatgaaaataacatgtcaagagagagtcccagccatgccagacatccctgctgaacccggcctcagtcaccgtgcctgctggatgcaatcacttagtgacccacgtgagaacagcaaaggaaccaccagctcaatccacaaaatcatgagaaacagtaaattgttttaagccattaa

SEQ ID NO: 3166 - protein, 345 aa, Homo sapiens
MLSLTSLQSVNDGTWHEVTLSMTDPLSQTSRWQMEVDNETPFVTSTIATGSLNFLKDNTDIYVGDRAIDNIKGLQGCLSTIEIGGIYLSYFENVHGFINKPQEEQFLKISTNSVVTGCLQLNVCNSNPCLHGGNCEDIYSSYHCSCPLGWSGKHCELNIDECFSNPCIHGNCSDRVAAYHCTCEPGYTGVNCEVDIDNCQSHQCANGATCISHTNGYSCLCFGNFTGKFCRQSRLPSTVCGNEKTNLTCYNGGNCTEFQTELKCMCRPGFTGEWCEKDIDECASDPCVNGGLCQDLLNKFQCLCDVAFAGERCEVDATLRLPYCEEAWNENNMSRESPSHARHPC

SEQ ID NO: 3167 - DNA, 1365 bp, Homo sapiens
gtacagattatttccattaaaccccaaatgtgttaaagaaattttaagaaacatctccgacattatcaagtatgtataaagtatgtgtggatgggtagataagactgtgctgttccagagagataaggcaaactttttcttcccatttcacaaccaatgtattcaacagggacctgggtttctgctgttctgtttattttgaaggtgtgaaaaggacattgatgagtgtgcctctgatccgtgtgtcaatggaggtctgtgccaggacttactcaacaaattccagtgcctctgtgatgttgcctttgctggcgagcgctgcgaggtggacgtaagcagcctctccttttatgtctctctcttattctggcagaatctttttcagcttctttcttacctcattttgcgtatgaatgacgagccagttgttgagtggggtgaacaggaagattattaacatacatttgaacattcccaaatgaaaaaaaaagccattgaatttcaagaaatgccttgattcattttagatctctggggaagaaaaaggaaataaaaaccatctcaataattaagttggcagatgacttgatctccgacattttcaccactattggctcagtgactgtcgccttgttactgatcctcttgctggccattgttgcttctgttgtcacctccaacaaaagggcaactcagggaacctacagccccagccgtcaggagaaggagggctcccgagtggaaatgtggaacttgatgccaccccctgcaatggagagactgatttaggagcattgtgtcccttcgagatggggatccacacactgtgaatgtgatgactgtacttcaggtatctctgacatacctgacaatgttaatctgcaactgggattacactggaactacaggaatgattcctttgaccaccttaaaaactttcacagtggttccgctcgacaccattgttttattatattatatcagccaattgcaaaaaaagtctgtgccagtaatttcagccttataattagcaaaaacatcttccagagaataaagtcttctgtggctttagtggctatcactgaaactctttcctcttttcaacctgggaacaaattttagttttcattttaggtttctgtactttctgtagtttctgtgtaaactgccatatgtttacatggaaactacaggaaaaaattggctacatttctcacttctcctatcatgtggtcaaagttattgttgtataccagcgatgggatgtatacttttgtccttcattcatggattcagagaaagctctgggaatgacttatggtccaaaaaagtgacccaatggcaacaaataaaaattgaaatgca

SEQ ID NO: 3168 - protein, 63 aa, Homo sapiens
MTVLQVSLTYLTMLICNWDYTGTTGMIPLTTLKTFTVVPLDTIVLLYYISQLQKKSVPVISAL

SEQ ID NO: 3169 - DNA, 949 bp, Homo sapiens
cccggtgcagctaccagactccaggctggtcctcgggaatgtctgcaaaggatccagtgatacgacctgtcttcaagtctcccagcaattccctgctctccttcttctctccctgtgtactacccattgccagatgtattgaagaaacaaacgtgtggatggaatggtgactttgggaagatgcttgcattctttcagctgtagagaatatgtggaaggcactgactccagcagctctctgcattgccatgggacttatgaaaggacagaacattggatttcctgcctagaagcccagaatgtcagcttatcctgtggggagcagttattgcagatgaaggtggcttatagggaagatgaattggcaatgaataggtgggagtggacagcataaacccttcaggctcaactgaatttggaaagaagagaacatttagaaaatttgttgtaaggcttttctgacaactagatttgtaaaaaaaaagataagctttagtgttcttaatggcacttttggggcaaatgcagaaatcttcatccatgtccctaaactcctgtggctgctgtagggctccttctacttgtaaactctactagctctttcctggatcctccttttcttctggtaccacccatttttccttggcatatttctgctctcattgcttagggccccttcaaaaatgtgtgttgacgttgattatcttttgggaccagtgccttaagtttcctttcttcccttttgtctataaccctcgttcggtgatccctgaggaaggttatggctttaatggttgttttccagaatttcccttttctactctcacaaatttaaaatgcagttatgttaagaagaactaataatcaacaaaagcaagggataattataaacacagtgtggcacttacactatcaataaaaacatgggcattctgacattctaagctct

SEQ ID NO: 3170 - protein, 43 aa, Homo sapiens
MSAKDPVIRPVFKSPSNSLLSFFSPCVLPIARCIEETNVWMEW

SEQ ID NO: 3171 - DNA, 5082 bp, Homo sapiens
gaaactggatacatggtttacagcaggtcactaatgttggaaaaagtacagagtccagggaaagacttgcttgtaactttatgaattctggatttttttttttcctttgctttttcttaactttcactaagggttactgtagtctgatgtgtccttcccaaggccacgaaatttgacaagctgcacttttcttttgctcaatgatttctgctttaagccaaagaactgcctataatttcactaagaatgtcttctaattcagatactggggatttacaagagtctttaaagcacggacttacacctattggtgctgggcttccggaccgacacggatcccccatccccgcccgcggtcgccttgtcatgctgcccaaagtggagacggaagccctgggactggctcgatcgcatggggaacagggccagatgccggaaaacatgcaagtgtctcaatttaaaatggtgaattactcctatgatgaagatctggaagagctttgtcccgtgtgtggagataaagtgtctgggtaccattatgggctcctcacctgtgaaagctgcaagggattttttaagcgaacagtccaaaataataaaaggtacacatgtatagaaaaccagaactgccaaattgacaaaacacagagaaagcgttgtccttactgtcgttttcaaaaatgtctaagtgttggaatgaagctagaagctgtaagggccgaccgaatgcgtggaggaaggaataagtttgggccaatgtacaagagagacagggccctgaagcaacagaaaaaagccctcatccgagccaatggacttaagctagaagccatgtctcaggtgatccaagctatgccctctgacctgaccatttcctctgcaattcaaaacatccactctgcctccaaaggcctacctctgaaccatgctgccttgcctcctacagactatgacagaagtccctttgtaacatcccccattagcatgacaatgccccctcacggcagcctgcaaggttaccaaacatatggccactttcctagccgggccatcaagtctgagtacccagacccctataccagctcacccgagtccataatgggctattcatatatggatagttaccagacgagctctccagcaagcatcccacatctgatactggaacttttgaagtgtgagccagatgagcctcaagtccaggctaaaatcatggcctatttgcagcaagagcaggctaaccgaagcaagcacgaaaagctgagcacctttgggcttatgtgcaaaatggcagatcaaactctcttctccattgtcgagtgggccaggagtagtatcttcttcagagaacttaaggttgatgaccaaatgaagctgcttcagaactgctggagtgagctcttaatcctcgaccacatttaccgacaagtggtacatggaaaggaaggatccatcttcctggttactgggcaacaagtggactattccataatagcatcacaagccggagccaccctcaacaacctcatgagtcatgcacaggagttagtggcaaaacttcgttctctccagtttgatcaacgagagttcgtatgtctgaaattcttggtgctctttagtttagatgtcaaaaaccttgaaaacttccagctggtagaaggtgtccaggaacaagtcaatgccgccctgctggactacacaatgtgtaactacccgcagcagacagagaaatttggacagctacttcttcgactacccgaaatccgggccatcagtatgcaggctgaagaatacctctactacaagcacctgaacggggatgtgccctataataaccttctcattgaaatgttgcatgccaaaagagcataagttacaacccctaggagctctgctttcaaaacaaaaagagattgggggagtggggagggggaagaagaacaggaagaaaaaaagtactctgaactgctccaagtaacgctaattaaaaacttgctttaaagatattgaatttaaaaaggcataataatcaaatacttaatagcaaataaatgatgtatcagggtatttgtattgcaaactgtgaatcaaaggcttcacagccccagaggattccatataaaagacattgtaatggagtggattgaactcacagatggataccaacacggtcagaagaaaaacggacagaacggttcttgtatatttaaactgatctccactatgaagaaatttaggaactaatcttattaattaggcttatacagcgggggatttgagcttacaggattcctccatggtaaagctgaactgaaacaattctcaagaatgcatcagctgtacctacaatagcccctccctcttcctttgaaggccccagcacctctgccctgtggtcaccgaatctgtactaaggacctgtgttcagccacacccagtggtagctccaccaaatcatgaacagcctaattttgagtgtctgtgtcttagacctgcaaacagctaataggaaattctattaatatgttagcttgccattttaaatatgttctgagggttgttttgtctcgtgttcatgatgttaagaaaatgcaggcagtatccctcatcttatgtaagtgttaattaatattaagggaaatgactacaaactttcaaagcaaatgctccatagctaaagcaacttagaccttatttctgctactgttgctgaaatgtggctttggcattgttggatttcataaaaaatttctggcaggaagtcttgttagtatacatcagtctttttcatcatccaagtttgtagttcatttaaaaatacaacattaaacacattttgctaggatgtcaaatagtcacagttctaagtagttggaaacaaaattgacgcatgttaatctatgcaaagagaaaggaaaggatgaggtgatgtattgactcaaggttcattcttgctgcaattgaacatcctcaagagttgggatggaaatggtgatttttacatgtgtcctggaaagatattaaagtaattcaaatcttccccaaaggggaaaggaagagagtgatactgacctttttaagtcatagaccaaagtctgctgtagaacaaatatgggaggacaaagaatcgcaaattcttcaaatgactattatcagtattattaacatgcgatgccacaggtatgaaagtcttgccttatttcacaattttaaaaggtagctgtgcagatgtggatcaacatttgtttaaaataaagtattaatactttaaagtcaaataagatatagtgtttacattctttaggtcctgaggggcagggggatctgtgatataacaaaatagcaaaagcggtaatttccttaatgttatttttctgattggtaattatttttaacagtacttaattattctatgtcgtgagacactaaaatcaaaaacgggaatctcatttagactttaatttttttgagattatcggcggcacaatcactttgtagaaactgtaaaaaataaaagtatctcctagtcccttaattttttcataaatatttctggcttttgagtagtgtatttatattgtatatcatactttcaactgtagacaattatgatgctaatttattgtttcttggtttcacctttgtataagatatagccaagactgaagaaaccaaatatatgtgtttactgtagcatgtcttcaaattagtggaacttagttcagggacatagaagagtcttaatgaattaaaatcattcacttgattaaatgtctgtaaatcttcatcattcctactgtagtttatttaatatctattgtaaattatgtgacttgtagcttcctctggttttcaagtaaactcaacaaggtggagtcttacctggttttcctttccaagcattgtaaattgtataccaaagatattagttattacttctgtgtgtacaaagaggattattttattatgtttattaatcacctctaatactcatccacatgaagggtacacattaggtaagctgggcgttgactcatgcgcagtctcagtcacccgtgttatcttcgtggctcaaaggacaatgcaaaatcgccgatcagagctcatacccaaagcattacagagaacagcagcatcattgccctccccagctgaaaaacaagttggctagaagatacatggagaggaatggtgtggtcaacagttaatgaaacggttctatcatgcatgtgtaatgtggatggagacaattataagatttgactataactatttggagggtctttaacattgccaaaaaaacaaatatgttgatttttattttattttattttttattttaagaggcgggatcttgatctcacatgttgcccaggctggccttgaactcctgggctcaagcattcctcctgcctcagcctcccccatagctgggactaggggtgcatgccagcatacctggctacgttgactcttaaaatctatgttctcttattttaaagatacagtgctccccactgaaaattaaacctaaaaaatgtcacatattggtatgttgttaacctggtagattaaatcatgagaatgattagaaagacgggcaacacagcgggttacatccacactgctgatcacaccaacgacaggagctgataagcaagaaagcgtcacagccagcgtctgttcacccaaggttgacaagtgaagtttctctaatgttgattgttagccgatttgtaacctggcatttacttagcaactgccttatcaattacaggatttgccggtaaaagcagactcaaatataaaggtttttggcttaacttggtttattatagttgctctatgtttgtaaacagacaatctctaatgtctgattatttgtatcacagatctgcagctgccttggacttgaatccatgcaatgtttagagtgtgaagtcagttacttgttgatgttttcttactgtatcaatgaaatacatattgtcatgtcagttcttgccaggaacttctcaacaaaatggaattttttttttcagtatttcaataaatattgatatgcccagcctgataattttt

SEQ ID NO: 3172 - protein, 541 aa, Homo sapiens; identical to SEQ ID NO: 204

SEQ ID NO: 3173 - DNA, 3118 bp, Homo sapiens
acagcaggtcactaatgttggaaaaagtacagagtccagggaaagacttgcttgtaactttatgaattctggatttttttttttcctttgctttttcttaactttcactaagggttactgtagtctgatgtgtccttcccaaggccacgaaatttgacaagctgcacttttcttttgctcaatgatttctgctttaagccaaagaactgcctataatttcactaagaatgtcttctaattcagatactggggatttacaagagtctttaaagcacggacttacacctattgtgtctcaatttaaaatggtgaattactcctatgatgaagatctggaagagctttgtcccgtgtgtggagataaagtgtctgggtaccattatgggctcctcacctgtgaaagctgcaagggattttttaagcgaacagtccaaaataataaaaggtacacatgtatagaaaaccagaactgccaaattgacaaaacacagagaaagcgttgtccttactgtcgttttcaaaaatgtctaagtgttggaatgaagctagaagctgtaagggccgaccgaatgcgtggaggaaggaataagtttgggccaatgtacaagagagacagggccctgaagcaacagaaaaaagccctcatccgagccaatggacttaagctagaagccatgtctcaggtgatccaagctatgccctctgacctgaccatttcctctgcaattcaaaacatccactctgcctccaaaggcctacctctgaaccatgctgccttgcctcctacagactatgacagaagtccctttgtaacatcccccattagcatgacaatgccccctcacggcagcctgcaaggttaccaaacatatggccactttcctagccgggccatcaagtctgagtacccagacccctataccagctcacccgagtccataatgggctattcatatatggatagttaccagacgagctctccagcaagcatcccacatctgatactggaacttttgaagtgtgagccagatgagcctcaagtccaggctaaaatcatggcctatttgcagcaagagcaggctaaccgaagcaagcacgaaaagctgagcacctttgggcttatgtgcaaaatggcagatcaaactctcttctccattgtcgagtgggccaggagtagtatcttcttcagagaacttaaggttgatgaccaaatgaagctgcttcagaactgctggagtgagctcttaatcctcgaccacatttaccgacaagtggtacatggaaaggaaggatccatcttcctggttactgggcaacaagtggactattccataatagcatcacaagccggagccaccctcaacaacctcatgagtcatgcacaggagttagtggcaaaacttcgttctctccagtttgatcaacgagagttcgtatgtctgaaattcttggtgctctttagtttagatgtcaaaaaccttgaaaacttccagctggtagaaggtgtccaggaacaagtcaatgccgccctgctggactacacaatgtgtaactacccgcagcagacagagaaatttggacagctacttcttcgactacccgaaatccgggccatcagtatgcaggctgaagaatacctctactacaagcacctgaacggggatgtgccctataataaccttctcattgaaatgttgcatgccaaaagagcataagttacaacccctaggagctctgctttcaaaacaaaaagagattgggggagtggggagggggaagaagaacaggaagaaaaaaagtactctgaactgctccaagtaacgctaattaaaaacttgctttaaagatattgaatttaaaaaggcataataatcaaatacttaatagcaaataaatgatgtatcagggtatttgtattgcaaactgtgaatcaaaggcttcacagccccagaggattccatataaaagacattgtaatggagtggattgaactcacagatggataccaacacggtcagaagaaaaacggacagaacggttcttgtatatttaaactgatctccactatgaagaaatttaggaactaatcttattaattaggcttatacagcgggggatttgagcttacaggattcctccatggtaaagctgaactgaaacaattctcaagaatgcatcagctgtacctacaatagcccctccctcttcctttgaaggccccagcacctctgccctgtggtcaccgaatctgtactaaggacctgtgttcagccacacccagtggtagctccaccaaatcatgaacagcctaattttgagtgtctgtgtcttagacctgcaaacagctaataggaaattctattaatatgttagcttgccattttaaatatgttctgagggttgttttgtctcgtgttcatgatgttaagaaaatgcaggcagtatccctcatcttatgtaagtgttaattaatattaagggaaatgactacaaactttcaaagcaaatgctccatagctaaagcaacttagaccttatttctgctactgttgctgaaatgtggctttggcattgttggatttcataaaaaatttctggcaggaagtcttgttagtatacatcagtctttttcatcatccaagtttgtagttcatttaaaaatacaacattaaacacattttgctaggatgtcaaatagtcacagttctaagtagttggaaacaaaattgacgcatgttaatctatgcaaagagaaaggaaaggatgaggtgatgtattgactcaaggttcattcttgctgcaattgaacatcctcaagagttgggatggaaatggtgatttttacatgtgtcctggaaagatattaaagtaattcaaatcttccccaaaggggaaaggaagagagtgatactgacctttttaagtcatagaccaaagtctgctgtagaacaaatatgggaggacaaagaatcgcaaattcttcaaatgactattatcagtattattaacatgcgatgccacaggtatgaaagtcttgccttatttcacaattttaaaaggtagctgtgcagatgtggatcaacatttgtttaaaataaagtattaatactttaaagtc

SEQ ID NO: 3174 - protein, 495 aa, Homo sapiens; identical to SEQ ID NO: 202

SEQ ID NO: 3175 - DNA, 4925 bp, Homo sapiens
acagcaggtcactaatgttggaaaaagtacagagtccagggaaagacttgcttgtaactttatgaattctggatttttttttttcctttgctttttcttaactttcactaagggttactgtagtctgatgtgtccttcccaaggccacgaaatttgacaagctgcacttttcttttgctcaatgatttctgctttaagccaaagaactgcctataatttcactaagaatgtcttctaattcagatactggggatttacaagagtctttaaagcacggacttacacctattgtgtctcaatttaaaatggtgaattactcctatgatgaagatctggaagagctttgtcccgtgtgtggagataaagtgtctgggtaccattatgggctcctcacctgtgaaagctgcaagggattttttaagcgaacagtccaaaataataaaaggtacacatgtatagaaaaccagaactgccaaattgacaaaacacagagaaagcgttgtccttactgtcgttttcaaaaatgtctaagtgttggaatgaagctagaagctgtaagggccgaccgaatgcgtggaggaaggaataagtttgggccaatgtacaagagagacagggccctgaagcaacagaaaaaagccctcatccgagccaatggacttaagctagaagccatgtctcaggtgatccaagctatgccctctgacctgaccatttcctctgcaattcaaaacatccactctgcctccaaaggcctacctctgaaccatgctgccttgcctcctacagactatgacagaagtccctttgtaacatcccccattagcatgacaatgccccctcacggcagcctgcaaggttaccaaacatatggccactttcctagccgggccatcaagtctgagtacccagacccctataccagctcacccgagtccataatgggctattcatatatggatagttaccagacgagctctccagcaagcatcccacatctgatactggaacttttgaagtgtgagccagatgagcctcaagtccaggctaaaatcatggcctatttgcagcaagagcaggctaaccgaagcaagcacgaaaagctgagcacctttgggcttatgtgcaaaatggcagatcaaactctcttctccattgtcgagtgggccaggagtagtatcttcttcagagaacttaaggttgatgaccaaatgaagctgcttcagaactgctggagtgagctcttaatcctcgaccacatttaccgacaagtggtacatggaaaggaaggatccatcttcctggttactgggcaacaagtggactattccataatagcatcacaagccggagccaccctcaacaacctcatgagtcatgcacaggagttagtggcaaaacttcgttctctccagtttgatcaacgagagttcgtatgtctgaaattcttggtgctctttagtttagatgtcaaaaaccttgaaaacttccagctggtagaaggtgtccaggaacaagtcaatgccgccctgctggactacacaatgtgtaactacccgcagcagacagagaaatttggacagctacttcttcgactacccgaaatccgggccatcagtatgcaggctgaagaatacctctactacaagcacctgaacggggatgtgccctataataaccttctcattgaaatgttgcatgccaaaagagcataagttacaacccctaggagctctgctttcaaaacaaaaagagattgggggagtggggagggggaagaagaacaggaagaaaaaaagtactctgaactgctccaagtaacgctaattaaaaacttgctttaaagatattgaatttaaaaaggcataataatcaaatacttaatagcaaataaatgatgtatcagggtatttgtattgcaaactgtgaatcaaaggcttcacagccccagaggattccatataaaagacattgtaatggagtggattgaactcacagatggataccaacacggtcagaagaaaaacggacagaacggttcttgtatatttaaactgatctccactatgaagaaatttaggaactaatcttattaattaggcttatacagcgggggatttgagcttacaggattcctccatggtaaagctgaactgaaacaattctcaagaatgcatcagctgtacctacaatagcccctccctcttcctttgaaggccccagcacctctgccctgtggtcaccgaatctgtactaaggacctgtgttcagccacacccagtggtagctccaccaaatcatgaacagcctaattttgagtgtctgtgtcttagacctgcaaacagctaataggaaattctattaatatgttagcttgccattttaaatatgttctgagggttgttttgtctcgtgttcatgatgttaagaaaatgcaggcagtatccctcatcttatgtaagtgttaattaatattaagggaaatgactacaaactttcaaagcaaatgctccatagctaaagcaacttagaccttatttctgctactgttgctgaaatgtggctttggcattgttggatttcataaaaaatttctggcaggaagtcttgttagtatacatcagtctttttcatcatccaagtttgtagttcatttaaaaatacaacattaaacacattttgctaggatgtcaaatagtcacagttctaagtagttggaaacaaaattgacgcatgttaatctatgcaaagagaaaggaaaggatgaggtgatgtattgactcaaggttcattcttgctgcaattgaacatcctcaagagttgggatggaaatggtgatttttacatgtgtcctggaaagatattaaagtaattcaaatcttccccaaaggggaaaggaagagagtgatactgacctttttaagtcatagaccaaagtctgctgtagaacaaatatgggaggacaaagaatcgcaaattcttcaaatgactattatcagtattattaacatgcgatgccacaggtatgaaagtcttgccttatttcacaattttaaaaggtagctgtgcagatgtggatcaacatttgtttaaaataaagtattaatactttaaagtcaaataagatatagtgtttacattctttaggtcctgaggggcagggggatctgtgatataacaaaatagcaaaagcggtaatttccttaatgttatttttctgattggtaattatttttaacagtacttaattattctatgtcgtgagacactaaaatcaaaaacgggaatctcatttagactttaatttttttgagattatcggcggcacaatcactttgtagaaactgtaaaaaataaaagtatctcctagtcccttaattttttcataaatatttctggcttttgagtagtgtatttatattgtatatcatactttcaactgtagacaattatgatgctaatttattgtttcttggtttcacctttgtataagatatagccaagactgaagaaaccaaatatatgtgtttactgtagcatgtcttcaaattagtggaacttagttcagggacatagaagagtcttaatgaattaaaatcattcacttgattaaatgtctgtaaatcttcatcattcctactgtagtttatttaatatctattgtaaattatgtgacttgtagcttcctctggttttcaagtaaactcaacaaggtggagtcttacctggttttcctttccaagcattgtaaattgtataccaaagatattagttattacttctgtgtgtacaaagaggattattttattatgtttattaatcacctctaatactcatccacatgaagggtacacattaggtaagctgggcgttgactcatgcgcagtctcagtcacccgtgttatcttcgtggctcaaaggacaatgcaaaatcgccgatcagagctcatacccaaagcattacagagaacagcagcatcattgccctccccagctgaaaaacaagttggctagaagatacatggagaggaatggtgtggtcaacagttaatgaaacggttctatcatgcatgtgtaatgtggatggagacaattataagatttgactataactatttggagggtctttaacattgccaaaaaaacaaatatgttgatttttattttattttattttttattttaagaggcgggatcttgatctcacatgttgcccaggctggccttgaactcctgggctcaagcattcctcctgcctcagcctcccccatagctgggactaggggtgcatgccagcatacctggctacgttgactcttaaaatctatgttctcttattttaaagatacagtgctccccactgaaaattaaacctaaaaaatgtcacatattggtatgttgttaacctggtagattaaatcatgagaatgattagaaagacgggcaacacagcgggttacatccacactgctgatcacaccaacgacaggagctgataagcaagaaagcgtcacagccagcgtctgttcacccaaggttgacaagtgaagtttctctaatgttgattgttagccgatttgtaacctggcatttacttagcaactgccttatcaattacaggatttgccggtaaaagcagactcaaatataaaggtttttggcttaacttggtttattatagttgctctatgtttgtaaacagacaatctctaatgtctgattatttgtatcacagatctgcagctgccttggacttgaatccatgcaatgtttagagtgtgaagtcagttacttgttgatgttttcttactgtatcaatgaaatacatattgtcatgtcagttcttgccaggaacttctcaacaaaatggaattttttttttcagtatttcaataaatattgatatgcccagcctgataattttt

SEQ ID NO: 3176 - protein, 495 aa, Homo sapiens; identical to SEQ ID NO: 202

SEQ ID NO: 3177 - DNA, 2464 bp, Homo sapiens
acttcggagccgagttggggcagcggtggagcggggacttcgcgcccccaggggaacgggcgcccctgcgaaaccgtcgccagccacgcgtccttgccgtccgacgccccctcacattggagaccccggatctctcccgcctccttcgggtcgctctccgctgtttcctctgccaccatgaggaacattttcaagaggaaccaggagcctattgtggctcctgccaccaccaccgccacgatgcccattggacccgtggacaactccactgagagtgggggtgctggggagagccaggaggacatgtttgccaaactgaaggagaagttattcaatgagataaacaagattcccttaccaccctgggcactgatcgccattgctgtggttgctgggctcctgcttctcacctgctgcttctgcatctgcaagaaatgctgctgcaagaagaagaagaacaagaaggagaagggcaaaggcatgaagaatgccatgaacatgaaggacatgaaagggggtcaggatgacgacgacgcagagacaggcctgactgagggggaaggtgaaggggaggaggagaaagagccagagaacctgggcaaactgcagttttccctggactatgattttcaggctaatcagcttactgtgggcgttctgcaggctgctgaactgcctgccctggacatgggaggcacctcagacccttatgtcaaggtcttcctccttcctgacaagaagaagaaatatgagaccaaagtccatcggaagacactgaaccctgccttcaatgaaaccttcaccttcaaggtgccataccaggagcttgggggcaaaactctggtgatggccatctatgactttgaccgcttctccaaacatgacatcattggagaggtaaaggtgcctatgaacacagtggacctcggccagcccattgaggagtggagagacctgcaaggcggggaaaaggaggagccggagaagctgggcgacatctgcacctccctgcgctatgtgcccacggccgggaagctcactgtctgcatcctggaggctaagaacctcaagaagatggacgtgggcggcctttcagacccgtacgtgaagatccacctgatgcagaatggcaagaggctcaagaagaagaagacaaccgtgaagaagaagaccctgaacccatacttcaacgagtccttcagctttgagatccccttcgagcagattcagaaagtccaggtagtggtcaccgtgctggactatgacaagctgggcaagaacgaagccataggcaagatcttcgtgggcagcaatgccacgggcacagagctgcggcactggtccgacatgctggccaacccccggaggcccatcgcccagtggcactcgctcaagcctgaggaggaggtggatgcactcctgggcaagaacaagtagacagcagcggctgggaccccacacctttcacggacactgacaagatccagagctatcaatacctcagttatgcaaccttagaggttttcttttttctttcatttgttgggtggttgtgtccttgtttttccttgtttttctctttttaaagaccaacttccctttgatggctgtgtgaggagagtcccctaagaggtgaaagagaagcctggctctgttcacggtcccaggagctgtccttgctgcatgccctgtcacagttccctcgactctttcaaagcttcacatctgcctcaccccaagcgaggctctctactggcacaaacttgcagcagttcctgttttttgagccttctggaccaacaaaatggcagcacatcctgcttcctgacagggaaggcatcacagtggccaatgatcgtgtgtgtgtgtgtgtgtgtgtgtgtgtatgtgtgtgtgtgtgtgtgtgtgtgtgtgtgtgtgtgtgtctttgagcatttctcttcattcctggaatgtgtgtgtgtgtgtgtctctttgagcatctctcttcattcctggaatgagccatggacagtaaagttgtgtgggaaaagaaggctctttggggaccctgacatgaagaagtccactaagtgggagatcttctctcatctatggcaaagtctcaggatcctgttcagatatcggggctttcatactcctgttggtggctatttgggaggcagcaagatgtgaagactggatgtgttcagaactaggaccaaacgatgccatcaaatacttcctcctgccagtcatggtttccccagaagtgtagttcctgggacattcatggatatgagctattcactagttgggtcagactaacagggactctcagtcccaaaatctcactcttattgacaataaatatcaaactatgaagaaacagaagtcccattaccagaaagaccaaaattaaactcctggatcttcaccccatccagtgggaaacacagatgctttctccctttccagaatataa

SEQ ID NO: 3178 - protein, 419 aa, Homo sapiens; identical to SEQ ID NO: 206

SEQ ID NO: 3179 - DNA, 6769 bp, Homo sapiens
ctcaactgaaaccctaaggataaactccatccacagcggaaggcgcggccccgcccgattcgggggcggggcggggagccgcgcgcggagggtgggtcgatgggggtggggtgggactctttttcctcgccgtggcggcggaggcgcacggcgtgggcttgcggcgagacgtcgtcgtcggaggctgaaaaagcccaaggtgctgccgttgcccgtacaactcggacttgctgttgctcgagccgcgtctgcacgggtctcggaccgagcggagctcgcagcctcggtcccggagcccaccttcgcctcgcccttgcccagcctgcggtgatggaggcggccaccacactgcacccaggcccgcgcccggcgctgcccctcgggggcccgggcccgctgggcgagttcctgcctccacccgagtgcccggtcttcgaacccagctgggaagagttcgcggaccccttcgctttcatccacaagatccggcccatagccgagcagactggcatctgtaaggtgcggccgccgccggattggcagccaccatttgcatgtgatgttgataaacttcattttacgccacgtatccagagactgaatgaattggaggcccaaactcgtgtaaaattgaatttcttggaccagattgcaaagtactgggagttacagggaagtactctgaaaattccacatgtggagaggaagatcttggacttatttcagcttaataagttagttgcagaagaaggtggatttgcagttgtttgcaaggatagaaaatggaccaaaattgctaccaagatggggtttgctcctggcaaagcagtgggctcacatatcagagggcattatgaacgaattctcaacccctacaacttattcctgtccggagacagcctaaggtgtttgcagaagccaaacctgaccacagacactaaggacaaggagtacaaaccccatgatattccccagaggcagtctgtgcagccttcggaaacgtgccccccagcccgacgagcaaaacgcatgagagcagagagacagagtctcgctgtgttgcccaggctggagtgcagtggcgcgatcttggctcactgcaacctccgcctcctagattccagcaattcttctgcctcagcctcccaagccatgaatattaaaatagaacccgaggagacaacggaagccagaactcataatctgagacgtcgaatgggttgtccaactccaaaatgtgaaaatgagaaagaaatgaagagtagcatcaagcaagaacctattgagaggaaagattatattgtagaaaatgagaaggaaaagcccaagagtcgatctaaaaaagccaccaatgctgtggacctgtatgtctgtcttttatgtggcagtggcaatgatgaagaccggctactgttgtgtgatggctgtgatgacagttaccataccttttgcttgatcccacctctccatgatgttcccaagggagactggaggtgtcctaagtgtttggctcaggaatgtagtaagccacaagaagcatttggctttgaacaagcagccagggactataccctccgtacttttggggaaatggcagatgcgttcaaatctgattacttcaacatgccagtccatatggtccccacagagcttgttgagaaagaattttggagactagtaagcactattgaggaggatgtcacagtggaatatggagctgacattgcctcaaaggaatttggcagtggctttcctgtccgagatgggaaaatcaaactctcacctgaggaagaggagtatcttgatagtggctggaatttgaacaacatgccagtgatggagcagtctgtccttgcacatattactgctgatatatgtggcatgaaacttccttggttgtatgtgggaatgtgcttttcttcattctgttggcacattgaagaccactggagctattcaattaactacttgcactggggtgagccaaaaacctggtatggagtcccagggtatgctgctgagcagctagaaaatgtaatgaagaaactagctccagaactctttgtgtcccagccggatctcctccatcagcttgtgaccatcatgaaccccaataccctgatgactcatgaagtgcctgtttaccgaactaatcagtgtgctggggagtttgtgattacatttccaagagcctaccacagtggttttaaccagggttttaattttgctgaggctgttaacttctgcactgttgattggctgccattaggccgacagtgtgtggagcattatcgcttgcttcatcgatattgtgtgttttcccacgatgagatgatctgcaagatggcttccaaggctgatgtattagatgttgtagtggcttcaactgttcagaaagacatggccattatgattgaggatgagaaagctttaagagaaactgtccgtaaattgggagtgattgattcggaaagaatggattttgagctgttgccagatgatgaacgtcagtgtgtaaaatgcaaaactacatgcttcatgtctgccatctcctgttcttgtaaacctggccttcttgtttgcctgcatcatgtaaaagaattgtgttcctgtcctccttacaaatataaattgcggtataggtacacgctggatgatctctaccctatgatgaatgcattgaagcttcgagcagaatcttacaacgaatgggccttgaatgtgaatgaagctttggaggcaaagatcaacaagaagaaaagccttgtcagcttcaaggctttaattgaagaatctgaaatgaagaaattcccagacaatgatcttttgcgacaccttcgcctagtcacacaggatgcagagaagtgtgcctctgttgcgcagcagttgcttaatggcaaaaggcaaactagatatcgatctggtggagggaaatcccaaaatcagttgacagtgaatgagctccggcagtttgtaacacagctgtatgctcttccatgtgtcctcagtcagacaccattactaaaggatctcttgaatcgtgtagaagattttcaacagcatagtcagaaactactctctgaggaaacgcctagtgctgcggagctgcaggacttgctagatgtcagctttgaatttgatgttgaacttccacagcttgctgagatgcgtatccgtttggaacaagcccgttggctagaagaggtgcagcaagcttgcctagaccccagctcccttactttagatgatatgagacgtctcatagacctaggggtagggctggccccgtattcagcagtggagaaagctatggcccggctgcaggaactgctcacagtgtcagagcactgggacgacaaagccaagagtctcctcaaggccaggccacgacattcattgaatagccttgctacggcagtaaaggaaatcgaagagatccctgcatatctgcccaatggtgcggctctgaaagactcagtgcagagagccagagactggcttcaggatgtagagggcctgcaggctggaggacgtgtgccagtgttagacacactcatagaacttgttacacgaggccgatctatccccgtacatctgaattctttgccaagactggaaaccctagtagctgaggttcaggcttggaaagaatgtgctgttaatacattcttgactgagaattctccatattctctcttagaggtgctgtgtcctcgatgtgatattggccttttgggattgaaaaggaagcagagaaagttaaaggagcccttgccaaatggaaagaaaaaaagcaccaaattagagagtctgagtgacctggagagagctttaactgaaagcaaggagactgcttcagctatggcaactcttggggaagctcgcctaagggaaatggaagccttgcagtctctcagactcgccaatgaagggaaattgctgtcgcctctccaagatgtggatataaaaatctgcctatgtcagaaggccccagctgcccctatgattcaatgtgaactctgcagggatgctttccacaccagttgtgtggcggtacccagtatttcacagggcctgcgaatctggctttgtccccattgtcggaggtcagagaaacctccattagagaaaattctgcccctgctcgcctcccttcagcgtatccgagttcgccttcctgagggagatgcacttcgatatatgattgaaagaaccgtgaactggcagcacagagcccagcaactgctttcgtcagggaatcttaaatttgtgcaagatcgagtgggctcaggactgttatatagcagatggcaagcctcagcaggacaggtgtcagacacaaacaaggtatctcaacctcctggcacaacatcattttctttgcctgatgactgggacaacagaacctcatatttgcactcccccttctcaactggacgaagttgtatccccctccatggtgttagtccagaagtgaatgaactattgatggaagcccagctgctccaggtatcccttcctgaaattcaggaactttaccagactttacttgcaaagccaagccctgctcagcagactgaccgaagctcaccagtgagacccagcagtgagaagaatgactgttgccgagggaagcgagatggaattaacagtcttgagagaaaactgaagagacgcctggaaagagagggcctctccagtgagcggtgggaacgagttaagaaaatgcggacccccaaaaagaagaaaatcaaactgagccaccccaaggacatgaacaatttcaagttagagagagagcgtagctatgaattagttcgttctgctgaaactcattccctgccctcagacacatcctattccgaacaggaagactctgaggatgaagatgccatctgcccagctgtgagctgcctgcagccagaaggagatgaggtggactgggtccagtgtgatggcagctgcaatcagtggtttcatcaggtctgtgttggtgtctccccagagatggcagagaaagaagactacatctgtgtgcgctgtactgtgaaggacgcaccaagccgaaagtaaaaacacaaaaacagatacccccctacttaatgtaattcaggactccaaccaagaggatttcttcaaatctcagcaaagctacaggactggtactcaagccagcctgtaaacggtgctatttctattccttatgggatcatttttccaggactctttgaagaaaagaaaaaacaactaaaaaaatttttgacactttttgtattttttccttaagagctatttgtggttgttgaggtttgaaaagctgactgttttttttgcaggggttcccaccaatttggaaggcattgaagcttgcaccttttcatgtacagcattaaaattttacctctctctgggatttaccagcttaagagtccaactcacttccagtgcccaaaagggcacccaccagaaattccagtaaatcctcatttgaggaagctctcccttgtttactctgttaccacattggggaaatttttaagtttttcactttgggagtttttgtttgtttcttcttttcctttatccacttttcttcttcctggtagactaggtttatttatctgagcaataacttctatgttggtttcagtggctggaattaaaacaaaacaaaacaaacttccaaacagtgtgttggtgctttagcgattgattgatgtacagaacacaaatgtctagtttctagtgtcactgatgaactagtgatgtagaaaagagacttctctgtaagtaattgccacagctgtattttggctttctccctgtcccttcctttctcccctattttttggtagcttgtatcaaatgttacagtttatattgtggaataaatccttcgtcctaacataacactaaatgctgattatttagagccattagagcacagcttcttctgcccctctactgttgcacagccagaaggggctgcttgcttttgcctctgcccaaccaggttgcagtagcagtggatgttagcctgcaaacaacattaggggattcttcttttgtgtcctgctctgtttggtgggccatatgcctacagccctcactaacaaagaacccctctgtcttcaaggactagaacctatctttaaagccgtgctcttttaaaataagctttctcagaatgttggcaaatcacttcaatcctcaaatcagtcttccttgtggaatgctgcctttattatatttgaattgacaggggaacttggtttagggttaagacgttggaaggaaatctaaggaaaattaatcctcacagaggtccgggtttagtatatgtcttgagaggagacttgtgaattcccagactctgcctcctggtttcctttctcatttctttctaactgtagctatcattactggctgtggatagcccatagctattttccttgcttttcttttttaaaggggtctgttctgcagtggagaagacattctggtgaccagacttttgcttaccttttcctattctgttgccaatttttgttttccccacattctatagccataaacctgaagatgagtaaaactggtgggtctttaataaaacaacaacaaaaacagcagtttgtgatatagcagaggtttaaatgtaccctccccttttatgcacttcaaataattaaatctctttaagaatgacttctagttgtctgcagttttctgcagttgttgtgatgtttctcttcgtctgatggtggttctg

SEQ ID NO: 3180 - protein, 1657 aa, Homo sapiens
MGVGWDSFSSPWRRRRTAWACGETSSSEAEKAQGAAVARTTRTCCCSSRVCTGLGPSGARSLGPGAHLRLALAQPAVMEAATTLHPGPRPALPLGGPGPLGEFLPPPECPVFEPSWEEFADPFAFIHKIRPIAEQTGICKVRPPPDWQPPFACDVDKLHFTPRIQRLNELEAQTRVKLNFLDQIAKYWELQGSTLKIPHVERKILDLFQLNKLVAEEGGFAVVCKDRKWTKIATKMGFAPGKAVGSHIRGHYERILNPYNLFLSGDSLRCLQKPNLTTDTKDKEYKPHDIPQRQSVQPSETCPPARRAKRMRAERQSLAVLPRLECSGAILAHCNLRLLDSSNSSASASQAMNIKIEPEETTEARTHNLRRRMGCPTPKCENEKEMKSSIKQEPIERKDYIVENEKEKPKSRSKKATNAVDLYVCLLCGSGNDEDRLLLCDGCDDSYHTFCLIPPLHDVPKGDWRCPKCLAQECSKPQEAFGFEQAARDYTLRTFGEMADAFKSDYFNMPVHMVPTELVEKEFWRLVSTIEEDVTVEYGADIASKEFGSGFPVRDGKIKLSPEEEEYLDSGWNLNNMPVMEQSVLAHITADICGMKLPWLYVGMCFSSFCWHIEDHWSYSINYLHWGEPKTWYGVPGYAAEQLENVMKKLAPELFVSQPDLLHQLVTIMNPNTLMTHEVPVYRTNQCAGEFVITFPRAYHSGFNQGFNFAEAVNFCTVDWLPLGRQCVEHYRLLHRYCVFSHDEMICKMASKADVLDVVVASTVQKDMAIMIEDEKALRETVRKLGVIDSERMDFELLPDDERQCVKCKTTCFMSAISCSCKPGLLVCLHHVKELCSCPPYKYKLRYRYTLDDLYPMMNALKLRAESYNEWALNVNEALEAKINKKKSLVSFKALIEESEMKKFPDNDLLRHLRLVTQDAEKCASVAQQLLNGKRQTRYRSGGGKSQNQLTVNELRQFVTQLYALPCVLSQTPLLKDLLNRVEDFQQHSQKLLSEETPSAAELQDLLDVSFEFDVELPQLAEMRIRLEQARWLEEVQQACLDPSSLTLDDMRRLIDLGVGLAPYSAVEKAMARLQELLTVSEHWDDKAKSLLKARPRHSLNSLATAVKEIEEIPAYLPNGAALKDSVQRARDWLQDVEGLQAGGRVPVLDTLIELVTRGRSIPVHLNSLPRLETLVAEVQAWKECAVNTFLTENSPYSLLEVLCPRCDIGLLGLKRKQRKLKEPLPNGKKKSTKLESLSDLERALTESKETASAMATLGEARLREMEALQSLRLANEGKLLSPLQDVDIKICLCQKAPAAPMIQCELCRDAFHTSCVAVPSISQGLRIWLCPHCRRSEKPPLEKILPLLASLQRIRVRLPEGDALRYMIERTVNWQHRAQQLLSSGNLKFVQDRVGSGLLYSRWQASAGQVSDTNKVSQPPGTTSFSLPDDWDNRTSYLHSPFSTGRSCIPLHGVSPEVNELLMEAQLLQVSLPEIQELYQTLLAKPSPAQQTDRSSPVRPSSEKNDCCRGKRDGINSLERKLKRRLEREGLSSERWERVKKMRTPKKKKIKLSHPKDMNNFKLERERSYELVRSAETHSLPSDTSYSEQEDSEDEDAICPAVSCLQPEGDEVDWVQCDGSCNQWFHQVCVGVSPEMAEKEDYICVRCTVKDAPSRK

SEQ ID NO: 3181 - DNA, 6710 bp, Homo sapiens
ctcaactgaaaccctaaggataaactccatccacagcggaaggcgcggccccgcccgattcgggggcggggcggggagccgcgcgcggagggtgggtcgatgggggtggggtgggactctttttcctcgccgtggcggcggaggcgcacggcgtgggcttgcggcgagacgtcgtcgtcggaggctgaaaaagcccaaggtgctgccgttgcccgtacaactcggacttgctgttgctcgagccgcgtctgcacgggtctcggaccgagcggagctcgcagcctcggtcccggagcccaccttcgcctcgcccttgcccagcctgcggtgatggaggcggccaccacactgcacccaggcccgcgcccggcgctgcccctcgggggcccgggcccgctgggcgagttcctgcctccacccgagtgcccggtcttcgaacccagctgggaagagttcgcggaccccttcgctttcatccacaagatccggcccatagccgagcagactggcatctgtaaggtgcggccgccgccggattggcagccaccatttgcatgtgatgttgataaacttcattttacgccacgtatccagagactgaatgaattggaggcccaaactcgtgtaaaattgaatttcttggaccagattgcaaagtactgggagttacagggaagtactctgaaaattccacatgtggagaggaagatcttggacttatttcagcttaataagttagttgcagaagaaggtggatttgcagttgtttgcaaggatagaaaatggaccaaaattgctaccaagatggggtttgctcctggcaaagcagtgggctcacatatcagagggcattatgaacgaattctcaacccctacaacttattcctgtccggagacagcctaaggtgtttgcagaagccaaacctgaccacagacactaaggacaaggagtacaaaccccatgatattccccagaggcagtctgtgcagccttcggaaacgtgccccccagcccgacgagcaaaacgcatgagagcagagagacagagtctcgctgtgttgcccaggctggagtgcagtggcgcgatcttggctcactgcaacctccgcctcctagattccagcaattcttctgcctcagcctcccaagccatgaatattaaaatagaacccgaggagacaacggaagccagaactcataatctgagacgtcgaatgggttgtccaactccaaaatgtgaaaatgagaaagaaatgaagagtagcatcaagcaagaacctattgagaggaaagattatattgtagaaaatgagaaggaaaagcccaagagtcgatctaaaaaagccaccaatgctgtggacctgtatgtctgtcttttatgtggcagtggcaatgatgaagaccggctactgttgtgtgatggctgtgatgacagttaccataccttttgcttgatcccacctctccatgatgttcccaagggagactggaggtgtcctaagtgtttggctcaggaatgtagtaagccacaagaagcatttggctttgaacaagcagccagggactataccctccgtacttttggggaaatggcagatgcgttcaaatctgattacttcaacatgccagtccatatggtccccacagagcttgttgagaaagaattttggagactagtaagcactattgaggaggatgtcacagtggaatatggagctgacattgcctcaaaggaatttggcagtggctttcctgtccgagatgggaaaatcaaactctcacctgaggaagaggagtatcttgatagtggctggaatttgaacaacatgccagtgatggagcagtctgtccttgcacatattactgctgatatatgtggcatgaaacttccttggttgtatgtgggaatgtgcttttcttcattctgttggcacattgaagaccactggagctattcaattaactacttgcactggggtgagccaaaaacctggtatggagtcccagggtatgctgctgagcagctagaaaatgtaatgaagaaactagctccagaactctttgtgtcccagccggatctcctccatcagcttgtgaccatcatgaaccccaataccctgatgactcatgaagtgcctgtttaccgaactaatcagtgtgctggggagtttgtgattacatttccaagagcctaccacagtggttttaaccagggttttaattttgctgaggctgttaacttctgcactgttgattggctgccattaggccgacagtgtgtggagcattatcgcttgcttcatcgatattgtgtgttttcccacgatgagatgatctgcaagatggcttccaaggctgatgtattagatgttgtagtggcttcaactgttcagaaagacatggccattatgattgaggatgagaaagctttaagagaaactgtccgtaaattgggagtgattgattcggaaagaatggattttgagctgttgccagatgatgaacgtcagtgtgtaaaatgcaaaactacatgcttcatgtctgccatctcctgttcttgtaaacctggccttcttgtttgcctgcatcatgtaaaagaattgtgttcctgtcctccttacaaatataaattgcggtataggtacacgctggatgatctctaccctatgatgaatgcattgaagcttcgagcagaatcttacaacgaatgggccttgaatgtgaatgaagctttggaggcaaagatcaacaagaagaaaagccttgtcagcttcaaggctttaattgaagaatctgaaatgaagaaattcccagacaatgatcttttgcgacaccttcgcctagtcacacaggatgcagagaagtgtgcctctgttgcgcagcagttgcttaatggcaaaaggcaaactagatatcgatctggtggagggaaatcccaaaatcagttgacagtgaatgagctccggcagtttgtaacacagctgtatgctcttccatgtgtcctcagtcagacaccattactaaaggatctcttgaatcgtgtagaagattttcaacagcatagtcagaaactactctctgaggaaacgcctagtgctgcggagctgcaggacttgctagatgtcagctttgaatttgatgttgaacttccacagcttgctgagatgcgtatccgtttggaacaagcccgttggctagaagaggtgcagcaagcttgcctagaccccagctcccttactttagatgatatgagacgtctcatagacctaggggtagggctggccccgtattcagcagtggagaaagctatggcccggctgcaggaactgctcacagtgtcagagcactgggacgacaaagccaagagtctcctcaaggccaggccacgacattcattgaatagccttgctacggcagtaaaggaaatcgaagagatccctgcatatctgcccaatggtgcggctctgaaagactcagtgcagagagccagagactggcttcaggatgtagagggcctgcaggctggaggacgtgtgccagtgttagacacactcatagaacttgttacacgaggccgatctatccccgtacatctgaattctttgccaagactggaaaccctagtagctgaggttcaggcttggaaagaatgtgctgttaatacattcttgactgagaattctccatattctctcttagaggtgctgtgtcctcgatgtgatattggccttttgggattgaaaaggaagcagagaaagttaaaggagcccttgccaaatggaaagaaaaaaagcaccaaattagagagtctgagtgacctggagagagctttaactgaaagcaaggagactgcttcagctatggcaactcttggggaagctcgcctaagggaaatggaagccttgcagtctctcagactcgccaatgaagggaaattgctgtcgcctctccaagatgtggatataaaaatctgcctatgtcagaaggccccagctgcccctatgattcaatgtgaactctgcagggatgctttccacaccagttgtgtggcggtacccagtatttcacagggcctgcgaatctggctttgtccccattgtcggaggtcagagaaacctccattagagaaaattctgcccctgctcgcctcccttcagcgtatccgagttcgccttcctgagggagatgcacttcgatatatgattgaaagaaccgtgaactggcagcacagagcccagcaactgctttcgtcagggaatcttaaatttgtgcaagatcgagtgggctcaggactgttatatagcagatggcaagcctcagcaggacaggtgtcagacacaaacaaggtatctcaacctcctggcacaacatcattttctttgcctgatgactgggacaacagaacctcatatttgcactcccccttctcaactggacgaagttgtatccccctccatggtgttagtccagaagtgaatgaactattgatggaagcccagctgctccaggtatcccttcctgaaattcaggaactttaccagactttacttgcaaagccaagccctgctcagcagactgaccgaagctcaccagtgagacccagcagtgagaagaatgactgttgccgagggaagcgagatggaattaacagtcttgagagaaaactgaagagacgcctggaaagagagggcctctccagtgagcggtgggaacgagttaagaaaatgcggacccccaaaaagaagaaaatcaaactgagccaccccaaggacatgaacaatttcaagttagagagagagcgtagctatgaattagttcgttctgctgaaactcattccctgccctcagacacatcctattccgaacaggaagactctgaggatgaagatgccatctgcccagctgtgagctgcctgcagccagaaggagatgaggtggactgggtccagtgtgatggcagctgcaatcagtggtttcatcaggtctgtgttggtgtctccccagagatggcagagaaagaagactacatctgtgtgcgctgtactgtgaaggacgcaccaagccgaaagtaaaaacacaaaaacagatacccccctacttaatgtaattcaggactccaaccaagaggatttcttcaaatctcagcaaagctacaggactggtactcaagccagcctgtaaacggtgctatttctattccttatgggatcatttttccaggactctttgaagaaaagaaaaaacaactaaaaaaatttttgacactttttgtattttttccttaagagctatttgtggttgttgaggtttgaaaagctgactgttttttttgcaggggttcccaccaatttggaaggcattgaagcttgcaccttttcatgtacagcattaaaattttacctctctctgggatttaccagcttaagagtccaactcacttccagtgcccaaaagggcacccaccagaaattccagtaaatcctcatttgaggaagctctcccttgtttactctgttaccacattggggaaatttttaagtttttcactttgggagtttttgtttgtttcttcttttcctttatccacttttcttcttcctggtagactaggtttatttatctgagcaataacttctatgttggtttcagtggctggaattaaaacaaaacaaaacaaacttccaaacagtgtgttggtgctttagcgattgattgatgtacagaacacaaatgtctagtttctagtgtcactgatgaactagtgatgtagaaaagagacttctctgtaagtaattgccacagctgtattttggctttctccctgtcccttcctttctcccctattttttggtagcttgtatcaaatgttacagtttatattgtggaataaatccttcgtcctaacataacactaaatgctgattatttagagccattagagcacagcttcttctgcccctctactgttgcacagccagaaggggctgcttgcttttgcctctgcccaaccaggttgcagtagcagtggatgttagcctgcaaacaacattaggggattcttcttttgtgtcctgctctgtttggtgggccatatgcctacagccctcactaacaaagaacccctctgtcttcaaggactagaacctatctttaaagccgtgctcttttaaaataagctttctcagaatgttggcaaatcacttcaatcctcaaatcagtcttccttgtggaatgctgcctttattatatttgaattgacaggggaacttggtttagggttaagacgttggaaggaaatctaaggaaaattaatcctcacagaggtccgggtttagtatatgtcttgagaggagacttgtgaattcccagactctgcctcctggtttcctttctcatttctttctaactgtagctatcattactggctgtggatagcccatagctattttccttgcttttcttttttaaaggggtctgttctgcagtggagaagacattctggtgaccagacttttgcttaccttttcctattctgttgccaatttttgttttccccacattctatagccataaacctgaagatgagtaaaactggtgggtctttaataaaacaacaacaaaaacagcagtttgtgatatagcagaggtttaaatgtaccctccccttttatgcacttcaaataattaaatctctttaagaatgacttct

SEQ ID NO: 3182 - protein, 1657 aa, Homo sapiens; identical to SEQ ID NO: 3180

SEQ ID NO: 3183 - DNA, 7437 bp, Homo sapiens
ttcagtctgttgaaggataccccgttgtgtatttctacctgtatgtaccagagacacctcaaattcaaaatgtccagaaatgaacacagtatcttcttcccttgagtaactcgccttctgtatataattggggtgaatgttccagcaatgccaacgggctagcatctactcaggcaggtacgccagacatctgaatcttaatacctcgtcgtcccccctcaatctgtcactatgtcctaattttatttcctacctttgcatcccttcctcataattatcagcaccactgccttaatttagatcctatcattccttgtctggattatttcaagtctttcgcccctctcaagtctgacctcgtcatagactgtttgtggatgattattttccctgcaacatctccacctcccaatagtctccatcacttattagccatgtgaattatggcaaattgcttaacctacctatgcctcactttccttattgtaaagtggaaataagagtacctatctcatagggttgtgtgattaatcatgcgatgcaattagaacagtgcctaggatatgaaagtgccccaaaatgttacgttattattattattactactattgccttctcatgaacatgctatgtgtatgttcaagctgttatctctactggaaaatccttctccgtttccaatactctttccaaaaccccctcctgggttttactgcacctaccattgtgtactgacgtgattgaatgattggcttatgggactgatcctttctaccagacttaacttcttcagggcaggaactctgatacatagtaaatggtcaataaaagttggctcaactgaaaccctaaggataaactccatccacagcggaaggcgcggccccgcccgattcgggggcggggcggggagccgcgcgcggagggtgggtcgatgggggtggggtgggactctttttcctcgccgtggcggcggaggcgcacggcgtgggcttgcggcgagacgtcgtcgtcggaggctgaaaaagcccaaggtgctgccgttgcccgtacaactcggacttgctgttgctcgagccgcgtctgcacgggtctcggaccgagcggagctcgcagcctcggtcccggagcccaccttcgcctcgcccttgcccagcctgcggtgatggaggcggccaccacactgcacccaggcccgcgcccggcgctgcccctcgggggcccgggcccgctgggcgagttcctgcctccacccgagtgcccggtcttcgaacccagctgggaagagttcgcggaccccttcgctttcatccacaagatccggcccatagccgagcagactggcatctgtaaggtgcggccgccgccggattggcagccaccatttgcatgtgatgttgataaacttcattttacgccacgtatccagagactgaatgaattggaggcccaaactcgtgtaaaattgaatttcttggaccagattgcaaagtactgggagttacagggaagtactctgaaaattccacatgtggagaggaagatcttggacttatttcagcttaataagttagttgcagaagaaggtggatttgcagttgtttgcaaggatagaaaatggaccaaaattgctaccaagatggggtttgctcctggcaaagcagtgggctcacatatcagagggcattatgaacgaattctcaacccctacaacttattcctgtccggagacagcctaaggtgtttgcagaagccaaacctgaccacagacactaaggacaaggagtacaaaccccatgatattccccagaggcagtctgtgcagccttcggaaacgtgccccccagcccgacgagcaaaacgcatgagagcagaggccatgaatattaaaatagaacccgaggagacaacggaagccagaactcataatctgagacgtcgaatgggttgtccaactccaaaatgtgaaaatgagaaagaaatgaagagtagcatcaagcaagaacctattgagaggaaagattatattgtagaaaatgagaaggaaaagcccaagagtcgatctaaaaaagccaccaatgctgtggacctgtatgtctgtcttttatgtggcagtggcaatgatgaagaccggctactgttgtgtgatggctgtgatgacagttaccataccttttgcttgatcccacctctccatgatgttcccaagggagactggaggtgtcctaagtgtttggctcaggaatgtagtaagccacaagaagcatttggctttgaacaagcagccagggactataccctccgtacttttggggaaatggcagatgcgttcaaatctgattacttcaacatgccagtccatatggtccccacagagcttgttgagaaagaattttggagactagtaagcactattgaggaggatgtcacagtggaatatggagctgacattgcctcaaaggaatttggcagtggctttcctgtccgagatgggaaaatcaaactctcacctgaggaagaggagtatcttgatagtggctggaatttgaacaacatgccagtgatggagcagtctgtccttgcacatattactgctgatatatgtggcatgaaacttccttggttgtatgtgggaatgtgcttttcttcattctgttggcacattgaagaccactggagctattcaattaactacttgcactggggtgagccaaaaacctggtatggagtcccagggtatgctgctgagcagctagaaaatgtaatgaagaaactagctccagaactctttgtgtcccagccggatctcctccatcagcttgtgaccatcatgaaccccaataccctgatgactcatgaagtgcctgtttaccgaactaatcagtgtgctggggagtttgtgattacatttccaagagcctaccacagtggttttaaccagggttttaattttgctgaggctgttaacttctgcactgttgattggctgccattaggccgacagtgtgtggagcattatcgcttgcttcatcgatattgtgtgttttcccacgatgagatgatctgcaagatggcttccaaggctgatgtattagatgttgtagtggcttcaactgttcagaaagacatggccattatgattgaggatgagaaagctttaagagaaactgtccgtaaattgggagtgattgattcggaaagaatggattttgagctgttgccagatgatgaacgtcagtgtgtaaaatgcaaaactacatgcttcatgtctgccatctcctgttcttgtaaacctggccttcttgtttgcctgcatcatgtaaaagaattgtgttcctgtcctccttacaaatataaattgcggtataggtacacgctggatgatctctaccctatgatgaatgcattgaagcttcgagcagaatcttacaacgaatgggccttgaatgtgaatgaagctttggaggcaaagatcaacaagaagaaaagccttgtcagcttcaaggctttaattgaagaatctgaaatgaagaaattcccagacaatgatcttttgcgacaccttcgcctagtcacacaggatgcagagaagtgtgcctctgttgcgcagcagttgcttaatggcaaaaggcaaactagatatcgatctggtggagggaaatcccaaaatcagttgacagtgaatgagctccggcagtttgtaacacagctgtatgctcttccatgtgtcctcagtcagacaccattactaaaggatctcttgaatcgtgtagaagattttcaacagcatagtcagaaactactctctgaggaaacgcctagtgctgcggagctgcaggacttgctagatgtcagctttgaatttgatgttgaacttccacagcttgctgagatgcgtatccgtttggaacaagcccgttggctagaagaggtgcagcaagcttgcctagaccccagctcccttactttagatgatatgagacgtctcatagacctaggggtagggctggccccgtattcagcagtggagaaagctatggcccggctgcaggaactgctcacagtgtcagagcactgggacgacaaagccaagagtctcctcaaggccaggccacgacattcattgaatagccttgctacggcagtaaaggaaatcgaagagatccctgcatatctgcccaatggtgcggctctgaaagactcagtgcagagagccagagactggcttcaggatgtagagggcctgcaggctggaggacgtgtgccagtgttagacacactcatagaacttgttacacgaggccgatctatccccgtacatctgaattctttgccaagactggaaaccctagtagctgaggttcaggcttggaaagaatgtgctgttaatacattcttgactgagaattctccatattctctcttagaggtgctgtgtcctcgatgtgatattggccttttgggattgaaaaggaagcagagaaagttaaaggagcccttgccaaatggaaagaaaaaaagcaccaaattagagagtctgagtgacctggagagagctttaactgaaagcaaggagactgcttcagctatggcaactcttggggaagctcgcctaagggaaatggaagccttgcagtctctcagactcgccaatgaagggaaattgctgtcgcctctccaagatgtggatataaaaatctgcctatgtcagaaggccccagctgcccctatgattcaatgtgaactctgcagggatgctttccacaccagttgtgtggcggtacccagtatttcacagggcctgcgaatctggctttgtccccattgtcggaggtcagagaaacctccattagagaaaattctgcccctgctcgcctcccttcagcgtatccgagttcgccttcctgagggagatgcacttcgatatatgattgaaagaaccgtgaactggcagcacagagcccagcaactgctttcgtcagggaatcttaaatttgtgcaagatcgagtgggctcaggactgttatatagcagatggcaagcctcagcaggacaggtgtcagacacaaacaaggtatctcaacctcctggcacaacatcattttctttgcctgatgactgggacaacagaacctcatatttgcactcccccttctcaactggacgaagttgtatccccctccatggtgttagtccagaagtgaatgaactattgatggaagcccagctgctccaggtatcccttcctgaaattcaggaactttaccagactttacttgcaaagccaagccctgctcagcagactgaccgaagctcaccagtgagacccagcagtgagaagaatgactgttgccgagggaagcgagatggaattaacagtcttgagagaaaactgaagagacgcctggaaagagagggcctctccagtgagcggtgggaacgagttaagaaaatgcggacccccaaaaagaagaaaatcaaactgagccaccccaaggacatgaacaatttcaagttagagagagagcgtagctatgaattagttcgttctgctgaaactcattccctgccctcagacacatcctattccgaacaggaagactctgaggatgaagatgccatctgcccagctgtgagctgcctgcagccagaaggagatgaggtggactgggtccagtgtgatggcagctgcaatcagtggtttcatcaggtctgtgttggtgtctccccagagatggcagagaaagaagactacatctgtgtgcgctgtactgtgaaggacgcaccaagccgaaagtaaaaacacaaaaacagatacccccctacttaatgtaattcaggactccaaccaagaggatttcttcaaatctcagcaaagctacaggactggtactcaagccagcctgtaaacggtgctatttctattccttatgggatcatttttccaggactctttgaagaaaagaaaaaacaactaaaaaaatttttgacactttttgtattttttccttaagagctatttgtggttgttgaggtttgaaaagctgactgttttttttgcaggggttcccaccaatttggaaggcattgaagcttgcaccttttcatgtacagcattaaaattttacctctctctgggatttaccagcttaagagtccaactcacttccagtgcccaaaagggcacccaccagaaattccagtaaatcctcatttgaggaagctctcccttgtttactctgttaccacattggggaaatttttaagtttttcactttgggagtttttgtttgtttcttcttttcctttatccacttttcttcttcctggtagactaggtttatttatctgagcaataacttctatgttggtttcagtggctggaattaaaacaaaacaaaacaaacttccaaacagtgtgttggtgctttagcgattgattgatgtacagaacacaaatgtctagtttctagtgtcactgatgaactagtgatgtagaaaagagacttctctgtaagtaattgccacagctgtattttggctttctccctgtcccttcctttctcccctattttttggtagcttgtatcaaatgttacagtttatattgtggaataaatccttcgtcctaacataacactaaatgctgattatttagagccattagagcacagcttcttctgcccctctactgttgcacagccagaaggggctgcttgcttttgcctctgcccaaccaggttgcagtagcagtggatgttagcctgcaaacaacattaggggattcttcttttgtgtcctgctctgtttggtgggccatatgcctacagccctcactaacaaagaacccctctgtcttcaaggactagaacctatctttaaagccgtgctcttttaaaataagctttctcagaatgttggcaaatcacttcaatcctcaaatcagtcttccttgtggaatgctgcctttattatatttgaattgacaggggaacttggtttagggttaagacgttggaaggaaatctaaggaaaattaatcctcacagaggtccgggtttagtatatgtcttgagaggagacttgtgaattcccagactctgcctcctggtttcctttctcatttctttctaactgtagctatcattactggctgtggatagcccatagctattttccttgcttttcttttttaaaggggtctgttctgcagtggagaagacattctggtgaccagacttttgcttaccttttcctattctgttgccaatttttgttttccccacattctatagccataaacctgaagatgagtaaaactggtgggtctttaataaaacaacaacaaaaacagcagtttgtgatatagcagaggtttaaatgtaccctccccttttatgcacttcaaataattaaatctctttaagaatgacttct

SEQ ID NO: 3184 - protein, 1621 aa, Homo sapiens
MGVGWDSFSSPWRRRRTAWACGETSSSEAEKAQGAAVARTTRTCCCSSRVCTGLGPSGARSLGPGAHLRLALAQPAVMEAATTLHPGPRPALPLGGPGPLGEFLPPPECPVFEPSWEEFADPFAFIHKIRPIAEQTGICKVRPPPDWQPPFACDVDKLHFTPRIQRLNELEAQTRVKLNFLDQIAKYWELQGSTLKIPHVERKILDLFQLNKLVAEEGGFAVVCKDRKWTKIATKMGFAPGKAVGSHIRGHYERILNPYNLFLSGDSLRCLQKPNLTTDTKDKEYKPHDIPQRQSVQPSETCPPARRAKRMRAEAMNIKIEPEETTEARTHNLRRRMGCPTPKCENEKEMKSSIKQEPIERKDYIVENEKEKPKSRSKKATNAVDLYVCLLCGSGNDEDRLLLCDGCDDSYHTFCLIPPLHDVPKGDWRCPKCLAQECSKPQEAFGFEQAARDYTLRTFGEMADAFKSDYFNMPVHMVPTELVEKEFWRLVSTIEEDVTVEYGADIASKEFGSGFPVRDGKIKLSPEEEEYLDSGWNLNNMPVMEQSVLAHITADICGMKLPWLYVGMCFSSFCWHIEDHWSYSINYLHWGEPKTWYGVPGYAAEQLENVMKKLAPELFVSQPDLLHQLVTIMNPNTLMTHEVPVYRTNQCAGEFVITFPRAYHSGFNQGFNFAEAVNFCTVDWLPLGRQCVEHYRLLHRYCVFSHDEMICKMASKADVLDVVVASTVQKDMAIMIEDEKALRETVRKLGVIDSERMDFELLPDDERQCVKCKTTCFMSAISCSCKPGLLVCLHHVKELCSCPPYKYKLRYRYTLDDLYPMMNALKLRAESYNEWALNVNEALEAKINKKKSLVSFKALIEESEMKKFPDNDLLRHLRLVTQDAEKCASVAQQLLNGKRQTRYRSGGGKSQNQLTVNELRQFVTQLYALPCVLSQTPLLKDLLNRVEDFQQHSQKLLSEETPSAAELQDLLDVSFEFDVELPQLAEMRIRLEQARWLEEVQQACLDPSSLTLDDMRRLIDLGVGLAPYSAVEKAMARLQELLTVSEHWDDKAKSLLKARPRHSLNSLATAVKEIEEIPAYLPNGAALKDSVQRARDWLQDVEGLQAGGRVPVLDTLIELVTRGRSIPVHLNSLPRLETLVAEVQAWKECAVNTFLTENSPYSLLEVLCPRCDIGLLGLKRKQRKLKEPLPNGKKKSTKLESLSDLERALTESKETASAMATLGEARLREMEALQSLRLANEGKLLSPLQDVDIKICLCQKAPAAPMIQCELCRDAFHTSCVAVPSISQGLRIWLCPHCRRSEKPPLEKILPLLASLQRIRVRLPEGDALRYMIERTVNWQHRAQQLLSSGNLKFVQDRVGSGLLYSRWQASAGQVSDTNKVSQPPGTTSFSLPDDWDNRTSYLHSPFSTGRSCIPLHGVSPEVNELLMEAQLLQVSLPEIQELYQTLLAKPSPAQQTDRSSPVRPSSEKNDCCRGKRDGINSLERKLKRRLEREGLSSERWERVKKMRTPKKKKIKLSHPKDMNNFKLERERSYELVRSAETHSLPSDTSYSEQEDSEDEDAICPAVSCLQPEGDEVDWVQCDGSCNQWFHQVCVGVSPEMAEKEDYICVRCTVKDAPSRK

SEQ ID NO: 3185 - DNA, 529 bp, Homo sapiens
ggggaacgtcagacggagagacctccgaagatttcgtgctcgtttcccccggccctcaggctccgggcactgaaaggcagtcacccaccgcagcccttccagccctgtctacagcgcctcgggcctgggggcagtgagtgaggggtgggtgttgctgaaaccatccgtaacggctccaacgttcgctgaggagagcccggccaactccttcctccgtggccggaactgggattggcagccaccatttgcatgtgatgttgataaacttcattttacgccacgtatccagagactgaatgaattggagtcccgctctgtcacccagggtggagtgcagcagcattatcctggttcactgcaacctctgcctcctgggttcaagtcattctcctgcctcagcctcccaagtagctgggattacaggcccaaactcgtgtaaaattgaatttcttggaccagattgcaaagtactgggagttacagggaagtactctgaaaattccacatgtggagaggaagatcttggact

SEQ ID NO: 3186 - protein, 76 aa, Homo sapiens
MNWSPALSPRVECSSIILVHCNLCLLGSSHSPASASQVAGITGPNSCKIEFLGPDCKVLGVTGKYSENSTCGEEDL

SEQ ID NO: 3187 - DNA, 719 bp, Homo sapiens
atgacctctttcatccagaaagctgccaaacgtatgcaaggaatgtttgtcaagatcttagttcgctttcagattcacctagtggaaggaaatctcttatgcttaagaagtcttcaattaaaaggggggatgggcgtggggggagaagaaaaccgccttcccttcaacaaatttttcccagagcggagctgcagcccaggcggccggagcggaacccagccccgctccgagtgccacgtctccaggaaccccctccttactcttggacaacactccgcccccgcccgggcctccgtcccccaaaccgccctcatttgtgcagcgccagatccttcggacacatccctaggtgtctccatcctcattcggtccatccaactcccagacctcacgtcaaccggctgcaccccactttccagcctgcgccccagatctgcagccttcgcccctagatacacccgcctggtgatgaggcgctcctcgcgttccttccgtctccagtgcaccggctttccctcgtcctctgcgcagtccatctcagctcatctctccaattcaatgccatcatctctcctcaccatctctcggtgccctggaatgtttgctgtcagatgtcccctgtgaaacccacaaacgcttgcgatttggcctccttgttttattttgtgtagtcctacaacgtcttgttactaccccctattacaacacttataactcag

SEQ ID NO: 3188 - protein, 207 aa, Homo sapiens
MTSFIQKAAKRMQGMFVKILVRFQIHLVEGNLLCLRSLQLKGGMGVGGEENRLPFNKFFPERSCSPGGRSGTQPRSECHVSRNPLLTLGQHSAPARASVPQTALICAAPDPSDTSLGVSILIRSIQLPDLTSTGCTPLSSLRPRSAAFAPRYTRLVMRRSSRSFRLQCTGFPSSSAQSISAHLSNSMPSSLLTISRCPGMFAVRCPL

SEQ ID NO: 3189 - DNA, 764 bp, Homo sapiens
gacgccccagaggccggacctgggcaaccccagcctggaggtgccggggccggagctcccagagggctgggtgcgaggcctaggcggggtcaggttcgggttcctaggccatagcggagctgcagcccaggcggccggagcggaacccagccccgctccgagtgccacgtctccaggaaccccctccttactcttggacaacactccgcccccgcccgggcctccgtcccccaaaccgccctcatttgtgcagcgccagatccttcggacacatccctaggtgtctccatcctcattcggtccatccaactcccagacctcacgtcaaccggctgcaccccactttccagcctgcgccccagatctgcagccttcgcccctagatacacccgcctggtgatgaggcgctcctcgcgttccttccgggctccaggtgtccgtgagcctcccttccgccctggcctccggtctctgccttgctcgtgcttctaccaccacccttcccctcccaacccggtggatcctctcgtctcccccagtctccagtgcaccggctttccctcgtcctctgcgcagtccatctcagctcatctctccaattcaatgccatcatctctcctcaccatctctcggtgccctggaatgtttgctgtcagatgtcccctgtgaaacccacaaacgcttgcgatttggcctccttgttttattttgtgtagtcctacaacgtcttgttactaccccctattacaacacttataactcag

SEQ ID NO: 3190 - protein, 89 aa, Homo sapiens
MRRSSRSFRAPGVREPPFRPGLRSLPCSCFYHHPSPPNPVDPLVSPSLQCTGFPSSSAQSISAHLSNSMPSSLLTISRCPGMFAVRCPL

SEQ ID NO: 3191 - DNA, 2796 bp, Homo sapiens
ggtccttatcaccccagctcctttttgtttttctgtctcctgccttttccagaagtctgttgaactcaaagggctgaatgacagcagtcttccctccgtgactgggaaactacacgggaggaaccgtatcctgacgcagacgcgatgcggtgttccatcaggaaatgcttcatactctcagtgggcatcgtattcctgtggcccttcatcactttgaaaatccccaaggaaactgaagatgatcaaaatgtgatgactgtcaaaggccaagtagcaagccttgagccttgctcagtttgggaactgggaatatagggtggaaatggtgtggacaggcagattctggaaagcccctgggctttcttccttcctgaccttttcacctgagagcaggaagctccaaagggaatgggggtatggacctgggcctattagtccatgaagaagctgtatttattttccttattcgttaaggtaaagaagacagcaaatactgcttgagccctggatattttagccaatggccaggcatcctgagaatgtgccaggctcactctagggagaatggttcactccacctctttccctagaaaagcttatgggaagccactggggtgtaaaatttgttctttttatgaaaggatatatatgtttgcccttgtcaatgcccccggaggccagttataacagccggaaggacccaagatcactagaagactggcagaacctcaccttcaaatatatggaaaaaatccagaagagaagaaagacatggctgacagtggggaatctcatcagtgcagcaaggggatggaagcagcctcttgtacacattggtctccctgttccgtgtttcttctaaggctgagcagaaacgtctcacggtgctggtccacctggcagattctgacctcacctggctcagagaaactcttgcccatatttcaagcctcttcagcccacagatcttgaaagggcagttgctactgatccatgcttcatccgatgcctaccccactgtggagagcatcagggatgaggcctttcatggcgaattctactccaagcagaacgtagatcatgccttcctcatgagctttgccacaaagttctctgattacttcctgttaatagaggacaatgtcttttttgcccccaactttgtcacccacattcattcaagggtgaccaccatgaagtccaactcgtgggtgctaatggagttctccaatatgggcttccttggcaaactcttccacagcagggacctcccactcctggcccatttcctccttctcttctacaaggagaaaccccttgacagcctgatttctcatttccatacgctcctggtccaggaaagcccaatcctctgcagacctttcctattctactgcagggtctcctacactgcctttgatcacaagcagaaggccacagcacttcagaaaaagaatgccgatggtcccaacaacccgcctggagctgtcttcactgatatgcaggtttccgatgtgcatttcccctgggaggcctacactctggatgagtcattcttttggacacacaacattagtataggaaaccacctgacagtgattctgaaccatccagcaaacctgagcagggtgcaagtgatgacgggctccattgtggaatgggaggtacgccctggagaaggggcaggtggagctgggctaccaacctgagggggtgccgcagcactgcaccagcttcgccttgctgggacatctttcggaggggcagatggatcagaagatacttctgaaaggtatggggtaccacgtgagctgtgtgaggctggtggtgaaagctggtcaggctggggggctcatgatcaggcatatctacctctgggagaaaaatgacaaatagcaagtggatcaatgctgaagataaatcagtagggggatgaaaaattaaaatcttaaagccacttcattctagtctatatgagtgacataggggagacacaatggaatgaagggcagacagagaagactatcagtctgttggtgccgccaagatgtcaggagacttgttgcttcctttctatccaaacaactctcataggatatcttttgctgtggcatatatagcttatccgaatttggggagagttttggtcactcccaaaatatttagatacctgggatgctgagatcagcccaaatcaaggtgtccctgtgtatacatgcgtgtgcatgtatgcacttctatgttcacacggaggcagaggtggggatgaggtatgtggtcacaggagggcaggcaggaaaatcacggctgaatccctagaattgacatcataaaaagccatgaaagggactctcattagaagttaaaatctccgaagtgcaggaaagtagcagatggacaaatagcaataaaacgaatcccttagctctattattgaagctgtttcacagtgccaatctagttccctcctttcctccccaacaaacttgggcacaaataggttttaactaggctgggtatggtggctcatgccagtaattgcagcctcccttaggaggctgaggtgggaggatctcttgaggccagcagttcaagaccaacctaggcaacacggcaagaccctgtctccacaaaaaattaaaaagttagccaggttgtggtggcatgtgcctgtggtcctagctactcaggaggctgaggcaggaggatcacttgagcccaggaggttgaggctgcagtgagccatgattatgccattacactccagcctgggcaacagcgtaagaccctgtctcc

SEQ ID NO: 3192 - protein, 87 aa, Homo sapiens
MGSHWGVKFVLFMKGYICLPLSMPPEASYNSRKDPRSLEDWQNLTFKYMEKIQKRRKTWLTVGNLISAARGWKQPLVHIGLPVPCFF

SEQ ID NO: 3193 - DNA, 1159 bp, Homo sapiens
atgcggtgttccatcaggaaatgcttcatactctcagtgggcatcgtattcctgtggcccttcatcactttgaaaatccccaaggaaactgaagatgatcaaaatgtgatgactgtcaaaggccaagctgagcagaaacgtctcacggtgctggtccacctggcagattctgacctcacctggctcagagaaactcttgcccatatttcaagcctcttcagcccacagatcttgaaagggcagttgctactgatccatgcttcatccgatgcctaccccactgtggagagcatcagggatgaggcctttcatggcgaattctactccaagcagaacgtagatcatgccttcctcatgagctttgccacaaagttctctgattacttcctgttaatagaggacaatgtcttttttgcccccaactttgtcacccacattcattcaagggtgaccaccatgaagtccaactcgtgggtgctaatggagttctccaatatgggcttccttggcaaactcttccacagcagggacctcccactcctggcccatttcctccttctcttctacaaggagaaaccccttgacagcctgatttctcatttccatacgctcctggtccaggaaagcccaatcctctgcagacctttcctattctactgcagggtctcctacactgcctttgatcacaagcagaaggccacagcacttcagaaaaagaatgccgatggtcccaacaacccgcctggagctgtcttcactgatatgcaggtttccgatgtgcatttcccctgggaggcctacactctggatgagtcattcttttggacacacaacattagtataggaaaccacctgacagtgattctgaaccatccagcaaacctgagcagggtgcaagtgatgacgggctccattgtggaatgggaggtacgccctggagaaggggcaggtggagctgggctaccaacctgagggggtgccgcagcactgcaccagcttcgccttgctgggacatctttcggaggggcagatggatcagaagatacttctgaaaggtatggggtaccacgtgagctgtgtgaggctggtggtgaaagctggtcaggctggggggctcatgatcaggcatatctacctctgggagaaaaatgacaaatag

SEQ ID NO: 3194 - protein, 323 aa, Homo sapiens
MRCSIRKCFILSVGIVFLWPFITLKIPKETEDDQNVMTVKGQAEQKRLTVLVHLADSDLTWLRETLAHISSLFSPQILKGQLLLIHASSDAYPTVESIRDEAFHGEFYSKQNVDHAFLMSFATKFSDYFLLIEDNVFFAPNFVTHIHSRVTTMKSNSWVLMEFSNMGFLGKLFHSRDLPLLAHFLLLFYKEKPLDSLISHFHTLLVQESPILCRPFLFYCRVSYTAFDHKQKATALQKKNADGPNNPPGAVFTDMQVSDVHFPWEAYTLDESFFWTHNISIGNHLTVILNHPANLSRVQVMTGSIVEWEVRPGEGAGGAGLPT

SEQ ID NO: 3195 - DNA, 753 bp, Homo sapiens
atggtcaaattctgggaatttccgaatcagttggcaggcccggctgctgcagattttcccggacacgagcgtgcagcgcccgacgcggccgctgggtggcgccgcgcgggacgccgagcgtgggaagcgcgggcgcgcgggcaggctgagctcacacgcccgggaagcggccgccgcggagccggcgtccgcagcggctgcgcatctcgggcctgcagcggggcgcttggcgggcgggggccgggggagagcctgtttgcgcagtacccccggagggcggaaggccgccgagagaaacagcaagtgacagagcagaggaacggctggcccagccaatcctggagctgctgttgcagcacttgttccccaaacaagtgctcctacattctgatgactcagtgtatcgggagccgggagatggagctctcagcagagtggccaggatgttctgtcaacatgaaagctacaaaaacagctcggggctctgagctgatccttagcctggggtcattttcagggagggctggacagagaaggcggccaccgcccgggcatcaggatgggagcgacaccagaggactcaggagagtgcagcttgctctgtgagtgggtgacaacctcttggcgactcaggctcagctgaggatggtgccagtgtgccggagacagccgtcatactgccggatagagtggctcacttgcatgtatttggaacaaaaaaaggagatgcctggcagccccgctctctgcagt

SEQ ID NO: 3196 - protein, 201 aa, Homo sapiens
MVKFWEFPNQLAGPAAADFPGHERAAPDAAAGWRRAGRRAWEARARGQAELTRPGSGRRGAGVRSGCASRACSGALGGRGPGESLFAQYPRRAEGRREKQQVTEQRNGWPSQSWSCCCSTCSPNKCSYILMTQCIGSREMELSAEWPGCSVNMKATKTARGSELILSLGSFSGRAGQRRRPPPGHQDGSDTRGLRRVQLAL

SEQ ID NO: 3197 - DNA, 1994 bp, Homo sapiens
agagcctgtttgcgcagtacccccggagggcggaaggccgccgagagaaacagcaagtgacagagcagaggaacggctggcccagccaatcctggagctgctgttgcagcacttgttccccaaacaagtgctcctacattctggtaggaggacagagaggagggggctactggtccacacccctcccctgccgaggaccccatggctgctcccctgcaggaaaggcagctaggctgccttaggccggatgggcagaggctgccatggcccagggtggtgacggttttgcggcccctccctgctgcccagagtgggaagaagagcgcagagcctggcaagtttctctctgtgtcctctgggctggaaggagcaggtatagacagggccgaggcagccagggcctggtgctgctttggcattggtggcaggagggctgaacctccagccccttgggtttggttccacccctggcctgtccctggcactcgacaactgctcctgtgtgcttattggtgccaccatgttatataacgcttatataatcttccagggcgagcactgtgtctccgctctcaggtcacgcagacacggtgtccgtgtgggaggcaggatctgtggaagcctgtgggtgaacctactcccccgatccccaacctggctccttctcctgatctcagccataggaggggggctgggagagccaggtccctctccacaccagctgtgtgggatgagaacacggttggctgggcagttttcctcaccttcctgccccactagtcccacttgccctgtctggtagagcagaagccatccttgtgctttgataccagctctttgttttgggggacccctggcatggcaggtggcatggcgagatgaaccccaaaatgttgcagtggaagaacacatggtacttagggttggataaagagagggagaaattagctctgcctttgaggagcaagggtaactagaaggatggtggtggcattataagagatttggagcaggcctggggctaggggatggtcagggaagggtgtacagggaagtagatcagacagcaaagataaacatggtgttcttttactgtactctccactgggctgtccctggttaccggggcaacagaagcagtgatgaaaatcatgcctttcgttcagtggaaaaatttggctcctcctcccggctcttccttctctaaatcgcctgtgacccattgagagggttatgcttccaaggatcagagagagaccccagcatgttttcatcatgctcccctttccccagtcttctttatcatctcccctcttcctgcatcccctgtctccccccacagctcggcagttggcagttgcgtaggagttggagtagatgcagggggaagggcatggacgtcatcacagggcagggtgagcagagcgtgggcagagatgtggatgcaggaatgcctggcacatgaggagggtccagcattgatgagctagatggagccaaaagcctgtttctgggctggtaggagctgaggtgggcagggtgagatgatggtgggccttcagagttcagcagtctgggttcgagggagtaggaactaggaagggcctgaggtttcttgtgcagatatcttgtgatgaaaactaccaaaccgtatccctttttgaagttaagatttttgtttaagttttttctttcatcttgtgatgaaaaccgtgattcattcattcagcatttattgtgtgccccccatattaggtgaggttctgggaactgggaagccgaaggtgagtagcactggaccttgaccttgaagagactgtggtgaatgaaaggaggatgagtatatgggggaagatctggcattgttgcaagcctggaatctggggtccccagcaggagactagcaacataccagatcggaggtgataggttagggtggagcctgtggaaatgaagaagaagagataatttggagtgctactctggcttgagga

SEQ ID NO: 3198 - protein, 109 aa, Homo sapiens
MAAPLQERQLGCLRPDGQRLPWPRVVTVLRPLPAAQSGKKSAEPGKFLSVSSGLEGAGIDRAEAARAWCCFGIGGRRAEPPAPWVWFHPWPVPGTRQLLLCAYWCHHVI

SEQ ID NO: 3199 - DNA, 562 bp, Homo sapiens
catctatcatgtcatggtaggctacagggagttccatgtggggaagaactgaaacctcctcccaacagccatgtgaggaagcttggaaaaccttagaagagtatcctttaaaaaaaagttttaaattaaacacaaataaatacataaacagtacaactgcaatctcatgagacatcccaagcgagacaactcagggctcacaatctacttaaaaatttcgatatagtcactcatttattctacaaacatttaccaaagtcctttgatgtgtcagctctaagcactcaagatggagtggcagtaggatcccaacacttatatctgtccagaattggtcatcagctggcttgagttctcccattctgcctgtgccttcccttagcaagggaaagaacaagatggaagagaaggaaaaggcttgattgaaccagccaatagataattagaagctgactattttgcaataatgcagcacaacagcaataaataaatcaatcacttggggggtggggaatgacttccctataatcagctattaaagacttgtaccactaattagtct

SEQ ID NO: 3200 - protein, 44 aa, Homo sapiens
MWGRTETSSQQPCEEAWKTLEEYPLKKSFKLNTNKYINSTTAIS

SEQ ID NO: 3201 - DNA, 2540 bp, Homo sapiens
acagagacccagttctgatgatggtcacacaccccagcagttttcccctaacaggaaagttgtcagggctgttcaggcatttccttctctgccatctgccatccggactgaagagaaagtcttagtttcaattcctttcctgttcaggggaggaggacactctgattggaggctgctggaataaattctgactcactattgaagaattatcagagtttttcttctgagtccaaattcctgggtctgatggcccagtcagcaacctgaagaaaaatctatgaacttcattaaaactgggttccatgcttttaatggaaaacagagatggaagacgagacaaaaatgccatttcagtttgagcaatgcactttttgagactcctttgggtagaaagagggaggaggccactgaggtttccactgagtgtatattatagatttgttctctcctcctcacctcccttggcttttcttccatcattggggactgctgtaatcttgaaacagaatattttctcttagttattattgcattattaatattttctgtttttggccatttcttttgagtttaatttgcatatgtgtacatgggcaatgcttcaacgagacaatttttttaagtttgttctctaacatcttagatactagaagatatggattttggtcctgggagattatttaggtttttttcttattgtgttgttgcacatatacagttagcagttttttttttttctgttggaattttagaaacaaggatccttcttgcggacggggcggagtttaagaaggacaggggagagggcctggcccgagtgctgtgtggggaggagcaggctgatgctgatgctggggcccaggtatgctccctgctccttgcccagtctgaggtgaggcctcagtgtctactgctggtcttggccaacagaacagaaatttccagcaaactccaacttatgaaaaagcaccaatctgacctgaaaaagctggggatcctagatttcactgagcaagatgttgcaagccaccagagctattcccaaaagaccctgattgcactggtcacctcgggagccctgctggctgtcttgggcatcactggctatttcctgatgaatcgccgcagctggagccccacaggagaaaggctgggcgaagacccttattacacggaaaacggtggaggccagggctatagctcaggacctgggacctcccctgaggctcagggaaaggccagtgtgaaccgaggggctcaggaaaacgggaccggccaggccacctccagaaacggccattcagcaagacaacacgtggtggctgataccgaattgtgactcggctaggtggggcaaggctgggcagtgtccgagagagcacccctctctgcatctgaccacgtgctacccccatgctggaggtgacatctcttacgcccaacccttccccactgcacacacctcagaggctgttcttggggccctacaccttgaggaggggcaggtaaactcctgtcctttacacattcggctccctggagccagactctggtcttctttgggtaaacgtgtgacgggggaaagccaaggtctggagaagctcccaggaacaatcgatggccttgcagcactcacacaggacccccttcccctaccccctcctctctgccgcaatacaggaacccccaggggaaagatgagcttttctaggctacaattttctcccaggaagctttgatttttaccgtttcttccctgtattttctttctctactttgaggaaaccaaagtaaccttttgcacctgctctcttgtaatgatatagccagaaaaacgtgttgccttgaaccacttccctcatctctcctccaagacactgtggacttggtcaccagctcctcccttgttctctaagttccactgagctccatgtgccccctctaccatttgcagagtcctgcacagttttctggctggagcctagaacaggcctcccaagttttaggacaaacagctcagttctagtctctctggggccacacagaaactctttttgggctcctttttctccctctggatcaaagtaggcaggaccatgggaccaggtcttggagctgagcctctcacctgtactcttccgaaaaatcctcttcctctgaggctggatcctagccttatcctctgatctccatggcttcctcctccctcctgccgactcctgggttgagctgttgcctcagtcccccaacagatgcttttctgtctctgcctccctcaccctgagccccttccttgctctgcacccccatatggtcatagcccagatcagctcctaacccttatcaccagctgcctcttctgtgggtgacccaggtccttgtttgctgttgatttctttccagaggggttgagcagggatcctggtttcaatgacggttggaaatagaaatttccagagaagagagtattgggtagatattttttctgaatacaaagtgatgtgtttaaatactgcaattaaagtgatactgaaacacat

SEQ ID NO: 3202 - protein, 227 aa, Homo sapiens
MDFGPGRLFRFFSYCVVAHIQLAVFFFSVGILETRILLADGAEFKKDRGEGLARVLCGEEQADADAGAQVCSLLLAQSEVRPQCLLLVLANRTEISSKLQLMKKHQSDLKKLGILDFTEQDVASHQSYSQKTLIALVTSGALLAVLGITGYFLMNRRSWSPTGERLGEDPYYTENGGGQGYSSGPGTSPEAQGKASVNRGAQENGTGQATSRNGHSARQHVVADTEL

SEQ ID NO: 3203 - DNA, 2622 bp, Homo sapiens
ctccaccttttttggcctcgacggcggcaacccagcctccctcctaacgccctccgcctttgggaccaaccaggggagctcaagttagtagcagccaaggagaggcgctgccttgccaagactaaaaagggaggggagaagagaggaaaaaagcaagaatcccccacccctctcccgggcggagggggcgggaagagcgcgtcctggccaagccgagtagtgtcttccactcggtgcgtctctctaggagccgcgcgggaaggatgctggtccgcaggggcgcgcgcgcagggcccaggatgccgcggggctggaccgcgctttgcttgctgagtttgctgccttctgggttcatgagtcttgacaacaacggtactgctaccccagagttacctacccagggaacattttcaaatgtttctacaaatgtatcctaccaagaaactacaacacctagtacccttggaagtaccagcctgcaccctgtgtctcaacatggcaatgaggccacaacaaacatcacagaaacgacagtcaaattcacatctacctctgtgataacctcagtttatggaaacacaaactcttctgtccagtcacagacctctgtaatcagcacagtgttcaccaccccagccaacgtttcaactccagagacaaccttgaagcctagcctgtcacctggaaatgtttcagacctttcaaccactagcactagccttgcaacatctcccactaaaccctatacatcatcttctcctatcctaagtgacatcaaggcagaaatcaaatgttcaggcatcagagaagtgaaattgactcagggcatctgcctggagcaaaataagacctccagctgtgcggagtttaagaaggacaggggagagggcctggcccgagtgctgtgtggggaggagcaggctgatgctgatgctggggcccaggtatgctccctgctccttgcccagtctgaggtgaggcctcagtgtctactgctggtcttggccaacagaacagaaatttccagcaaactccaacttatgaaaaagcaccaatctgacctgaaaaagctggggatcctagatttcactgagcaagatgttgcaagccaccagagctattcccaaaagaccctgattgcactggtcacctcgggagccctgctggctgtcttgggcatcactggctatttcctgatgaatcgccgcagctggagccccacaggagaaaggctgggcgaagacccttattacacggaaaacggtggaggccagggctatagctcaggacctgggacctcccctgaggctcagggaaaggccagtgtgaaccgaggggctcaggaaaacgggaccggccaggccacctccagaaacggccattcagcaagacaacacgtggtggctgataccgaattgtgactcggctaggtggggcaaggctgggcagtgtccgagagagcacccctctctgcatctgaccacgtgctacccccatgctggaggtgacatctcttacgcccaacccttccccactgcacacacctcagaggctgttcttggggccctacaccttgaggaggggcaggtaaactcctgtcctttacacattcggctccctggagccagactctggtcttctttgggtaaacgtgtgacgggggaaagccaaggtctggagaagctcccaggaacaatcgatggccttgcagcactcacacaggacccccttcccctaccccctcctctctgccgcaatacaggaacccccaggggaaagatgagcttttctaggctacaattttctcccaggaagctttgatttttaccgtttcttccctgtattttctttctctactttgaggaaaccaaagtaaccttttgcacctgctctcttgtaatgatatagccagaaaaacgtgttgccttgaaccacttccctcatctctcctccaagacactgtggacttggtcaccagctcctcccttgttctctaagttccactgagctccatgtgccccctctaccatttgcagagtcctgcacagttttctggctggagcctagaacaggcctcccaagttttaggacaaacagctcagttctagtctctctggggccacacagaaactctttttgggctcctttttctccctctggatcaaagtaggcaggaccatgggaccaggtcttggagctgagcctctcacctgtactcttccgaaaaatcctcttcctctgaggctggatcctagccttatcctctgatctccatggcttcctcctccctcctgccgactcctgggttgagctgttgcctcagtcccccaacagatgcttttctgtctctgcctccctcaccctgagccccttccttgctctgcacccccatatggtcatagcccagatcagctcctaacccttatcaccagctgcctcttctgtgggtgacccaggtccttgtttgctgttgatttctttccagaggggttgagcagggatcctggtttcaatgacggttggaaatagaaatttccagagaagagagtattgggtagatattttttctgaatacaaagtgatgtgtttaaatactgcaattaaagtgatactgaaacacat

SEQ ID NO: 3204 - protein, 385 aa, Homo sapiens; identical to SEQ ID NO: 212

SEQ ID NO: 3205 - DNA, 2817 bp, Homo sapiens
ctccaccttttttggcctcgacggcggcaacccagcctccctcctaacgccctccgcctttgggaccaaccaggggagctcaagttagtagcagccaaggagaggcgctgccttgccaagactaaaaagggaggggagaagagaggaaaaaagcaagaatcccccacccctctcccgggcggagggggcgggaagagcgcgtcctggccaagccgagtagtgtcttccactcggtgcgtctctctaggagccgcgcgggaaggatgctggtccgcaggggcgcgcgcgcagggcccaggatgccgcggggctggaccgcgctttgcttgctgagtttgctgccttctgggttcatgagtcttgacaacaacggtactgctaccccagagttacctacccagggaacattttcaaatgtttctacaaatgtatcctaccaagaaactacaacacctagtacccttggaagtaccagcctgcaccctgtgtctcaacatggcaatgaggccacaacaaacatcacagaaacgacagtcaaattcacatctacctctgtgataacctcagtttatggaaacacaaactcttctgtccagtcacagacctctgtaatcagcacagtgttcaccaccccagccaacgtttcaactccagagacaaccttgaagcctagcctgtcacctggaaatgtttcagacctttcaaccactagcactagccttgcaacatctcccactaaaccctatacatcatcttctcctatcctaagtgacatcaaggcagaaatcaaatgttcaggcatcagagaagtgaaattgactcagggcatctgcctggagcaaaataagacctccagctgtgcggagtttaagaaggacaggggagagggcctggcccgagtgctgtgtggggaggagcaggctgatgctgatgctggggcccaggtatgctccctgctccttgcccagtctgaggtgaggcctcagtgtctactgctggtcttggccaacagaacagaaatttccagcaaactccaacttatgaaaaagcaccaatctgacctgaaaaagctggggatcctagatttcactgagcaagatgttgcaagccaccagagctattcccaaaagaccctgattgcactggtcacctcgggagccctgctggctgtcttgggcatcactggctatttcctgatgaatcgccgcagctggagccccacaggagaaaggctggagctggaaccctgaccactcttcaggaagaaaggagtctgcacatgcagctgcaccctccctccgatccttcctcccacctccccctcccccttctcccacccctgcccccacttcctgtttgggcccctctcccatccagtgtctcacagccctgcttaccagataatgctactttatttatacactgtctagggcgaagacccttattacacggaaaacggtggaggccagggctatagctcaggacctgggacctcccctgaggctcagggaaaggccagtgtgaaccgaggggctcaggaaaacgggaccggccaggccacctccagaaacggccattcagcaagacaacacgtggtggctgataccgaattgtgactcggctaggtggggcaaggctgggcagtgtccgagagagcacccctctctgcatctgaccacgtgctacccccatgctggaggtgacatctcttacgcccaacccttccccactgcacacacctcagaggctgttcttggggccctacaccttgaggaggggcaggtaaactcctgtcctttacacattcggctccctggagccagactctggtcttctttgggtaaacgtgtgacgggggaaagccaaggtctggagaagctcccaggaacaatcgatggccttgcagcactcacacaggacccccttcccctaccccctcctctctgccgcaatacaggaacccccaggggaaagatgagcttttctaggctacaattttctcccaggaagctttgatttttaccgtttcttccctgtattttctttctctactttgaggaaaccaaagtaaccttttgcacctgctctcttgtaatgatatagccagaaaaacgtgttgccttgaaccacttccctcatctctcctccaagacactgtggacttggtcaccagctcctcccttgttctctaagttccactgagctccatgtgccccctctaccatttgcagagtcctgcacagttttctggctggagcctagaacaggcctcccaagttttaggacaaacagctcagttctagtctctctggggccacacagaaactctttttgggctcctttttctccctctggatcaaagtaggcaggaccatgggaccaggtcttggagctgagcctctcacctgtactcttccgaaaaatcctcttcctctgaggctggatcctagccttatcctctgatctccatggcttcctcctccctcctgccgactcctgggttgagctgttgcctcagtcccccaacagatgcttttctgtctctgcctccctcaccctgagccccttccttgctctgcacccccatatggtcatagcccagatcagctcctaacccttatcaccagctgcctcttctgtgggtgacccaggtccttgtttgctgttgatttctttccagaggggttgagcagggatcctggtttcaatgacggttggaaatagaaatttccagagaagagagtattgggtagatattttttctgaatacaaagtgatgtgtttaaatactgcaattaaagtgatactgaaacacat

SEQ ID NO: 3206 - protein, 328 aa, Homo sapiens; identical to SEQ ID NO: 214

SEQ ID NO: 3207 - DNA, 667 bp, Homo sapiens
ctcagggaaaggccagtgtgaaccgaggggctcaggaaaacgggaccggccaggccacctccagaaacggccattcagcaagacaacacgtggtggctgataccgaattgtgactcggctaggtggggcaaggctgggcagtgtccgagagagcacccctctctgcatctgaccacgtgctacccccatgctggaggtgacatctcttacgcccaacccttccccactgcacacacctcagaggctgttcttggggccctacaccttgaggaggggcaggtaaactcctgtcctttacacattcggctccctggagccagactctggtcttctttgggtaaacgtgtgacgggggaaagccaaggtctggagaagctcccaggaacaatcgatggccttgcagcactcacacaggacccccttcccctaccccctcctctctgccgcaatacagatcagctcctaacccttatcaccagctgcctcttctgtgggtgacccaggtccttgtttgctgttgatttctttccagaggggttgagcagggatcctggtttcaatgacggttggaaatagaaatttccagagaagagagtattgggtagatattttttctgaatacaaagtgatgtgtttaaatactgcaattaaagtgatactgaaacac

SEQ ID NO: 3208 - protein, 35 aa, Homo sapiens
MTVGNRNFQRREYWVDIFSEYKVMCLNTAIKVILK

SEQ ID NO: 3209 - DNA, 283 bp, Homo sapiens
gtcaccagagctcataaaagatgtgtgtgctgtcgcatctatgtgaagtatttccatgacccgagcattgaccacaggactgtgctggaggaaactggatcaaggtaccaagacagatacaggagggtctccagaaaccctagagctgaatggaacccgtctggaaaacatacactggaaactaggccgaggattatccaaagggtggttgaaatcaagggttaaagtttggctcaagataaggaagaatcttctaataattaaaactgaccatccaaaaggt

SEQ ID NO: 3210 - protein, 75 aa, Homo sapiens
MTRALTTGLCWRKLDQGTKTDTGGSPETLELNGTRLENIHWKLGRGLSKGWLKSRVKVWLKIRKNLLIIKTDHPK

SEQ ID NO: 3211 - DNA, 683 bp, Homo sapiens
ctggcgctgtggaggttccaatggccgccatgttgtctcagagggacacaccacaggcttctggaactctggctccattttgtgggtgcaagtttctggcttccgttttaaagagcaagagaacctatcagcgttgtcaattctaagaaagtgagtgccaagagcaggctgtacaagaagcatggcacaagaatctgcttctgaagagggcttcaggaagcttccactcatggtggaaaaggaaggagagcaggtatcacagcgcaagaaagaagaaattgttccactccataagttccctcctggaggatgtgtgagacaccaggctgcatgttagaaacggctgtgctccggaaggctaccagggtcatcgtgagggccttgcagatttcagaaatgaagtgacctgccttgagtcttccctcagcctcctcactccactgtagtctcaggagagtgaggacaacaaaactctcttctccccacattaccacttcagcgctgacctgtggcttgagaatctaatctgtgtgcaccgtggcaaagtcttggttttacaggtctcacctgacagctagtcctgatttttccatgatgtgtgggtaaaaagtgggttcttgaagggaaacctcaatgtagcttagctcttgagaaaacagtatgtgcatatgcttcttggatag

SEQ ID NO: 3212 - protein, 51 aa, Homo sapiens
MAQESASEEGFRKLPLMVEKEGEQVSQRKKEEIVPLHKFPPGGCVRHQAAC

SEQ ID NO: 3213 - DNA, 1585 bp, Homo sapiens
ctccccaggcccaggtcaggcctcacggtggcctctccaggatgagctcctgccctccgatggcatctgcaggccccaaatggtctccggtcggtgggctcctccatgccaagcttgggcctcccggcggcctctgcaggcccaagtcgtcctcaagcggcctctccaggtgcaaaacttcctcgagtcagcctctccaggcccaagtcgtcctcaagtcagcctggaattgggcctggaagagcagcaagtcggcctccccgggcccagctccgtcctctcggcggcctctccaggtgcaaaacttcctcgagtcagcctctccaggcccagctcctcctgcctcccagtggtctctttcagcccagcccagctcatggctctcggcggccttcccaggccccgcttttgacttttggtggcctcttcaggcccagaacttgacctccagtgggcctttgcaggcccggcctcctgcctctcaaaggcctgcatgggcccggcctcggcctcacagcggactctccacgcccagctagctctcgcctcactgcggcctccccagtccaaagctcctgcctttcggccacttcggcaggtccagctcctgcctgccagtggcctctttaggcccagctcattcctcacaacggccttcccaggccccgtttttcccttccggcagcctcttggcctctaatttgtttatcttttgtgtataaatcccaaaatattaaattttggaatatttccaccattatataaatattttggtcggtaatttatttggagtgagtttctgcaccatgcccgaattttttattttattttccttgttatttggtgttaaacaggtttaatgacggtcatggcaactttttggcacaatgaaaaatatcgcccatgatcaacgtgttctgctctggggaagggggcaaaggcagggtgaatcactttcttaaaaagtatagctcaagttgggagtgcagagggaatggggagaaaaccctcccgctgcctgtgtcgaagtgcaggagcccccacccccatactcacctgagtccagcccctctggggaaagaaggggtgcatgaactacccctagtccacaggcgcttccctgtggcccaaggccctcttcacactccatcttgtagccccagcaggagctattttccgaaaagtgaaaagctctgaaggtcccacaattcatggtatgtacaggggctcggaggagggaaactgcccagctttcccctggcacagctgcaggggtagggggtatagataagaggagcaggccttggccaggcgtggtggctcacgcctgtaatcccagcactttgggaggtggaggcaggcggatcacgatgtcaggagatcgaaatcagcctggccaagatgatgaagccccgtctgtactaaaaatacaaaaattagccggacgtggtagcgtgcacctgtaatcctagctacctggaaggctgaggcaggagaatggcgggaacccggcgggaagaggttgcagtgagccaagattgcaccactgcattccagcctgggcgacagaggaagactcggtctc

SEQ ID NO: 3214 - protein, 165 aa, Homo sapiens
MSSCPPMASAGPKWSPVGGLLHAKLGPPGGLCRPKSSSSGLSRCKTSSSQPLQAQVVLKSAWNWAWKSSKSASPGPAPSSRRPLQVQNFLESASPGPAPPASQWSLSAQPSSWLSAAFPGPAFDFWWPLQAQNLTSSGPLQARPPASQRPAWARPRPHSGLSTPS

SEQ ID NO: 3215 - DNA, 1936 bp, Homo sapiens
atggcgacttttccaggcacagcttttgccttttgcagcctgtccaggcccagaatgtccttaactcagcatctccaggacgagctcatcctcccagcccatggggctcattcctcacaacggcctttccaggcccagtttttcccttccggtggcctctccgggcccagaacctcctcaagtcggcctctccagacccacttgcaccctccgggcgtcctctccggacccagctcttcctcacggctgcgtctccaggcccgactcctgcctctcaacaacctctttggactcagtgcctacccatctcctggcggccttggtcggcccacagcttcctcaagccaagctccccaggcccaggtcaggcctcacggtggcctctccaggatgagctcctgccctccgatggcatctgcaggccccaaatggtctccggtcggtgggctcctccatgccaagcttgggcctcccggcggcctctgcaggcccaaaacctcctcaagtcggcctctccagacccacttgcagcctcctggcgtcctctccaggcccaagtcgtcctcaagtcagcctggaattgggcctggaagagcagcaagtcggcctccccgggcccagctccgtcctctcggcggcctctccaggtgcaaaacttcctcgagtcagcctctccaggcccagctcctcctgcctcccagtggtctctttcagcccagcccagctcatggctctcggcggccttcccaggccccgcttttgacttttggtggcctcttcaggcccagaacttgacctccagtgggcctttgcaggcccggcctcctgcctctcaaaggcctgcatgggcccggcctcggcctcacagcggactctccacgcccagctagctctcgcctcactgcggcctccccagtccaaagctcctgcctttcggccacttcggcaggtccagctcctgcctgccagtggcctctttaggcccagctcattcctcacaacggccttcccaggccccgtttttcccttccggcagcctcttggcctctaatttgtttatcttttgtgtataaatcccaaaatattaaattttggaatatttccaccattatataaatattttggtcggtaatttatttggagtgagtttctgcaccatgcccgaattttttattttattttccttgttatttggtgttaaacaggtttaatgacggtcatggcaactttttggcacaatgaaaaatatcgcccatgatcaacgtgttctgctctggggaagggggcaaaggcagggtgaatcactttcttaaaaagtatagctcaagttgggagtgcagagggaatggggagaaaaccctcccgctgcctgtgtcgaagtgcaggagcccccacccccatactcacctgagtccagcccctctggggaaagaaggggtgcatgaactacccctagtccacaggcgcttccctgtggcccaaggccctcttcacactccatcttgtagccccagcaggagctattttccgaaaagtgaaaagctctgaaggtcccacaattcatggtatgtacaggggctcggaggagggaaactgcccagctttcccctggcacagctgcaggggtagggggtatagataagaggagcaggccttggccaggcgtggtggctcacgcctgtaatcccagcactttgggaggtggaggcaggcggatcacgatgtcaggagatcgaaatcagcctggccaagatgatgaagccccgtctgtactaaaaatacaaaaattagccggacgtggtagcgtgcacctgtaatcctagctacctggaaggctgaggcaggagaatggcgggaacccggcgggaagaggttgcagtgagccaagattgcaccactgcattccagcctgggcgacagaggaagactcggtctc

SEQ ID NO: 3216 - protein, 264 aa, Homo sapiens
MATFPGTAFAFCSLSRPRMSLTQHLQDELILPAHGAHSSQRPFQAQFFPSGGLSGPRTSSSRPLQTHLHPPGVLSGPSSSSRLRLQARLLPLNNLFGLSAYPSPGGLGRPTASSSQAPQAQVRPHGGLSRMSSCPPMASAGPKWSPVGGLLHAKLGPPGGLCRPKTSSSRPLQTHLQPPGVLSRPKSSSSQPGIGPGRAASRPPRAQLRPLGGLSRCKTSSSQPLQAQLLLPPSGLFQPSPAHGSRRPSQAPLLTFGGLFRPRT

SEQ ID NO: 3217 - DNA, 1182 bp, Homo sapiens
atttttcttttctttggcagttttctgattcagttggcaggtaatttaactccccactttcacaagagcagctgtgagaagccacacagaaagcacccataaagcattttcacactgaagacatccttacttattcaccttttttttttaagttgacatttatggagttactcctgtgtgccaggcactgtactaagtgctgtgcatgtgggctctcatttaatgctgacagaattccaaccaggcaggttaacatcctcactctatggataaagaaactgaaggctagaagatgcacccggggacaagcagtttaagaatgtgtgtgttactaggcagagaagctggcatcgcctgagggctgtgccttgagttcttgaagacattttctttaaagggagtcaccagcaccaccatcagaagcagcagcagaatcatcctcatcatcattttcatcatcctcatctgcgagcacccccaggcaagtgcaaatacaagccagtgcccgtgagaaccaagagtaagcggatcccgttcagaccactcgccaagacagtcttggacttgctaaaggaacaatcagagaaagctgctagaaaatcttccagtgcaaccttagcttctggcccagcccagggtttgtctgagaaaggctcctccaagaagctggcttctcctacaagcagcaagaatacattgcgagggcctggtacaaagaagaaagccagagtggggccccacgtccgccagggcaagaggaggaagagcctgaaaagccacagtggcaggatgaggccatcagcagagcagaagcgagctggcagaagtctcccttgacctattggtcaaggtggccgacagggtgacgtgagagaggagagccacctcatcaaatgaaagtcactgctgaataaagaccttagaagtctgggaagccagggtagaggtggggcagggcggttttcctctccctgggaaatcttgctgtctactgaataaataaatgcaccttctctgtatgcagtgcttctgtgggagaccatatcccagattgctggtgcacctgggttatggtaagcactagtccatgagcctgcttggaatcacactggatgtctccgttttgtcttgtaaatgcctacaacctgaggtaataaatcaacatttgctcaaactggcaca

SEQ ID NO: 3218 - protein, 51 aa, Homo sapiens
MELLLCARHCTKCCACGLSFNADRIPTRQVNILTLWIKKLKARRCTRGQAV

SEQ ID NO: 3219 - DNA, 2564 bp, Homo sapiens
ccaacctgagcaaacacagcagcccgagtgttcccaaggccaaaatgctgagaacgtccactcctaatctgtgtggtggtctgcattgccgggccccctggctctcttctggcattctctgcctctgcctcatattcttgttgggccaggtgggcttgctgcagggacacccccagtgcctggattacgggccccctttccagccccctctgcaccttgagttttgctctgactatgagtccttcggctgctgtgatcagcacaaggaccgccgcatcgctgcccggtactgggacatcatggaatattttgatctgaagagacatgagctgtgtggagattacattaaagacatcctttgccaggagtgctcgccctacgcagcccacctctacgacgccgaaaacacccagacgcctctccggaatctcccgggcctctgctctgattactgctctgccttccattctaactgtcactcagccatttccctgctgaccaatgaccgcggcctccaggagtctcatggaagggacggtacccgcttctgccacctcctggaccttcctgacaaggactattgcttccctaatgtcctgaggaacgactatctcaaccgccacctgggcatggtggcccaagatcctcagggctgcctgcagctctgcctgagcgaggtggccaacgggctgaggaaccccgtctccatggtccatgctggggacggcacccatcgcttctttgttgccgagcaggtaggagtggtgtgggtctacctccctgatgggagtcgcctggagcaacccttcctggacctcaagaacatcgtgttgaccaccccatggatcggggatgagagaggcttcttggggttggcttttcaccccaaattccgccacaatcgcaagttctatatttattattcgtgcctggacaagaagaaggtagaaaagatccgaattagtgagatgaaggtttctcgggctgatcctaacaaagctgacctgaaatcagagagggtcatcttggagattgaagaaccagcctcaaaccataatggcggacaacttctttttggcctggatggctatatgtacatattcactggggacgggggacaggctggagatccctttggcctgtttggaaatgctcagaacaaaagttccctgctgggaaaagttttaaggatcgatgtgaacagggcaggctcacatggcaagcggtaccgagtcccctcggacaatccatttgtttctgagccaggggcccaccccgccatctatgcctatgggatcaggaacatgtggcgttgtgctgtggaccgaggggaccccatcacgcgccagggccgaggccggatattctgtggggacgtgggccagaacaggtttgaagaggttgacctcattttgaaaggtggaaactatggctggagagcaaaggaagggtttgcatgttatgacaaaaaactttgtcacaatgcctctttggatgatgttctgccaatctatgcttatggccatgcagtggggaagtcagtcactggaggttatgtctatcgtggttgtgaatccccaaatctcaatggcctgtatatctttggagacttcatgagtggtcgacttatggctttgcaggaagatagaaaaaacaagaaatggaagaagcaggatctttgcctgggcagcaccacgtcctgtgccttcccagggctgatcagcacccatagcaagttcatcatctcctttgctgaagatgaagcaggggagctgtatttcctggcgacctcttacccaagtgcctatgcaccacgtggatctatttacaagtttgttgacccctcaaggcgagcacccccaggcaagtgcaaatacaagccagtgcccgtgagaaccaagagtaagcggatcccgttcagaccactcgccaagacagtcttggacttgctaaaggaacaatcagagaaagctgctagaaaatcttccagtgcaaccttagcttctggcccagcccagggtttgtctgagaaaggctcctccaagaagctggcttctcctacaagcagcaagaatacattgcgagggcctggtacaaagaagaaagccagagtggggccccacgtccgccagggcaagaggaggaagagcctgaaaagccacagtggcaggatgaggccatcagcagagcagaagcgagctggcagaagtctcccttgacctattggtcaaggtggccgacagggtgacgtgagagaggagagccacctcatcaaatgaaagtcactgctgaataaagaccttagaagtctgggaagccagggtagaggtggggcagggcggttttcctctccctgggaaatcttgctgtctactgaataaataaatgcaccttctctgtatgcagtgcttctgtgggagaccatatcccagattgctggtgcacctgggttatggtaagcactagtccatgagcctgcttggaatcacactggatgtctccgttttgtcttgtaaatgcctacaacctgaggtaataaatcaacatttgctcaaactggcaca

SEQ ID NO: 3220 - protein, 724 aa, Homo sapiens
MLRTSTPNLCGGLHCRAPWLSSGILCLCLIFLLGQVGLLQGHPQCLDYGPPFQPPLHLEFCSDYESFGCCDQHKDRRIAARYWDIMEYFDLKRHELCGDYIKDILCQECSPYAAHLYDAENTQTPLRNLPGLCSDYCSAFHSNCHSAISLLTNDRGLQESHGRDGTRFCHLLDLPDKDYCFPNVLRNDYLNRHLGMVAQDPQGCLQLCLSEVANGLRNPVSMVHAGDGTHRFFVAEQVGVVWVYLPDGSRLEQPFLDLKNIVLTTPWIGDERGFLGLAFHPKFRHNRKFYIYYSCLDKKKVEKIRISEMKVSRADPNKADLKSERVILEIEEPASNHNGGQLLFGLDGYMYIFTGDGGQAGDPFGLFGNAQNKSSLLGKVLRIDVNRAGSHGKRYRVPSDNPFVSEPGAHPAIYAYGIRNMWRCAVDRGDPITRQGRGRIFCGDVGQNRFEEVDLILKGGNYGWRAKEGFACYDKKLCHNASLDDVLPIYAYGHAVGKSVTGGYVYRGCESPNLNGLYIFGDFMSGRLMALQEDRKNKKWKKQDLCLGSTTSCAFPGLISTHSKFIISFAEDEAGELYFLATSYPSAYAPRGSIYKFVDPSRRAPPGKCKYKPVPVRTKSKRIPFRPLAKTVLDLLKEQSEKAARKSSSATLASGPAQGLSEKGSSKKLASPTSSKNTLRGPGTKKKARVGPHVRQGKRRKSLKSHSGRMRPSAEQKRAGRSLP

SEQ ID NO: 3221 - DNA, 594 bp, Homo sapiens
cgatgtgaacagggcaggctcacatggcaagcggtaccgagtcccctcggacaatccatttgtttctgagccaggggcccaccccgccatctatgcctatgggatcaggaacatgtggcgttgtgctgtggaccgaggggaccccatcacgcgccagggccgaggccggatattctgtggggacgtgggccagaacaggtttgaagaggttgacctcattttgaaaggtggaaactatggctggcagaagtctcccttgacctattggtcaaggtggccgacagggtgacgtgagagaggagagccacctcatcaaatgaaagtcactgctgaataaagaccttagaagtctgggaagccagggtagaggtggggcagggcggttttcctctccctgggaaatcttgctgtctactgaataaataaatgcaccttctctgtatgcagtgcttctgtgggagaccatatcccagattgctggtgcacctgggttatggtaagcactagtccatgagcctgcttggaatcacactggatgtctccgttttgtcttgtaaatgcctacaacctgaggtaataaatcaacatttgctc

SEQ ID NO: 3222 - protein, 58 aa, Homo sapiens
MWRCAVDRGDPITRQGRGRIFCGDVGQNRFEEVDLILKGGNYGWQKSPLTYWSRWPTG

SEQ ID NO: 3223 - DNA, 2503 bp, Homo sapiens
gcagagcagggaagccaacctgagcaaacacagcagcccgagtgttcccaaggccaaaatgctgagaacgtccactcctaatctgtgtggtggtctgcattgccgggccccctggctctcttctggcattctctgcctctgcctcatattcttgttgggccaggtgggcttgctgcagggacacccccagtgcctggattacgggccccctttccagccccctctgcaccttgagttttgctctgactatgagtccttcggctgctgtgatcagcacaaggaccgccgcatcgctgcccggtactgggacatcatggaatattttgatctgaagagacatgagctgtgtggagattacattaaagacatcctttgccaggagtgctcgccctacgcagcccacctctacgacgccgaaaacacccagacgcctctccggaatctcccgggcctctgctctgattactgctctgccttccattctaactgtcactcagccatttccctgctgaccaatgaccgcggcctccaggagtctcatggaagggacggtacccgcttctgccacctcctggaccttcctgacaaggactattgcttccctaatgtcctgaggaacgactatctcaaccgccacctgggcatggtggcccaagatcctcagggctgcctgcagctctgcctgagcgaggtggccaacgggctgaggaaccccgtctccatggtccatgctggggacggcacccatcgcttctttgttgccgagcaggtaggagtggtgtgggtctacctccctgatgggagtcgcctggagcaacccttcctggacctcaagaacatcgtgttgaccaccccatggatcggggatgagagaggcttcttggggttggcttttcaccccaaattccgccacaatcgcaagttctatatttattattcgtgcctggacaagaagaaggtagaaaagatccgaattagtgagatgaaggtttctcgggctgatcctaacaaagctgacctgaaatcagagagggtcatcttggagattgaagaaccagcctcaaaccataatggcggacaacttctttttggcctggatggctatatgtacatattcactggggacgggggacaggctggagatccctttggcctgtttggaaatgctcagaacaaaagttccctgctgggaaaagttttaaggatcgatgtgaacagggcaggctcacatggcaagcggtaccgagtcccctcggacaatccatttgtttctgagccaggggcccaccccgccatctatgcctatgggatcaggaacatgtggcgttgtgctgtggaccgaggggaccccatcacgcgccagggccgaggccggatattctgtggggacgtgggccagaacaggtttgaagaggttgacctcattttgaaaggtggaaactatggctggagagcaaaggaagggtttgcatgttatgacaaaaaactttgtcacaatgcctctttggatgatgttctgccaatctatgcttatggccatgcagtggggaagtcagtcactggaggttatgtctatcgtggttgtgaatccccaaatctcaatggcctgtatatctttggagacttcatgagtggtcgacttatggctttgcaggaagatagaaaaaacaagaaatggaagaagcaggatctttgcctgggcagcaccacgtcctgtgccttcccagggctgatcagcacccatagcaagttcatcatctcctttgctgaagatgaagcaggggagctgtatttcctggcgacctcttacccaagtgcctatgcaccacgtggatctatttacaagtttgttgacccctcaaggcgagcacccccaggcaagtgcaaatacaagccagtgcccgtgagaaccaagagtaagcggatcccgttcagaccactcgccaagacagtcttggacttgctaaaggaacaatcagagaaagctgctagaaaatcttccagtgcaaccttagcttctggcccagcccagggtttgtctgagaaaggctcctccaagaagctggcttctcctacaagcagcaagaatacattgcgagggcctggtacaaagaagaaagccagagtggggccccacgtccgccagggcaagaggaggaagagcctgaaaagccacagtggcaggatgaggccatcagcagagcagaagcgagctggcagaagtctcccttgacctattggtcaaggtggccgacagggtgacgtgagagaggagagccacctcatcaaatgaaagtcactgctgaataaagaccttagaagtctgggaagccagggtagaggtggggcagggcggttttcctctccctgggaaatcttgctgtctactgaataaataaatgcaccttctctgtatgcagtgcttctgtgggagaccatatcccagattgctggtgcacctgggttatggtaagcactagtccatgagcctgcttggaatcac

SEQ ID NO: 3224 - protein, 724 aa, Homo sapiens; identical to SEQ ID NO: 3220

SEQ ID NO: 3225 - DNA, 891 bp, Homo sapiens
ggacccttttgtgaagagttatgtagaaatgctggaattctatggggatcgagatggagcccaagaggtactcaccaattatgcatatgatgaaaagtttccatcaaatccaaatgcccatatctacttatacaactttctaaagagacagaaggcaccaagatcaaaattgataagtgtgcttaagcatctacagaaaatttcaataatgtacagtacactgagataaacagagaaagttggctccagctgccatctccatgtatgtatcatccacactatcccctgctgcccggatgagactgaggagagaggatcagaagtcttgtgcaaccctggttggaatactctgcactgatattttttgaaaatcaactttattgaaatttagttttcagagagtaaacacacttattttaagtatgtgcttggatgcgttacattcatgaaccaccatggtaatcatgatatagaacatttctgtcgcccccagaatgcctttcatttccctttgcagcctgtctgtccccacaaccatggccccagacaatcactgatctgcttattgtcactatagattaatttttatctcttctagaatttcatgtaaatggactcttatgtagtcattttaatctggcttctcttgctcagcgtaacatatttgagattcacccatgttattgtgtatattagtaatttccttattactgctgaatagtatttcatttttatacattcacttcttgatggacatttgggtaatttttactttttggctattgtgaatgatgctgctgagaacattcatgtacaagattctgtatacacatatattttcatgtttcttgggtagctacctgagagaggagttgctgcctaagagtagta

SEQ ID NO: 3226 - protein, 66 aa, Homo sapiens
MLEFYGDRDGAQEVLTNYAYDEKFPSNPNAHIYLYNFLKRQKAPRSKLISVLKHLQKISIMYSTLR

SEQ ID NO: 3227 - DNA, 681 bp, Homo sapiens
gaagtgacttctggaagtgacccaggaagtgacattttagctttaggtttaattggttcgactgccttctccacaatttgggcgagaatttcctttgccttctcagcaaaagttgttctgcggacccgtctgggtcaactttcatgagggacattgagacaaacaaatgaaatatgggttaaagtactctgagcagctacaaaaagaagaccagtctatcctgctggagacagtggccacgtgaagaaagagctcttgcagtatgaaagaccacatggaaagagaggccacatggaaccaacagtcagcatcttggtttcggacacgtgaagaaattcatctcagactgtgtatcctaaatcaggcacttgctgaatctaactacatgagtgagaccagttgacaacacatggagcagacatgagctgttctcagtgagtcctacacaaattcctgactcacaacactgtgagcaataaaatggttgttattttaagccactgaagtttgcagtgatttcttacataggaatagataaatgaaacacaaacattgatcatttgcatcttctatcttttttatgactagtcttattggaaattaccagtttatttctgccatggttagaaaacaaactctgaaattttgatactttaaaatttttttgagacttactgtgcc

SEQ ID NO: 3228 - protein, 46 aa, Homo sapiens
MKDHMEREATWNQQSASWFRTREEIHLRLCILNQALAESNYMSETS

SEQ ID NO: 3229 - DNA, 2026 bp, Homo sapiens
aacatggctgcggcgcctgggctgctcgtctggctgctcgtgctccggctgccctggcgggtgccgggccagctggaccccagcactggccggcggttctcggagcacaaactctgcgcggacgacgaatgcagcatgttaatgtaccgcggtgaggctcttgaagatttcacaggcccggattgtcgttttgtgaattttaaaaaaggtgatcctgtatatgtttactataaactggcaagaggatggcctgaagtttgggctggaagtgttggacgcacttttggatattttccaaaagatttaatccaggtagttcatgaatataccaaagaagagctacaagttccaacagatgagacggattttgtttgttttgatggaggaagagatgattttcataattataatgtagaagaacttttagggtttttggaactgtacaattctgcagctacagattctgagaaagctgtagaaaaaactttacaggatatggaaaaaaaccctgaattatctaaggaaagggaacctgaacctgaaccagtagaagccaactcagaggaaagtgatagtgtattctcagaaaacactgaggatcttcaggaacagtttacaactcagaagcaccactcccatgcaaacagccaagcaaatcatgctcagggagagcaggcttcatttgaatcttttgaagaaatgctgcaagataaactaaaagtgccagaaagtgaaaacaacaaaaccagcaatagttctcaggtctcaaatgaacaggataagattgatgcctataaacttttgaaaaaagaaatgactctagacttgaaaaccaaatttggctcaacagctgatgcacttgtatctgatgatgagacaaccagactcgttacttcattagaagatgattttgatgaggaattggatactgagtattatgcagttggaaaggaagatgaggagaaccaagaagactttgatgagttgccattacttacctttacagatggggaagatatgaaaactccagcaaagtctggcgttgagaaatatccaacagataaagagcagaattcaaatgaagaggacaaggttcagctaactgtgccccctggcatcaaaaatgatgataaaaatatactaacaacctggggggacactatcttctctattgtcacaggaggtgaagaaacaagagatacgatggatttagagagctctagttcagaggaagaaaaagaagatgatgatgatgcattagtcccagatagcaaacaggggaaaccacagtcagcaacagattatagtgaccctgacaatgtagatgatggtctttttattgtagacattcctaaaacaaataatgacaaagaagtaaacgcagaacatcacattaaaggaaaagggaggggagttcaggaatccaagaggggcctggtacaagataagacagaattagaggatgaaaatcaagaaggctttaaaacagagcccataaaactatgacctctgaggtttcattggaaagaaagtgtactgtgcattatccattacagtaaaggatttcattggcttcaaaatccaaaagtttattttaaaaggtttgttgttagaactaagctgccttggcagtgtgcatttttgagccaaacaattcaaaaatgtcatttcttccctaaataaaaatcaccttttaagctagagcgtccttacaactttgaaatgtgcaataaagaatacctgtgttttagctaatgtagcatatgtaattgcaaaatgatttagaatgtcatgaaaaatatgaacatttcctgtggaaatgctttaagaacatgtatttccattatcctatttttagtgtacaccagctgaatacggagcaatggtgtttataagcgtttttttaaactatctggtcacaaagactgttacgctaaaaatgtttactaaaagatcactaaactatctcccctcttgctgaagttctttgtagtaatagctcataaaaatttgtttattaatattt

SEQ ID NO: 3230 - protein, 500 aa, Homo sapiens
MAAAPGLLVWLLVLRLPWRVPGQLDPSTGRRFSEHKLCADDECSMLMYRGEALEDFTGPDCRFVNFKKGDPVYVYYKLARGWPEVWAGSVGRTFGYFPKDLIQVVHEYTKEELQVPTDETDFVCFDGGRDDFHNYNVEELLGFLELYNSAATDSEKAVEKTLQDMEKNPELSKEREPEPEPVEANSEESDSVFSENTEDLQEQFTTQKHHSHANSQANHAQGEQASFESFEEMLQDKLKVPESENNKTSNSSQVSNEQDKIDAYKLLKKEMTLDLKTKFGSTADALVSDDETTRLVTSLEDDFDEELDTEYYAVGKEDEENQEDFDELPLLTFTDGEDMKTPAKSGVEKYPTDKEQNSNEEDKVQLTVPPGIKNDDKNILTTWGDTIFSIVTGGEETRDTMDLESSSSEEEKEDDDDALVPDSKQGKPQSATDYSDPDNVDDGLFIVDIPKTNNDKEVNAEHHIKGKGRGVQESKRGLVQDKTELEDENQEGFKTEPIKL

SEQ ID NO: 3231 - DNA, 860 bp, Homo sapiens
agtgacaagagggaggacttacttatcataagcagcttctttaaagaacaacagtctttgcagcggttccagaagtactttaatgtccatgagctggaagccttgctacaagaaatgtcatcaaaactgaagtcagcgcagcaggagagcctgccctataatatggaaaaagtcctagataaggtcttccgtgcttctgagtcacaaattctgagcatagcagaaaaaatgcttgatactcgtgtggctgaaaatagagatctgggaatgaacgaaaataacatatttgaagaggctgcagtgcttgatgacattcaagacctcatctattttgtcaggtacaagcactccacagcagaggagacagccacactggtgatggcaccacctctagaggaaggcttgggtggagcaatggaagagatgcaaccactgcatgaagataatttctcacgagagaagacagcagaacttaatgtgcaggttcctgaagaacccacccacttggaccaacgtgtgattggggacactcatgcctcagaagtgtcacagaagccaaatactgagaaagacctggacccagggccagttacaacagaagacactcctatggatgctattgatgcaaacaagcaaccagagacagccgccgaagagccggcaagtgtcacacctttggaaaacgcaatccttctaatatattcattcatgttttatttaactaagtcgctagttgctacattgcctgatgatgttcagcctgggcctgatttttatggactgccatggaaacctgtatttatcactgccttcttgggaattgcttcgtttgccattttcttatggagaactgtccttgt

SEQ ID NO: 3232 - protein, 247 aa, Homo sapiens
MSSKLKSAQQESLPYNMEKVLDKVFRASESQILSIAEKMLDTRVAENRDLGMNENNIFEEAAVLDDIQDLIYFVRYKHSTAEETATLVMAPPLEEGLGGAMEEMQPLHEDNFSREKTAELNVQVPEEPTHLDQRVIGDTHASEVSQKPNTEKDLDPGPVTTEDTPMDAIDANKQPETAAEEPASVTPLENAILLIYSFMFYLTKSLVATLPDDVQPGPDFYGLPWKPVFITAFLGIASFAIFLWRTV

SEQ ID NO: 3233 - DNA, 774 bp, Homo sapiens
tgatcaggggataacagggaatgacagacatgaatggcaagatataagggcgcagtgttataagatgccgacttgagagggattgtcaaaagagcattttgatggctaaatatgtaccagaaattgtgctaggaatacaagattccaagaggtataaagtgtaattctgacttttgaaagtcttcaaaaaaagtttatccaaattttcctccagatgatttcctctatagaatctagttttctttttacatagtaatcctttaaatatttgaagttatactttaatttattttagcattttatcctggaaaatttcaaatatacaaaagcagagaatccgtgggaccatcacccaataattcccaaaagtgactgtaccattttatacttccatcagcagttaatgaaacttccatttgaccacaccttccctaacacttggtattatcagtcttaaattttagccattgtagtgggtatgcctttctggttttaattgtaattcctgatgattaatgatattgagcactttttcactgcttattggccatagttttttgtgtgtcagttcactctgactagctggaatttaaatgtcttgcagccctgtgacaactctgggaattgtttagcttacagttgttcttttttcctttagttattctttgcccatcctcaaggaatcttaccctacacaggagctgtttagaattcaggctgaggctgaaggagagacctccttgcatatttctggaactctacttgttcctagtg

SEQ ID NO: 3234 - protein, 53 aa, Homo sapiens
QLWELFSLQLFFFPLVILCPSSRNLTLHRSCLEFRLRLKERPPCIFLELYLFL

SEQ ID NO: 3235 - DNA, 825 bp, Homo sapiens
ggacatgttctaaaaagctctttcattggctgtctttatcatggtaccagccttggattgagaaacagcccataagaaaattaattagtggtctttccatggttagaaataagagaattatctcctgcatcatcctaataagcttaactgtgttaggttgatcagtcctggctttctacattgaagaaaagtgagcatcatttcaacccaacagtctttgacacatagtgttttttcacatttgtttcatttactagtgaggagagaattatgagacgttagaaaatgcaggtgatgtatcaacaggccacagttggatttttatcctaaaggacagttttatttccttcctgtgactttgtataatctatgcatttttaagaataggataggaagtgagattttattggagtattcagacagaatgccaggaggaaaagagaaacactttcattgacaaccagttttatcttaggaaactgagtcaagaagagtatgaacggcaagaaagagagcacaggctgtcagctgcagatgaaaaggcagtttcggctgcagaggaagtaaaaacttacaagcggagaattgaagaaatggaggatgaattacagaagacagagcggtcatttaaaaaccagatcgctacccatgagaagaaagctcatgaaaactggctcaaagctcgtgctgcagaaagagctatagctgaagagaaaagggaagctgccaatttgagacacaaattattagaattaacacaaaagatggcaatgctgcaagaagaacctgtgattgtaaaaccaatgccaggaaaaccaaatacac

SEQ ID NO: 3236 - protein, 76 aa, Homo sapiens
MEDELQKTERSFKNQIATHEKKAHENWLKARAAERAIAEEKREAANLRHKLLELTQKMAMLQEEPVIVKPMPGKPN

SEQ ID NO: 3237 - DNA, 581 bp, Homo sapiens
ctcgatggtcagctgaggcatctgggaaaccctctccttctgatccaggatctggtacagctaccatgatgaacagcagctcaagaggctcttcccctaccagggtactcgatgaaggcaaggtaaatgcacccattttgaataattagttatttcaggaacatttagctcttcctacaactctctctttgcctcatctcctatttgtgtgttctatctgtactatctcatttattttttaaaaaagcaaactgttctccaagagcctgaagtcccctcagttcccagcattacatctttggctgagcgtccagtagcagtaagtacttagaagtgtggactgaactgggctataagttgcatggcaatattgatcttacttttatccttgacttgggagtgttgctgaaatctgacggattcattggccttttctcctctctcctgtttggttagacatttaacctgtgtagagcatctgctgtaactgtaattaacttaaacaaaagtgaaaagtccccactcttgtgtgtctcagtgtttaatgctcttaggcaaagtaaattcattgtaaattgtgt

SEQ ID NO: 3238 - protein, 61 aa, Homo sapiens
LVISGTFSSSYNSLFASSPICVFYLYYLIYFLKKQTVLQEPEVPSVPSITSLAERPVAVST

SEQ ID NO: 3239 - DNA, 1226 bp, Homo sapiens
catgctgtgtgaccatcagcaaatctaatactctctgcgcctgtgttcctgcatatttagaacaagatggtcctattacagatttagagatgtcagaatttgtgttaatatatgtagggcctacagaaggtactctgaataatcgctgttacatggtagagaatggatttttcattccctttcattctctgcattcttaatatggaaattactctgataggagggatgtgcagagggagtgactgccttagaaatagatgtatgaatggcgtaacttctatcattagtcaggaatgacctccatttataacctgtgcgttcccttccatttgcagatgtaagcaataatatgatacagcaagtgttcactcctgtggcatacttttaacctttctaagcttgtcagtgggaacaaatgagaggggtagagttttttgcactaattctgctctttggacaagtgcctgacatctgcttcattgggttttagtttttactggtgttggtgcttttgtctgtcataccatagtatttcaaaacttcaattgtttctactctgcaggttaatatggctccaaaagggccccctcctttcccaggagtccctctcatgagcacccccatgggaggccctgtaccaccacccattcgatatggaccaccacctcagctctgcggaccttttgggcctcggccacttcctccaccctttggccctggtatgcgtccaccactaggcttaagagaatttgcaccaggcgttccaccaggaagacgggacctgcctctccaccctcggggatttttacctggacacgcaccatttagacctttaggttcacttggcccaagagagtactttattcctggtacccgattaccacccccaacccatggtccccaggaatacccaccaccacctgctgtaagagacttactgccgtcaggctctagagatgagcctccacctgcctctcagagcactagccaggactgttcacaggctttaaaacagagcccataaaactatgacctctgaggtttcattggaaagaaagtgtactgtgcattatccattacagtaaaggatttcattggcttcaaaatccaaaagtttattttaaaaggtttgttgttagaactaagctgccttggcagtgtgcatttttgagccaaacaattcaaaaatgtcatttcttccctaaataaaaatcaccttttaagct

SEQ ID NO: 3240 - protein, 151 aa, Homo sapiens
MAPKGPPPFPGVPLMSTPMGGPVPPPIRYGPPPQLCGPFGPRPLPPPFGPGMRPPLGLREFAPGVPPGRRDLPLHPRGFLPGHAPFRPLGSLGPREYFIPGTRLPPPTHGPQEYPPPPAVRDLLPSGSRDEPPPASQSTSQDCSQALKQSP

SEQ ID NO: 3241 - DNA, 1551 bp, Homo sapiens
catgctgtgtgaccatcagcaaatctaatactctctgcgcctgtgttcctgcatatttagaacaagatggtcctattacagatttagagatgtcagaatttgtgttaatatatgtagggcctacagaaggtactctgaataatcgctgttacatggtagagaatggatttttcattccctttcattctctgcattcttaatatggaaattactctgataggagggatgtgcagagggagtgactgccttagaaatagatgtatgaatggcgtaacttctatcattagtcaggaatgacctccatttataacctgtgcgttcccttccatttgcagatgtaagcaataatatgatacagcaagtgttcactcctgtggcatacttttaacctttctaagcttgtcagtgggaacaaatgagaggggtagagttttttgcactaattctgctctttggacaagtgcctgacatctgcttcattgggttttagtttttactggtgttggtgcttttgtctgtcataccatagtatttcaaaacttcaattgtttctactctgcaggttaatatggctccaaaagggccccctcctttcccaggagtccctctcatgagcacccccatgggaggccctgtaccaccacccattcgatatggaccaccacctcagctctgcggaccttttgggcctcggccacttcctccaccctttggccctggtatgcgtccaccactaggcttaagagaatttgcaccaggcgttccaccaggaagacgggacctgcctctccaccctcggggatttttacctggacacgcaccatttagacctttaggttcacttggcccaagagagtactttattcctggtacccgattaccacccccaacccatggtccccaggaatacccaccaccacctgctgtaagagacttactgccgtcaggctctagagatgagcctccacctgcctctcagagcactagccaggactgttcacaggctttaaaacagagcccataaaactatgacctctgaggtttcattggaaagaaagtgtactgtgcattatccattacagtaaaggatttcattggcttcaaaatccaaaagtttattttaaaaggtttgttgttagaactaagctgccttggcagtgtgcatttttgagccaaacaattcaaaaatgtcatttcttccctaaataaaaatcaccttttaagctagagcgtccttacaactttgaaatgtgcaataaagaatacctgtgttttagctaatgtagcatatgtaattgcaaaatgatttagaatgtcatgaaaaatatgaacatttcctgtggaaatgctttaagaacatgtatttccattatcctatttttagtgtacaccagctgaatacggagcaatggtgtttataagcgtttttttaaactatctggtcacaaagactgttacgctaaaaatgtttactaaaagatcactaaactatctcccctcttgctgaagttctttgtagtaatagctcataaaaatttgtttattaatatt

SEQ ID NO: 3242 - protein, 151 aa, Homo sapiens; identical to SEQ ID NO: 3240

SEQ ID NO: 3243 - DNA, 1869 bp, Homo sapiens
catgctgtgtgaccatcagcaaatctaatactctctgcgcctgtgttcctgcatatttagaacaagatggtcctattacagatttagagatgtcagaatttgtgttaatatatgtagggcctacagaaggtactctgaataatcgctgttacatggtagagaatggatttttcattccctttcattctctgcattcttaatatggaaattactctgataggagggatgtgcagagggagtgactgccttagaaatagatgtatgaatggcgtaacttctatcattagtcaggaatgacctccatttataacctgtgcgttcccttccatttgcagatgtaagcaataatatgatacagcaagtgttcactcctgtggcatacttttaacctttctaagcttgtcagtgggaacaaatgagaggggtagagttttttgcactaattctgctctttggacaagtgcctgacatctgcttcattgggttttagtttttactggtgttggtgcttttgtctgtcataccatagtatttcaaaacttcaattgtttctactctgcaggttaatatggctccaaaagggccccctcctttcccaggagtccctctcatgagcacccccatgggaggccctgtaccaccacccattcgatatggaccaccacctcagctctgcggaccttttgggcctcggccacttcctccaccctttggccctggtatgcgtccaccactaggcttaagagaatttgcaccaggcgttccaccaggaagacgggacctgcctctccaccctcggggatttttacctggacacgcaccatttagacctttaggttcacttggcccaagagagtactttattcctggtacccgattaccacccccaacccatggtccccaggaatacccaccaccacctgctgtaagagacttactgccgtcaggctctagagatgagcctccacctgcctctcagagcactagccaggactgttcacaggctttaaaacagagcccataaaactatgacctctgaggtttcattggaaagaaagtgtactgtgcattatccattacagtaaaggatttcattggcttcaaaatccaaaagtttattttaaaaggtttgttgttagaactaagctgccttggcagtgtgcatttttgagccaaacaattcaaaaatgtcatttcttccctaaataaaaatcaccttttaagctagagcgtccttacaactttgaaatgtgcaataaagaatacctgtgttttagctaatgtagcatatgtaattgcaaaatgatttagaatgtcatgaaaaatatgaacatttcctgtggaaatgctttaagaacatgtatttccattatcctatttttagtgtacaccagctgaatacggagcaatggtgtttataagcgtttttttaaactatctggtcacaaagactgttacgctaaaaatgtttactaaaagatcactaaactatctcccctcttgctgaagttctttgtagtaatagctcataaaaatttgtttattaatatttcccaagtgtctgttgactcattggactgttatgaggcttgtgccatttggggaacatgtaaactcaggctcccagaactgaagatggtggctggtggcacacttccggctgctcctccgtcacctgtgaactctacaagtgacgtctttttatttcaaagaagtttatttcccacttgtatagcattcacatgctttctttacgatcctcattgtctatttgagaatggttttctgagagtgagtttacattagtagcaagagttgtttgacctgatgttccattgtttttaccattcctgtagaaaaagggtgcac

SEQ ID NO: 3244 - protein, 151 aa, Homo sapiens; identical to SEQ ID NO: 3240

SEQ ID NO: 3245 - DNA, 743 bp, Homo sapiens
atgaagctgataattggactcaactcaggaggaagttttcaggtgctgacaagtaaatgtatccctgcagttcagaacgcagttgctatcacaggcatgtgtgaactggcacaccagtccaaaaggctgaggcggcggcgggcgcgcgaggctgttgtgctcccggctctcctgtttcccctcctgagcgggtggaggaggcccaagcgatgctgggcgcgctcccccttcctttccctccggcgtcctctcccggccctctcgcgctgcactgtctctccgacgcaagattctcctggcccggatatggctcgtggacagcagaaaattcagtctcagcagaataatgccaaaaagcaagctggacaaaagaagaaacaaggacatgaccaaaaggctgctgccaaagctgccttaatatatacctgcactgtctgtaggtgaattcacgacacctttgactcttctactgtctcagaccttaggtaacatacctgcagctgcttttctaacaaactgttgatcagcaaaaataaaggggctacagaaacactcattttttatgctgttcccttttgggcttcatgcaaagacaattctgtgtaaatgtacagttgactctgatttggaaatatgaaaatcagtccatccttgttataaaaaaattttttacaattgtaattatattgatgttcatattgtgtaaaataactcatttaataaaatagtactttgatttacga

SEQ ID NO: 3246 - protein, 147 aa, Homo sapiens
MKLIIGLNSGGSFQVLTSKCIPAVQNAVAITGMCELAHQSKRLRRRRAREAVVLPALLFPLLSGWRRPKRCWARSPFLSLRRPLPALSRCTVSPTQDSPGPDMARGQQKIQSQQNNAKKQAGQKKKQGHDQKAAAKAALIYTCTVCR

SEQ ID NO: 3247 - DNA, 1440 bp, Homo sapiens
ggggggggcggggcctcgggactccgcccacgcctccgtctcctccgcgctccgccacagccggccgacaccacaccagccggggagccgccgccgccgccgccacctctgagcagccggctgggagcgagagccgacagctagtctgcaagccaccgctgtcgccatggggagccgcgtctcgcgggaagacttcgagtgggtctacaccgaccagccgcacgccgaccggcgccgggagatcctggcaaagtatccagagataaagtccttgatgaaacctgatcccaatttgatatggattataattatgatggttctcacccagttgggtgcattttacatagtaaaagacttggactggaaatgggtcatatttggggcctatgcgtttggcagttgcattaaccactcaatgactctggctattcatgagattgcccacaatgctgcctttggcaactgcaaagcaatgtggaatcgctggtttggaatgtttgctaatcttcctattgggattccatattcaatttcctttaagaggtatcacatggatcatcatcggtaccttggagctgatggcgtcgatgtagatattcctaccgattttgagggctggttcttctgtaccgctttcagaaagtttatatgggttattcttcagcctctcttttatgcctttcgacctctgttcatcaaccccaaaccaattacgtatctggaagttatcaataccgtggcacaggtcacttttgacattttaatttattactttttgggaattaaatccttagtctacatgttggcagcatctttacttggcctgggtttgcacccaatttctggacattttatagctgagcattacatgttcttaaagggtcatgaaacttactcatattatgggcctctgaatttacttaccttcaatgtgggttatcataatgaacatcatgatttccccaacattcctggaaaaagtcttccactggtgaggaaaatagcagctgaatactatgacaacctccctcactacaattcctggataaaagtactgtatgattttgtgatggatgatacaataagtccctactcaagaatgaagaggcaccaaaaaggagagatggtgctggagtaaatatcattagtgccaaagggattcttctccaaaactttagatgataaaatgccgggcgtggcggcacatgcctgtaatcccagctacatgggaggctgaggtgggagaattgcttgaacccaggaggcggaggcagaggctgcagtgacccaagattgtgccactgcactccaccctgggcaacagagcaagaccccatctcaaaaataaataaatatatataaaaaataaaaagctatttctagtttatttcactataaagttttgctttattaaaaagctaataaacagctattaatcac

SEQ ID NO: 3248 - protein, 323 aa, Homo sapiens; identical to SEQ ID NO: 237

SEQ ID NO: 3249 - DNA, 1824 bp, Homo sapiens
ggggggggcggggcctcgggactccgcccacgcctccgtctcctccgcgctccgccacagccggccgacaccacaccagccggggagccgccgccgccgccgccacctctgagcagccggctgggagcgagagccgacagctagtctgcaagccaccgctgtcgccatggggagccgcgtctcgcgggaagacttcgagtgggtctacaccgaccagccgcacgccgaccggcgccgggagatcctggcaaagtatccagagataaagtccttgatgaaacctgatcccaatttgatatggattataattatgatggttctcacccagttgggtgcattttacatagtaaaagacttggactggaaatgggtcatatttggggcctatgcgtttggcagttgcattaaccactcaatgactctggctattcatgagattgcccacaatgctgcctttggcaactgcaaagcaatgtggaatcgctggtttggaatgtttgctaatcttcctattgggattccatattcaatttcctttaagaggtatcacatggatcatcatcggtaccttggagctgatggcgtcgatgtagatattcctaccgattttgagggctggttcttctgtaccgctttcagaaagtttatatgggttattcttcagcctctcttttatgcctttcgacctctgttcatcaaccccaaaccaattacgtatctggaagttatcaataccgtggcacaggtcacttttgacattttaatttattactttttgggaattaaatccttagtctacatgttggcagcatctttacttggcctgggtttgcacccaatttctggacattttatagctgagcattacatgttcttaaagggtcatgaaacttactcatattatgggcctctgaatttacttaccttcaatgtgggttatcataatgaacatcatgatttccccaacattcctggaaaaagtcttccactggtgaggaaaatagcagctgaatactatgacaacctccctcactacaattcctggataaaagtactgtatgattttgtgatggatgatacaataagtccctactcaagaatgaagaggcaccaaaaaggagagatggtgctggagtaaatatcattagtgccaaagggattcttctccaaaactttagatgataaaatggaatttttgcattattaaacttgagaccagtgatgctcagaagctcccctggcacaatttcagagtaagagctcggtgataccaagaagtgaatctggcttttaaacagtcagcctgactctgtactgctcagtttcactcacaggaaacttgtgacttgtgtattatcgtcattgaggatgtttcactcatgtctgtcattttataagcatatcatttaaaaagcttctaaaaagctatttcgccaggcacggtggctcatgcctataatcccagcactttgggaggccaaggtgggtggatcacctgaggtcaggagttcgagaccagcctggccaacacggtgaaaccccatctctactaaaaatgcaaaaattagccgggcgtggcggcacatgcctgtaatcccagctacatgggaggctgaggtgggagaattgcttgaacccaggaggcggaggcagaggctgcagtgacccaagattgtgccactgcactccaccctgggcaacagagcaagaccccatctcaaaaataaataaatatatataaaaaataaaaagctatttctagtttatttcactataaagttttgctttattaaaaagctaataaacagctattaatcacagtgt

SEQ ID NO: 3250 - protein, 323 aa, Homo sapiens; identical to SEQ ID NO: 237

SEQ ID NO: 3251 - DNA, 1722 bp, Homo sapiens
ggggggggcggggcctcgggactccgcccacgcctccgtctcctccgcgctccgccacagccggccgacaccacaccagccggggagccgccgccgccgccgccacctctgagcagccggctgggagcgagagccgacagctagtctgcaagccaccgctgtcgccatggggagccgcgtctcgcgggaagacttcgagtgggtctacaccgaccagccgcacgccgaccggcgccgggagatcctggcaaagtatccagagataaagtccttgatgaaacctgatcccaatttgatatggattataattatgatggttctcacccagttgggtgcattttacatagtaaaagacttggactggaaatgggtcatatttggggcctatgcgtttggcagttgcattaaccactcaatgactctggctattcatgagattgcccacaatgctgcctttggcaactgcaaagcaatgtggaatcgctggtttggaatgtttgctaatcttcctattgggattccatattcaatttcctttaagaggtatcacatggatcatcatcggtaccttggagctgatggcgtcgatgtagatattcctaccgattttgagggctggttcttctgtaccgctttcagaaagtttatatgggttattcttcagcctctcttttatgcctttcgacctctgttcatcaaccccaaaccaattacgtatctggaagttatcaataccgtggcacaggtcacttttgacattttaatttattactttttgggaattaaatccttagtctacatgttggcagcatctttacttggcctgggtttgcacccaatttctggacattttatagctgagcattacatgttcttaaagggtcatgaaacttactcatattatgggcctctgaatttacttaccttcaatgtgggttatcataatgaacatcatgatttccccaacattcctggaaaaagtcttccactggtgaggaaaatagcagctgaatactatgacaacctccctcactacaattcctggataaaagtactgtatgattttgtgatggatgatacaataagtccctactcaagaatgaagaggcaccaaaaaggagagatggtgctggagtaaatatcattagtgccaaagggattcttctccaaaactttagatgataaaatgccgggcgtggcggcacatgcctgtaatcccagctacatgggaggctgaggtgggagaattgcttgaacccaggaggcggaggcagaggctgcagtgacccaagattgtgccactgcactccaccctgggcaacagagcaagaccccatctcaaaaataaataaatatatataaaaaataaaaagctatttctagtttatttcactataaagttttgctttattaaaaagctaataaacagctattaatcacagtgtattagtatttgttacatttttgtatttcactatctttatactatataatatggtaacttgggtaccgggggaactttaaaatttcatctcaaaaataatttttaaaaagcctgaggtatgatatagcataaaagattgagatgaaaatatatttccctgtaagctgaattactcatttaaaaattttaacttctatatgggacccgaattagacactgctgaatcctgtacagccttactcataaataaagtacttactgaatttccaccattcaaa

SEQ ID NO: 3252 - protein, 323 aa, Homo sapiens; identical to SEQ ID NO: 237

SEQ ID NO: 3253 - DNA, 2101 bp, Homo sapiens
ggggggggcggggcctcgggactccgcccacgcctccgtctcctccgcgctccgccacagccggccgacaccacaccagccggggagccgccgccgccgccgccacctctgagcagccggctgggagcgagagccgacagctagtctgcaagccaccgctgtcgccatggggagccgcgtctcgcgggaagacttcgagtgggtctacaccgaccagccgcacgccgaccggcgccgggagatcctggcaaagtatccagagataaagtccttgatgaaacctgatcccaatttgatatggattataattatgatggttctcacccagttgggtgcattttacatagtaaaagacttggactggaaatgggtcatatttggggcctatgcgtttggcagttgcattaaccactcaatgactctggctattcatgagattgcccacaatgctgcctttggcaactgcaaagcaatgtggaatcgctggtttggaatgtttgctaatcttcctattgggattccatattcaatttcctttaagaggtatcacatggatcatcatcggtaccttggagctgatggcgtcgatgtagatattcctaccgattttgagggctggttcttctgtaccgctttcagaaagtttatatgggttattcttcagcctctcttttatgcctttcgacctctgttcatcaaccccaaaccaattacgtatctggaagttatcaataccgtggcacaggtcacttttgacattttaatttattactttttgggaattaaatccttagtctacatgttggcagcatctttacttggcctgggtttgcacccaatttctggacattttatagctgagcattacatgttcttaaagggtcatgaaacttactcatattatgggcctctgaatttacttaccttcaatgtgggttatcataatgaacatcatgatttccccaacattcctggaaaaagtcttccactggtgaggaaaatagcagctgaatactatgacaacctccctcactacaattcctggataaaagtactgtatgattttgtgatggatgatacaataagtccctactcaagaatgaagaggcaccaaaaaggagagatggtgctggagtaaatatcattagtgccaaagggattcttctccaaaactttagatgataaaatggaatttttgcattattaaacttgagaccagtgatgctcagaagctcccctggcacaatttcagagtaagagctcggtgataccaagaagtgaatctggcttttaaacagtcagcctgactctgtactgctcagtttcactcacaggaaacttgtgacttgtgtattatcgtcattgaggatgtttcactcatgtctgtcattttataagcatatcatttaaaaagcttctaaaaagctatttcgccaggcacggtggctcatgcctataatcccagcactttgggaggccaaggtgggtggatcacctgaggtcaggagttcgagaccagcctggccaacacggtgaaaccccatctctactaaaaatgcaaaaattagccgggcgtggcggcacatgcctgtaatcccagctacatgggaggctgaggtgggagaattgcttgaacccaggaggcggaggcagaggctgcagtgacccaagattgtgccactgcactccaccctgggcaacagagcaagaccccatctcaaaaataaataaatatatataaaaaataaaaagctatttctagtttatttcactataaagttttgctttattaaaaagctaataaacagctattaatcacagtgtattagtatttgttacatttttgtatttcactatctttatactatataatatggtaacttgggtaccgggggaactttaaaatttcatctcaaaaataatttttaaaaagcctgaggtatgatatagcataaaagattgagatgaaaatatatttccctgtaagctgaattactcatttaaaaattttaacttctatatgggacccgaattagacactgctgaatcctgtacagccttactcataaataaagtacttactgaatttccaccattcaaa

SEQ ID NO: 3254 - protein, 323 aa, Homo sapiens; identical to SEQ ID NO: 237

SEQ ID NO: 3255 - DNA, 985 bp, Homo sapiens
ccgccgccacctctgagcagccggctgggagcgagagccgacagctagtctgcaagccaccgctgtcgccatggggagccgcgtctcgcgggaagacttcgagtgggtctacaccgaccagccgcacgccgaccggcgccgggagatcctgggtgaggaaaatagcagctgaatactatgacaacctccctcactacaattcctggataaaagtactgtatgattttgtgatggatgatacaataagtccctactcaagaatgaagaggcaccaaaaaggagagatggtgctggagtaaatatcattagtgccaaagggattcttctccaaaactttagatgataaaatggaatttttgcattattaaacttgagaccagtgatgctcagaagctcccctggcacaatttcagagtaagagctcggtgataccaagaagtgaatctggcttttaaacagtcagcctgactctgtactgctcagtttcactcacaggaaacttgtgacttgtgtattatcgtcattgaggatgtttcactcatgtctgtcattttataagcatatcatttaaaaagcttctaaaaagctatttcgccaggcacggtggctcatgcctataatcccagcactttgggaggccaaggtgggtggatcacctgaggtcaggagttcgagaccagcctggccaacacggtgaaaccccatctctactaaaaatgcaaaaattagccgggcgtggcggcacatgcctgtaatcccagctacatgggaggctgaggtgggagaattgcttgaacccaggaggcggaggcagaggctgcagtgacccaagattgtgccactgcactccaccctgggcaacagagcaagaccccatctcaaaaataaataaatatatataaaaaataaaaagctatttctagtttatttcactataaagttttgctttattaaaaagctaataaacagctattaatcacagtgt

SEQ ID NO: 3256 - protein, 33 aa, Homo sapiens
MGSRVSREDFEWVYTDQPHADRRREILGEENSS

SEQ ID NO: 3257 - DNA, 1262 bp, Homo sapiens
ccgccgccacctctgagcagccggctgggagcgagagccgacagctagtctgcaagccaccgctgtcgccatggggagccgcgtctcgcgggaagacttcgagtgggtctacaccgaccagccgcacgccgaccggcgccgggagatcctgggtgaggaaaatagcagctgaatactatgacaacctccctcactacaattcctggataaaagtactgtatgattttgtgatggatgatacaataagtccctactcaagaatgaagaggcaccaaaaaggagagatggtgctggagtaaatatcattagtgccaaagggattcttctccaaaactttagatgataaaatggaatttttgcattattaaacttgagaccagtgatgctcagaagctcccctggcacaatttcagagtaagagctcggtgataccaagaagtgaatctggcttttaaacagtcagcctgactctgtactgctcagtttcactcacaggaaacttgtgacttgtgtattatcgtcattgaggatgtttcactcatgtctgtcattttataagcatatcatttaaaaagcttctaaaaagctatttcgccaggcacggtggctcatgcctataatcccagcactttgggaggccaaggtgggtggatcacctgaggtcaggagttcgagaccagcctggccaacacggtgaaaccccatctctactaaaaatgcaaaaattagccgggcgtggcggcacatgcctgtaatcccagctacatgggaggctgaggtgggagaattgcttgaacccaggaggcggaggcagaggctgcagtgacccaagattgtgccactgcactccaccctgggcaacagagcaagaccccatctcaaaaataaataaatatatataaaaaataaaaagctatttctagtttatttcactataaagttttgctttattaaaaagctaataaacagctattaatcacagtgtattagtatttgttacatttttgtatttcactatctttatactatataatatggtaacttgggtaccgggggaactttaaaatttcatctcaaaaataatttttaaaaagcctgaggtatgatatagcataaaagattgagatgaaaatatatttccctgtaagctgaattactcatttaaaaattttaacttctatatgggacccgaattagacactgctgaatcctgtacagccttactcataaataaagtacttactgaatttccaccattcaaa

SEQ ID NO: 3258 - protein, 33 aa, Homo sapiens; identical to SEQ ID NO: 3256

SEQ ID NO: 3259 - DNA, 534 bp, Homo sapiens
cctagtgcaagcctgccaaaagcatctgtagaatgaataaatgaatacataaatgcattttttgcatggatttaaacattaatgtttcatatttgaattttagattcaagagttggaaaaaaacagagacctagccaaaatgctggcatacaggaaatggttaatgaggcagtagagtatgtatgtagtaataggaacatgtgtttttcattctcattactgtttcaggacgaggctcataatgtaagccaaatggaatatggttaaggcttttgggtctggagtccacagagtctgcatttcaggttcagtttctgcagtttactaagtgtgaccttcggccagttacttaatctctctaagccttttctgtcatctacaaaatgaagatattaatagtactgcttatagcatataaatgttgagacttaaatacaataaattgtggttcatacctgtaatcccagcactttgggaggccgaggtgggaggattgcttgaccctgggaggcggaggttgcagtgagctgagat

SEQ ID NO: 3260 - protein, 35 aa, Homo sapiens
MLRLKYNKLWFIPVIPALWEAEVGGLLDPGRRRLQ

SEQ ID NO: 3261 - DNA, 437 bp, Homo sapiens
ttcgggagctgcagaacttcagtgtccatcagtcagaggcaatgcccctgacccagacgcctctagttgagagatagacagagctggatttatagcaccacagacctgacctggaatgagacttgcaagtatgtcagggagctgcacgctaacctaggaagaggctggccagatggaatcttgctctgttgcccaggctagaatgcagtggcgtgatcttggctcaccaaaaattctgcctcctgggttcaagtgcctccacacccagctaattttgtatttttagtagagacgagatttcaccatgttggccaggctagtcttgaactcctgacattgtgatccacccacctcagcctcccaaagtgctaagattacaggtgtgagccaccatgcccggcctacctggagcattattaaaaccttaaacctttaaa

SEQ ID NO: 3262 - protein, 37 aa, Homo sapiens
MESCSVAQARMQWRDLGSPKILPPGFKCLHTQLILYF

SEQ ID NO: 3263 - DNA, 787 bp, Homo sapiens
gttttctgagactgcatccactttgatagtttctactgagtccaaattagaacatcccagctggtgggctgtctcccaggaagccctcggagaggagcggtgcatagggggcacctggacacagcccacctcccccgagtagcgtcaggtaggcttgtctatctacatcctttcgccctttctcaggaaactatcagatgatgtgctcccccagatgaagaagtagtgccaggaaaaaggagacacgggatacagggatcctgaagccggcggaggacaagggagctcctgggaggacagctgtgctccggcctagcaatagcgagcagctggtccagactgccgccgtgactcagaagatagacatgcggagggttatgatcacagagcaacgatggtccttgtacatgaagataaaaatgctcaggtgtgcccaggttgaagaagatgaaaggccctgcctcccagagcgcccggggacactggtgatctcttccaggtctgtttccacccactgcagctgtgatggaatcttgctctgttgcccaggctagaatgcagtggcgtgatcttggctcaccaaaaattctgcctcctgggttcaagtgcctccacacccagctaattttgtatttttagtagagacgagatttcaccatgttggccaggctagtcttgaactcctgacattgtgatccacccacctcagcctcccaaagtgctaagattacaggtgtgagccaccatgcccggcctacctggagcattattaaaaccttaaaccttt

SEQ ID NO: 3264 - protein, 62 aa, Homo sapiens
MRRVMITEQRWSLYMKIKMLRCAQVEEDERPCLPERPGTLVISSRSVSTHCSCDGILLCCPG

SEQ ID NO: 3265 - DNA, 1322 bp, Homo sapiens
gaacaaaggggatggatttcagaaacgtttctaaatcataaatgactgaaccagaagaactgaagctgatgtcagatttctcgcttgggtgatgaggaacaaggcaggaagagcagcaatgaggatagaggtggaagggcagctcaggaatttccctggagttttcccatcttgagacttcggtcttggaagacagaatggctgtgacataatgtggactttttacttccacctctaggaaagcgttctttggaacacctttgctgagtctctctctcctccgctcaagggattccgctgacacattgcattcttgggagaaccttccaattccaattatggactagctgctcctaccctgtgctcttcgcttggtgactattcttatcccttttcagcccttctcacactgttttgtgactgtctctttatctgtattaagttggatatgaatttggctcctttcacacagaccaaaatataaatagcttaagcaatataaagatcacacacacaagtgaggcaaatgaccatctgagggttgaggaaactctgctgcaagggttgcccacgatcctggtttcttgtgttttattactttgtcattccctaggatgttgtctccatttacaaggccaaaacaggttcatcatcagctcatcactctctagtcccgggaagggcagcatggagttaaaatgacagaggaagaaggcattttcacacaaggctggccagatgggaagaatcttcagcttcagcttcagcttggcctcattcatttgaaaataaaatgtttacatgaggccgcgcctgtgtccagctgaaagtgggtccttcagagcgtgtgggggattctctgccggcttgatgggctagctcctctaagccggctgctggagacatcaccggctgagggactcctgcaaacgttcatacatgatttgatcctgaaaggagggagaacacagaatacagagaccgtcactgcttgttttgggctgaatggtgccccccaaaattcacatgctgcagtccgcacccgcaggacctcagaatgtgattgtaactggagagagggtctttatagaggagactggattaaaatgaggtcatacaggtagactcttatccaatatgactgctctccttacaaaaagaggggattagggcacaggagggaagagcatgtgcgcagagggaaaagcacatgcaggcgctgggagaagacagccatcagtgaggacaaaggctccagaagaaccaatcctgcccaacactctccagaactgtgagaaaataaattttccactttttaagcc

SEQ ID NO: 3266 - protein, 42 aa, Homo sapiens
MTEEEGIFTQGWPDGKNLQLQLQLGLIHLKIKCLHEAAPVSS

SEQ ID NO: 3267 - DNA, 639 bp, Homo sapiens
tgagccatcgcacccggcatggtctttaaagctccaatgaaaaatcatttttctctcttacttagaatggtaccaaaccaccactggatgcagatgtaaatttggaagcaattgctggtgaccttcgctgtgattgctatacgggcgcagatctctctgctttggtacgagaagcttctatctgtgccctgagacaggaaatggcaagacagaagagtggaaatgaaaaaggtgaactcaaggttagtcataagcattttgaagaagctttcaagaaagtaagatcatctatatcaaaaaaggatcaaatcatgtatgaacgtttgcaggagtccctcagccggtgatgtctccagcagccggcttagaggagctagcccatcaagccggcagagaatcccccacacgctctgaaggacccactttcagctggacacaggcgcggcctcatgtaaacattttattttcaaatgaatgaggccaagctgaagctgaagctgaagattcttcccatctggccagccttgtgtgaaaatgccttcttcctctttaagaaaaaggacaatttttaaactgctgaaataaaatgactgttacatttttcaaataaaacttttactttgaactattttgactata

SEQ ID NO: 3268 - protein, 48 aa, Homo sapiens
MARQKSGNEKGELKVSHKHFEEAFKKVRSSISKKDQIMYERLQESLSR

SEQ ID NO: 3269 - DNA, 2511 bp, Homo sapiens
gcccagacctgcagggttcgtggataataaactcaagcagcgagtcatccagtatagactatggtcgaagaaaaagaaatgcttttaggattcaggtagaaaaagtatttagcataattagtagtgagaaggaacttaagaatttaacagaattagaagatgaacatttggcaaaaagggcaagacaaggtgaagaggataatgagtatactgaaagctattctgatgatgattcaagtatggaagactacccagatccacaggattcaaaagattcttctcttttggagagtgatatgaaacggaaaggcaagctaaagaataaaggaagcaaaaggaagaaagaagatcttcaggaagtagatggagaaattgaagctgtcctgcaaaagaaagctaaagccagggggttagaattccagatctccaacgtgaagtttgaagatgtgggaggcaatgatatgacattaaaagaggtctgcaagatgctcatacacatgcgtcacccggaggtgtaccaccacctgggcgtcgtgccccctcgtggagttctccttcatggaccaccaggctgtgggaagacattacttgcacatgcaattgctggggaacttgacctgccaattttgaaagtggctgctccagagattgtgtctggagtatccggagagtctgagcagaagctgagagaactatttgagcaagctgtgtcaaatgcaccatgtatcattttcattgatgaaattgatgctattacccccaaaagagaagtggcttcaaaagatatggaacgaagaattgtagcccaactcctaacctgcatggatgatctgaataatgtggctgctacagcccgggtcctagttattggagctactaatcgaccagactcgttagaccctgctttgagacgtgcgggaaggttcgaccgagaaatatgcctaggtatcccagatgaagcatccagggaaagaatacttcaaacattgtgcagaaaactgaggcttcctcaagcttttgatttctgtcacttagcacacctaactccaggctttgttggtgctgatctcatggcactgtgccgagaggcagcaatgtgtgcagtcaatagagtcttaatgaagctacaggaacagcagaagaaaaatcctgaaatggaagatttgccatctaaaggagtccaggaggaaaggctgggaactgagcccacttctgaaacacaggatgaattacaaaggctgctggggttgctaagagaccaagatcccctctcagaggagcagatgcaaggactgtgcattgaactgaatgatttcattgttgctctatcctcagtccaaccctctgccaaaagggaaggctttgtcactgtccctaatgtgacatgggcagatattggtgccctggaagacattagagaggagctcaccatggcaatattggcaccagtacgcaacccagaccagttcaaagctcttggattggtgactccagctggggtcctccttgctggtcctcctggctgtgggaagactctgctggcgaaggctgttgcaaatgagtccggactaaattttatatctgtcaagggccccgaattactaaacatgtatgttggtgagagtgaacgtgctgtgcgacaagtttttcaacgagccaagaactcagcaccctgtgtgatattctttgatgaagtggatgctttatgtcctcgaagatcagaccgagagacaggggcaagtgtccgagtggtgaatcagctacttacagagatggatggtctggaagcacgccagcaggtttttattatggcagccactaacaggccagatataattgaccctgcaatcctgcgcccgggccgcctggacaaaacactgtttgtgggtttaccgccccctgcagatcgccttgccatcttaaaaactatcacaaaaaatggtaccaaaccaccactggatgcagatgtaaatttggaagcaattgctggtgaccttcgctgtgattgctatacgggcgcagatctctctgctttggtacgagaagcttctatctgtgccctgagacaggaaatggcaagacagaagagtggaaatgaaaaaggtgaactcaaggttagtcataagcattttgaagaagctttcaagaaagtaagatcatctatatcaaaaaaggatcaaatcatgtatgaacgtttgcaggagtccctcagccggtgatgtctccagcagccggcttagaggagctagcccatcaagccggcagagaatcccccacacgctctgaaggacccactttcagctggacacaggcgcggcctcatgtaaacattttattttcaaatgaatgaggccaagctgaagctgaagctgaagattcttcccatctggccagccttgtgtgaaaatgccttcttcctctttaagaaaaaggacaatttttaaactgctgaaataaaatgactgttacatttttcaaataaaacttttactttgaactattttgactata

SEQ ID NO: 3270 - protein, 659 aa, Homo sapiens
MEDYPDPQDSKDSSLLESDMKRKGKLKNKGSKRKKEDLQEVDGEIEAVLQKKAKARGLEFQISNVKFEDVGGNDMTLKEVCKMLIHMRHPEVYHHLGVVPPRGVLLHGPPGCGKTLLAHAIAGELDLPILKVAAPEIVSGVSGESEQKLRELFEQAVSNAPCIIFIDEIDAITPKREVASKDMERRIVAQLLTCMDDLNNVAATARVLVIGATNRPDSLDPALRRAGRFDREICLGIPDEASRERILQTLCRKLRLPQAFDFCHLAHLTPGFVGADLMALCREAAMCAVNRVLMKLQEQQKKNPEMEDLPSKGVQEERLGTEPTSETQDELQRLLGLLRDQDPLSEEQMQGLCIELNDFIVALSSVQPSAKREGFVTVPNVTWADIGALEDIREELTMAILAPVRNPDQFKALGLVTPAGVLLAGPPGCGKTLLAKAVANESGLNFISVKGPELLNMYVGESERAVRQVFQRAKNSAPCVIFFDEVDALCPRRSDRETGASVRVVNQLLTEMDGLEARQQVFIMAATNRPDIIDPAILRPGRLDKTLFVGLPPPADRLAILKTITKNGTKPPLDADVNLEAIAGDLRCDCYTGADLSALVREASICALRQEMARQKSGNEKGELKVSHKHFEEAFKKVRSSISKKDQIMYERLQESLSR

SEQ ID NO: 3271 - DNA, 2832 bp, Homo sapiens
ctaggagctggcggtccgagctgtggcttggaagaccgacgcgatgaagcccagacctgcagggttcgtggataataaactcaagcagcgagtcatccagtatagactatggtcgaagaaaaagaaatgcttttaggattcaggtagaaaaagtatttagcataattagtagtgagaaggaacttaagaatttaacagaattagaagatgaacatttggcaaaaagggcaagacaaggtgaagaggataatgagtatactgaaagctattctgatgatgattcaagtatggaagactacccagatccacagtcagcaaatcacatgaacagttccctgctgtctttatatcggaaaggaaatcctgattctgtttcaaatactcctgagatggagcaaagagaaaccacctcttcaacaccacggataagttccaaaacaggctccattcccttgaagacccctgccaaagattctgaaggaggatggtttattgacaaaaccccaagtgtaaagaaagacagttttttcttggacctgtcatgtgagaaaagtaatcctaagaagccaataactgagatacaggattcaaaagattcttctcttttggagagtgatatgaaacggaaaggcaagctaaagaataaaggaagcaaaaggaagaaagaagatcttcaggaagtagatggagaaattgaagctgtcctgcaaaagaaagctaaagccagggggttagaattccagatctccaacgtgaagtttgaagatgtgggaggcaatgatatgacattaaaagaggtctgcaagatgctcatacacatgcgtcacccggaggtgtaccaccacctgggcgtcgtgccccctcgtggagttctccttcatggaccaccaggctgtgggaagacattacttgcacatgcaattgctggggaacttgacctgccaattttgaaagtggctgctccagagattgtgtctggagtatccggagagtctgagcagaagctgagagaactatttgagcaagctgtgtcaaatgcaccatgtatcattttcattgatgaaattgatgctattacccccaaaagagaagtggcttcaaaagatatggaacgaagaattgtagcccaactcctaacctgcatggatgatctgaataatgtggctgctacagcccgggtcctagttattggagctactaatcgaccagactcgttagaccctgctttgagacgtgcgggaaggttcgaccgagaaatatgcctaggtatcccagatgaagcatccagggaaagaatacttcaaacattgtgcagaaaactgaggcttcctcaagcttttgatttctgtcacttagcacacctaactccaggctttgttggtgctgatctcatggcactgtgccgagaggcagcaatgtgtgcagtcaatagagtcttaatgaagctacaggaacagcagaagaaaaatcctgaaatggaagatttgccatctaaaggagtccaggaggaaaggctgggaactgagcccacttctgaaacacaggatgaattacaaaggctgctggggttgctaagagaccaagatcccctctcagaggagcagatgcaaggactgtgcattgaactgaatgatttcattgttgctctatcctcagtccaaccctctgccaaaagggaaggctttgtcactgtccctaatgtgacatgggcagatattggtgccctggaagacattagagaggagctcaccatggcaatattggcaccagtacgcaacccagaccagttcaaagctcttggattggtgactccagctggggtcctccttgctggtcctcctggctgtgggaagactctgctggcgaaggctgttgcaaatgagtccggactaaattttatatctgtcaagggccccgaattactaaacatgtatgttggtgagagtgaacgtgctgtgcgacaagtttttcaacgagccaagaactcagcaccctgtgtgatattctttgatgaagtggatgctttatgtcctcgaagatcagaccgagagacaggggcaagtgtccgagtggtgaatcagctacttacagagatggatggtctggaagcacgccagcaggtttttattatggcagccactaacaggccagatataattgaccctgcaatcctgcgcccgggccgcctggacaaaacactgtttgtgggtttaccgccccctgcagatcgccttgccatcttaaaaactatcacaaaaaatggtaccaaaccaccactggatgcagatgtaaatttggaagcaattgctggtgaccttcgctgtgattgctatacgggcgcagatctctctgctttggtacgagaagcttctatctgtgccctgagacaggaaatggcaagacagaagagtggaaatgaaaaaggtgaactcaaggttagtcataagcattttgaagaagctttcaagaaagtaagatcatctatatcaaaaaaggatcaaatcatgtatgaacgtttgcaggagtccctcagccggtgatgtctccagcagccggcttagaggagctagcccatcaagccggcagagaatcccccacacgctctgaaggacccactttcagctggacacaggcgcggcctcatgtaaacattttattttcaaatgaatgaggccaagctgaagctgaagctgaagattcttcccatctggccagccttgtgtgaaaatgccttcttcctctttaagaaaaaggacaatttttaaactgctgaaataaaatgactgttacatttttcaaataaaacttttactttgaactattttgactata

SEQ ID NO: 3272 - protein, 750 aa, Homo sapiens; identical to SEQ ID NO: 243

SEQ ID NO: 3273 - DNA, 2918 bp, Homo sapiens
gcccccggttgactaggagctggcggtccgagctgtggcttggaagaccgacgcgatgaagcccagacctgcagggttcgtggataataaactcaagcagcgagtcatccagtaccttaccagtaacaaatgtggcaaatatgtggacattggagtcttagcgtctgatttacaaagagtgtacagtatagactatggtcgaagaaaaagaaatgcttttaggattcaggtagaaaaagtatttagcataattagtagtgagaaggaacttaagaatttaacagaattagaagatgaacatttggcaaaaagggcaagacaaggtgaagaggataatgagtatactgaaagctattctgatgatgattcaagtatggaagactacccagatccacagtcagcaaatcacatgaacagttccctgctgtctttatatcggaaaggaaatcctgattctgtttcaaatactcctgagatggagcaaagagaaaccacctcttcaacaccacggataagttccaaaacaggctccattcccttgaagacccctgccaaagattctgaaggaggatggtttattgacaaaaccccaagtgtaaagaaagacagttttttcttggacctgtcatgtgagaaaagtaatcctaagaagccaataactgagatacaggattcaaaagattcttctcttttggagagtgatatgaaacggaaaggcaagctaaagaataaaggaagcaaaaggaagaaagaagatcttcaggaagtagatggagaaattgaagctgtcctgcaaaagaaagctaaagccagggggttagaattccagatctccaacgtgaagtttgaagatgtgggaggcaatgatatgacattaaaagaggtctgcaagatgctcatacacatgcgtcacccggaggtgtaccaccacctgggcgtcgtgccccctcgtggagttctccttcatggaccaccaggctgtgggaagacattacttgcacatgcaattgctggggaacttgacctgccaattttgaaagtggctgctccagagattgtgtctggagtatccggagagtctgagcagaagctgagagaactatttgagcaagctgtgtcaaatgcaccatgtatcattttcattgatgaaattgatgctattacccccaaaagagaagtggcttcaaaagatatggaacgaagaattgtagcccaactcctaacctgcatggatgatctgaataatgtggctgctacagcccgggtcctagttattggagctactaatcgaccagactcgttagaccctgctttgagacgtgcgggaaggttcgaccgagaaatatgcctaggtatcccagatgaagcatccagggaaagaatacttcaaacattgtgcagaaaactgaggcttcctcaagcttttgatttctgtcacttagcacacctaactccaggctttgttggtgctgatctcatggcactgtgccgagaggcagcaatgtgtgcagtcaatagagtcttaatgaagctacaggaacagcagaagaaaaatcctgaaatggaagatttgccatctaaaggagtccaggaggaaaggctgggaactgagcccacttctgaaacacaggatgaattacaaaggctgctggggttgctaagagaccaagatcccctctcagaggagcagatgcaaggactgtgcattgaactgaatgatttcattgttgctctatcctcagtccaaccctctgccaaaagggaaggctttgtcactgtccctaatgtgacatgggcagatattggtgccctggaagacattagagaggagctcaccatggcaatattggcaccagtacgcaacccagaccagttcaaagctcttggattggtgactccagctggggtcctccttgctggtcctcctggctgtgggaagactctgctggcgaaggctgttgcaaatgagtccggactaaattttatatctgtcaagggccccgaattactaaacatgtatgttggtgagagtgaacgtgctgtgcgacaagtttttcaacgagccaagaactcagcaccctgtgtgatattctttgatgaagtggatgctttatgtcctcgaagatcagaccgagagacaggggcaagtgtccgagtggtgaatcagctacttacagagatggatggtctggaagcacgccagcaggtttttattatggcagccactaacaggccagatataattgaccctgcaatcctgcgcccgggccgcctggacaaaacactgtttgtgggtttaccgccccctgcagatcgccttgccatcttaaaaactatcacaaaaaatggtaccaaaccaccactggatgcagatgtaaatttggaagcaattgctggtgaccttcgctgtgattgctatacgggcgcagatctctctgctttggtacgagaagcttctatctgtgccctgagacaggaaatggcaagacagaagagtggaaatgaaaaaggtgaactcaaggttagtcataagcattttgaagaagctttcaagaaagtaagatcatctatatcaaaaaaggatcaaatcatgtatgaacgtttgcaggagtccctcagccggtgatgtctccagcagccggcttagaggagctagcccatcaagccggcagagaatcccccacacgctctgaaggacccactttcagctggacacaggcgcggcctcatgtaaacattttattttcaaatgaatgaggccaagctgaagctgaagctgaagattcttcccatctggccagccttgtgtgaaaatgccttcttcctctttaagaaaaaggacaatttttaaactgctgaaataaaatgactgttacatttttcaaataaaacttttactttgaactattttgactata

SEQ ID NO: 3274 - protein, 856 aa, Homo sapiens; identical to SEQ ID NO: 241

SEQ ID NO: 3275 - DNA, 564 bp, Homo sapiens
gggcgcagatctctctgctttggtacgagaagcttctatctgtgccctgagacaggaaatggcaagacagaagagtggaaatgaaaaaggcaaatggatccattcgctgtcttcatcatgagtctgggctgcttatcaattctggaaaaacgtattcttttgctaaggtgaactcaaggttagtcataagcattttgaagaagctttcaagaaagtaagatcatctatatcaaaaaaggatcaaatcatgtatgaacgtttgcaggagtccctcagccggtgatgtctccagcagccggcttagaggagctagcccatcaagccggcagagaatcccccacacgctctgaaggacccactttcagctggacacaggcgcggcctcatgtaaacattttattttcaaatgaatgaggccaagctgaagctgaagctgaagattcttcccatctggccagccttgtgtgaaaatgccttcttcctctttaagaaaaaggacaatttttaaactgctgaaataaaatgactgttacatttttcaaataaaacttttactttgaacta

SEQ ID NO: 3276 - protein, 45 aa, Homo sapiens
MKKANGSIRCLHHESGLLINSGKTYSFAKVNSRLVISILKKLSRK

SEQ ID NO: 3277 - DNA, 583 bp, Homo sapiens
taggggcgcagatctctctgctttggtacgagaagcttctatctgtgccctgagacaggaaatggcaagacagaagagtggaaatgaaaaagtagagacggggtttcaccatgttagccaggatggtctcgatctcctgacttcgtgatccgcctgcctcggcctcccaaagtgctgggattacaggtgaactcaaggttagtcataagcattttgaagaagctttcaagaaagtaagatcatctatatcaaaaaaggatcaaatcatgtatgaacgtttgcaggagtccctcagccggtgatgtctccagcagccggcttagaggagctagcccatcaagccggcagagaatcccccacacgctctgaaggacccactttcagctggacacaggcgcggcctcatgtaaacattttattttcaaatgaatgaggccaagctgaagctgaagctgaagattcttcccatctggccagccttgtgtgaaaatgccttcttcctctttaagaaaaaggacaatttttaaactgctgaaataaaatgactgttacatttttcaaataaaacttttactttgaacta

SEQ ID NO: 3278 - protein, 43 aa, Homo sapiens [sequence omitted]

SEQ ID NO: 3279 - DNA, 425 bp, Homo sapiens
cacactgagtcacagtccttagagatttcagtacggagtaccagaaacagttgttattaggagtgctattgtataacaatttgaagcttagtgaagcataacataaacaataaatatataacctttttgaagcagatagcaactgctatttttatttatttttatttttatttttttcgagacggagttttgctcttgtctcccaggctggagtgcaatggtgcatctcggctcactgcaacttccgcctcctgggttcaagcgattctcctccctcagcctcttgggaggcagaggcaggagaattgcttgaacctgggagatggaggttgcagtgagccaagatcacaccattgtactccattctgggcaacaagagtgaaacttcatctcaaaaaacaaaacaaacaaacaaacaaaaaagc

SEQ ID NO: 3280 - protein, 31 aa, Homo sapiens
MVHLGSLQLPPPGFKRFSSLSLLGGRGRRIA

SEQ ID NO: 3281 - DNA, 725 bp, Homo sapiens
gactaggagctggcggtccgagctgtggcttggaagaccgacgcgatgaagcccagacctgcagggttcgtggataataaactcaagcagcgagtcatccagtaccttaccagtaacaaatgtggcaaatatgtggacattggagtcttagcgtctgatttacaaagagtgtacagtatagactatggtcgaagaaaaagaaatgcttttaggattcaggtagaaaaagtatttagcataattagtagtgagaaggaacttaagaatttaacagaattagaagatgaacatttggcaaaaagggcaagacaaggtgaagaggataatgagtatactgaaagctattctgatgatgattcaagtatggaagactacccagatccacagtcagcaaatcacatgaacagttccctgctgtctttatatcggaaaggaaatcctgattctgtttcaaatactcctgagatggagcaaagagaaaccacctcttcaacaccacggataagttccaaaacaggctccattcccttgaagacccctgccaaagattctgaaggaggatggtttattgacaaaaccccaagtgtaaagaaagacagttttttcttggacctgtcatgtgagaaaagtaatcctaagaagccaataactgagatacaggattcaaaagattcttctcttttggagagtgatatgaaacggaaaggcaagctaaagaataaagg

SEQ ID NO: 3282 - protein, 225 aa, Homo sapiens
MKPRPAGFVDNKLKQRVIQYLTSNKCGKYVDIGVLASDLQRVYSIDYGRRKRNAFRIQVEKVFSIISSEKELKNLTELEDEHLAKRARQGEEDNEYTESYSDDDSSMEDYPDPQSANHMNSSLLSLYRKGNPDSVSNTPEMEQRETTSSTPRISSKTGSIPLKTPAKDSEGGWFIDKTPSVKKDSFFLDLSCEKSNPKKPITEIQDSKDSSLLESDMKRKGKLKN

SEQ ID NO: 3283 - DNA, 664 bp, Homo sapiens
gcaagggcctatcaggggtgggtcggggcatccgagcgggtttgacggaaggagcggcggcgacggaggaggaggatggaggcggtggtgttcgtcttctctctcctcgattgttgcgcgctcatcttcctctcggtctacttcataattacattgtctgatttagaatgtgattacattaatgctagatcatgttgctcaaaattaaacaagtgggtaattccagaattgattggccataccattgtcactgtattactgctcatgtcattgcactggttcatcttccttctcaacttacctgttgccacttggaatatatatcgatacattatggtgccgagtggtaacatgggagtgtttgatccaacagaaatacacaatcgagggcagctgaagtcacacatgaaagaagccatgatcaagcttggtttccacttgctctgcttcttcatgtatctttatagtatgatcttagctttgataaatgactgaagctggagaagccgtggttgaagtcagcctacactacagtgcacagttgaggagccagagacttcttaaatcatccttagaaccgtgaccatagcagtatatattttcctcttggaacaaaaaactatttttgctgtatttttaccatataaagtatttaaaaaacatg

SEQ ID NO: 3284 - protein, 139 aa, Homo sapiens; identical to SEQ ID NO: 245

SEQ ID NO: 3285 - DNA, 701 bp, Homo sapiens
ctatcaggggtgggtcggggcatccgagcgggtttgacggaaggagcggcggcgacggaggaggaggatggaggcggtggtgttcgtcttctctctcctcgattgttgcgcgctcatcttcctctcggtctacttcataattacattgtctgatttagaatgtgattacattaatgctagatcatgttgctcaaaattaaacaagtgggtaattccagaattgattggccataccattgtcactgtattactgctcatgtcattgcactggttcatcttccttctcaacttacctgttgccacttggaatatatatcgtggtagcaactgcccttgctaatcaccgtaacctcggctgagaaagaagaggaagcgaaatccaagatgcagctcagttcatcaaagcctagcaggtcccctcagctgccttttcatgcctgccacagactacagtaggacaaaacctgacctggtctttgaagttaagagctaagaaagcttcctatagtagtatctcccatggcacttaccacattctatctggtattacagttatttgtatgcaattaatcactcttagattgtatgttcctggagggcagaatatgcccattcatatttgtatcttcttccttctgctcttggcacctaacacagtgccttgcacacaaacaataaatgattgttgagtgaataagtaa

SEQ ID NO: 3286 - protein, 90 aa, Homo sapiens
MEAVVFVFSLLDCCALIFLSVYFIITLSDLECDYINARSCCSKLNKWVIPELIGHTIVTVLLLMSLHWFIFLLNLPVATWNIYRGSNCPC

SEQ ID NO: 3287 - DNA, 502 bp, Homo sapiens
gtcggggcatccgagcgggtttgacggaaggagcggcggcgacggaggaggaggatggaggcggtggtgttcgtcttctctctcctcgattgttgcgcgctcatcttcctctcggtctacttcataattacattgtctgatttagaatgtgattacattaatgctagatcatgttgctcaaaattaaacaagtgggtaattccagaattgattggccataccattgtcactgtattactgctcatgtcattgcactggttcatcttccttctcaacttacctgttgccacttggaatatatatcgtatgatcttagctttgataaatgactgaagctggagaagccgtggttgaagtcagcctacactacagtgcacagttgaggagccagagacttcttaaatcatccttagaaccgtgaccatagcagtatatattttcctcttggaacaaaaaactatttttgctgtatttttaccatataaagtatttaaaaaacatg

SEQ ID NO: 3288 - protein, 92 aa, Homo sapiens
MEAVVFVFSLLDCCALIFLSVYFIITLSDLECDYINARSCCSKLNKWVIPELIGHTIVTVLLLMSLHWFIFLLNLPVATWNIYRMILALIND

SEQ ID NO: 3289 - DNA, 1525 bp, Homo sapiens
ccgagcgggtttgacggaaggagcggcggcgacggaggaggaggatggaggcggtggtgttcgtcttctctctcctcgattgttgcgcgctcatcttcctctcggtctacttcataattacattgtctgatttagaatgtgattacattaatgctagatcatgttgctcaaaattaaacaagtgggtaattccagaattgattggccataccattgtcactgtattactgctcatgtcattgcactggttcatcttccttctcaacttacctgttgccacttggaatatatatcgatacattatggtgccgagtggtaacatgggagtgtttgatccaacagaaatacacaatcgagggcagctgaagtcacacatgaaagaagccatgatcaagcttggtttccacttgctctgcttcttcatgtatctttatagtatgatcttagctttgataaatgactgaagctggagaagccgtggttgaagtcagcctacactacagtgcacagttgaggagccagagacttcttaaatcatccttagaaccgtgaccatagcagtatatattttcctcttggaacaaaaaactatttttgctgtatttttaccatataaagtatttaaaaaacatgaattgagtttctgtagatttctagttctcaactttagcctgaacgccaacacttgaaggtgtttttcatcctctgtatgttgaaggtggttatttgtatgtaggaacaggactgccatcccagctttgcatgccaaagaaataaagaacacactttaaagggcaaactgaagagatgagcgagcaaaggtgcccttcaggtctactgaaaagttagagtacaaaacaacactgttgatctggacaaaagaagaaaaattaccctttttgcttgtgttgtgacaacttcatttaatatggtttaaagatttatgagactgtcagctaaaagtcttttcacaagaatgtcaacagagaatggcatctcaaaatatatatatttctttgcacaatttgtgaaaccttataagccattttccccaggtacaatgtagttcctgctgatagaaaggaaatattttgtcaagagctttcatttaaaagctactacctccacaatcacccccaaacccagaaaatccccactggctcttgccagtctggttttcgtattgcagttattccaattgtatttgatctccctgataacgtattttcatgggtttgggtagaagatgctaatcagattagaagcaggaatagttatttgctgtctgtgaaattgagccttttggtgcgccacgtggtgccagatcaacacttctatccctctgcactgaccacgttgtgaactgggagaccaaatgcaagccatttcatggacatagcaatatacaaccaaactctgttccttggagttatattgtaaactcttgcaggtgggagagcagttcacctccttagctctgtttgccagctcttacagggtaaaataaacctggcaatttatcctc

SEQ ID NO: 3290 - protein, 139 aa, Homo sapiens; identical to SEQ ID NO: 245

SEQ ID NO: 3291 - DNA, 2124 bp, Homo sapiens
ccgagcgggtttgacggaaggagcggcggcgacggaggaggaggatggaggcggtggtgttcgtcttctctctcctcgattgttgcgcgctcatcttcctctcggtctacttcataattacattgtctgatttagaatgtgattacattaatgctagatcatgttgctcaaaattaaacaagtgggtaattccagaattgattggccataccattgtcactgtattactgctcatgtcattgcactggttcatcttccttctcaacttacctgttgccacttggaatatatatcgatacattatggtgccgagtggtaacatgggagtgtttgatccaacagaaatacacaatcgagggcagctgaagtcacacatgaaagaagccatgatcaagcttggtttccacttgctctgcttcttcatgtatctttatagtatgatcttagctttgataaatgactgaagctggagaagccgtggttgaagtcagcctacactacagtgcacagttgaggagccagagacttcttaaatcatccttagaaccgtgaccatagcagtatatattttcctcttggaacaaaaaactatttttgctgtatttttaccatataaagtatttaaaaaacatgaattgagtttctgtagatttctagttctcaactttagcctgaacgccaacacttgaaggtgtttttcatcctctgtatgttgaaggtggttatttgtatgtaggaacaggactgccatcccagctttgcatgccaaagaaataaagaacacactttaaagggcaaactgaagagatgagcgagcaaaggtgcccttcaggtctactgaaaagttagagtacaaaacaacactgttgatctggacaaaagaagaaaaattaccctttttgcttgtgttgtgacaacttcatttaatatggtttaaagatttatgagactgtcagctaaaagtcttttcacaagaatgtcaacagagaatggcatctcaaaatatatatatttctttgcacaatttgtgaaaccttataagccattttccccaggtacaatgtagttcctgctgatagaaaggaaatattttgtcaagagctttcatttaaaagctactacctccacaatcacccccaaacccagaaaatccccactggctcttgccagtctggttttcgtattgcagttattccaattgtatttgatctccctgataacgtattttcatgggtttgggtagaagatgctaatcagattagaagcaggaatagttatttgctgtctgtgaaattgagccttttggtgcgccacgtggtgccagatcaacacttctatccctctgcactgaccacgttgtgaactgggagaccaaatgcaagccatttcatggacatagcaatatacaaccaaactctgttccttggagttatattgtaaactcttgcaggtgggagagcagttcacctccttagctctgtttgccagctcttacagggtaaaataaacctggcaatttatcctcagtcctagtttgtggtttaatgttgctatcttaagcactggcatttgggcaaaacatgactgtgttctgtgggagaatccaaaggcattattcactctagttgagatagaattgggtggctaaacagggtgtgtggtacccaaaagattaaatgttacatgtccttttagtccttgaccaggtctagccttggcagaagcaagggagccactaagccaaactccctgtgcagacagaccatgtttcaaggctggaagtagtgccctggcaacacacaaaaggaacggtgaaatggtaggcaaagtgaacttggctctgctggcctctttggggtcacagaaattgctccttgtggtaatcttatatttctgtcaggcacagggccaagaagctgtgtaacagacattactttgcttgcatctctttttcataccttttccctctgaggcagcttttgcttagaaaacagtcccttcactctgcctttcctcctaacttcctgtgcctcttcatgttctgctcaagctttttaaagcaacgaagctgttggagaacttaaatccttgcaactgagagataagctacttaaaggcggtaga

SEQ ID NO: 3292 - protein, 139 aa, Homo sapiens; identical to SEQ ID NO: 245

SEQ ID NO: 3293 - DNA, 819 bp, Homo sapiens
ccgagcgggtttgacggaaggagcggcggcgacggaggaggaggatggaggcggtggtgttcgtcttctctctcctcgattgttgcgcgctcatcttcctctcggtctacttcataattacattgtctgatttagaatgtgattacattaatgctagatcatgttgctcaaaattaaacaagtgggtaattccagaattgattggccataccattgtcactgtattactgctcatgtcattgcactggttcatcttccttctcaacttacctgttgccacttggaatatatatcgatacattatggtgccgagtggtaacatgggagtgtttgatccaacagaaatacacaatcgagggcagctgaagtcacacatgaaagaagccatgatcaagcttggtttccacttgctctgcttcttcatgtatctttatagtggtagcaactgcccttgctaatcaccgtaacctcggctgagaaagaagaggaagcgaaatccaagatgcagctcagttcatcaaagcctagcaggtcccctcagctgccttttcatgcctgccacagactacagtaggacaaaacctgacctggtctttgaagttaagagctaagaaagcttcctatagtagtatctcccatggcacttaccacattctatctggtattacagttatttgtatgcaattaatcactcttagattgtatgttcctggagggcagaatatgcccattcatatttgtatcttcttccttctgctcttggcacctaacacagtgccttgcacacaaacaataaatgattgttgagtgaataagtaa

SEQ ID NO: 3294 - protein, 137 aa, Homo sapiens
MEAVVFVFSLLDCCALIFLSVYFIITLSDLECDYINARSCCSKLNKWVIPELIGHTIVTVLLLMSLHWFIFLLNLPVATWNIYRYIMVPSGNMGVFDPTEIHNRGQLKSHMKEAMIKLGFHLLCFFMYLYSGSNCPC

SEQ ID NO: 3295 - DNA, 905 bp, Homo sapiens
gggtttgacggaaggagcggcggcgacggaggaggaggatggaggcggtggtgttcgtcttctctctcctcgattgttgcgcgctcatcttcctctcggtctacttcgccagttgcagtggctgacacctgtccccagtactttgggaggccgaggagggagaatcacttgagcccagcggttcgagaccagctctggtaacatagggagacttcctctctacaaaaataaaacaagaggaaaaaaaaaagaaacatgtttcaggtctgtgtctgtgtaatacaaagatgactgcagcctacagtaagaaatccagagactgaaggctatagctttagggatctgatatggatcgcagagtattagtataacatcagctgacattttattgagtgcctactttgcatgtggcttacatgttatttcatctaattctctacaacaacttcgtgagtgggtaattccagaattgattggccataccattgtcactgtattactgctcatgtcattgcactggttcatcttccttctcaacttacctgttgccacttggaatatatatcgatacattatggtgccgagtggtaacatgggagtgtttgatccaacagaaatacacaatcgagggcagctgaagtcacacatgaaagaagccatgatcaagcttggtttccacttgctctgcttcttcatgtatctttatagtatgatcttagctttgataaatgactgaagctggagaagccgtggttgaagtcagcctacactacagtgcacagttgaggagccagagacttcttaaatcatccttagaaccgtgaccatagcagtatatattttcctcttggaacaaaaaactatttttgctgtatttttaccatataaagtatttaaaaaacatg

SEQ ID NO: 3296 - protein, 76 aa, Homo sapiens
MSLHWFIFLLNLPVATWNIYRYIMVPSGNMGVFDPTEIHNRGQLKSHMKEAMIKLGFHLLCFFMYLYSMILALIND

SEQ ID NO: 3297 - DNA, 1797 bp, Homo sapiens
gggtttgacggaaggagcggcggcgacggaggaggaggatggaggcggtggtgttcgtcttctctctcctcgattgttgcgcgctcatcttcctctcggtctacttcgccagttgcagtggctgacacctgtccccagtactttgggaggccgaggagggagaatcacttgagcccagcggttcgagaccagctctggtaacatagggagacttcctctctacaaaaataaaacaagaggaaaaaaaaaagaaacatgtttcaggtctgtgtctgtgtaatacaaagatgactgcagcctacagtaagaaatccagagactgaaggctatagctttagggatctgatatggatcgcagagtattagtataacatcagctgacattttattgagtgcctactttgcatgtggcttacatgttatttcatctaattctctacaacaacttcgtgagtgggtaattccagaattgattggccataccattgtcactgtattactgctcatgtcattgcactggttcatcttccttctcaacttacctgttgccacttggaatatatatcgatacattatggtgccgagtggtaacatgggagtgtttgatccaacagaaatacacaatcgagggcagctgaagtcacacatgaaagaagccatgatcaagcttggtttccacttgctctgcttcttcatgtatctttatagtatgatcttagctttgataaatgactgaagctggagaagccgtggttgaagtcagcctacactacagtgcacagttgaggagccagagacttcttaaatcatccttagaaccgtgaccatagcagtatatattttcctcttggaacaaaaaactatttttgctgtatttttaccatataaagtatttaaaaaacatgaattgagtttctgtagatttctagttctcaactttagcctgaacgccaacacttgaaggtgtttttcatcctctgtatgttgaaggtggttatttgtatgtaggaacaggactgccatcccagctttgcatgccaaagaaataaagaacacactttaaagggcaaactgaagagatgagcgagcaaaggtgcccttcaggtctactgaaaagttagagtacaaaacaacactgttgatctggacaaaagaagaaaaattaccctttttgcttgtgttgtgacaacttcatttaatatggtttaaagatttatgagactgtcagctaaaagtcttttcacaagaatgtcaacagagaatggcatctcaaaatatatatatttctttgcacaatttgtgaaaccttataagccattttccccaggtacaatgtagttcctgctgatagaaaggaaatattttgtcaagagctttcatttaaaagctactacctccacaatcacccccaaacccagaaaatccccactggctcttgccagtctggttttcgtattgcagttattccaattgtatttgatctccctgataacgtattttcatgggtttgggtagaagatgctaatcagattagaagcaggaatagttatttgctgtctgtgaaattgagccttttggtgcgccacgtggtgccagatcaacacttctatccctctgcactgaccacgttgtgaactgggagaccaaatgcaagccatttcatggacatagcaatatacaaccaaactctgttccttggagttatattgtaaactcttgcaggtgggagagcagttcacctccttagctctgtttgccagctcttacagggtaaaataaacctggcaatttatcctc

SEQ ID NO: 3298 - protein, 76 aa, Homo sapiens; identical to SEQ ID NO: 3296

SEQ ID NO: 3299 - DNA, 2396 bp, Homo sapiens
gggtttgacggaaggagcggcggcgacggaggaggaggatggaggcggtggtgttcgtcttctctctcctcgattgttgcgcgctcatcttcctctcggtctacttcgccagttgcagtggctgacacctgtccccagtactttgggaggccgaggagggagaatcacttgagcccagcggttcgagaccagctctggtaacatagggagacttcctctctacaaaaataaaacaagaggaaaaaaaaaagaaacatgtttcaggtctgtgtctgtgtaatacaaagatgactgcagcctacagtaagaaatccagagactgaaggctatagctttagggatctgatatggatcgcagagtattagtataacatcagctgacattttattgagtgcctactttgcatgtggcttacatgttatttcatctaattctctacaacaacttcgtgagtgggtaattccagaattgattggccataccattgtcactgtattactgctcatgtcattgcactggttcatcttccttctcaacttacctgttgccacttggaatatatatcgatacattatggtgccgagtggtaacatgggagtgtttgatccaacagaaatacacaatcgagggcagctgaagtcacacatgaaagaagccatgatcaagcttggtttccacttgctctgcttcttcatgtatctttatagtatgatcttagctttgataaatgactgaagctggagaagccgtggttgaagtcagcctacactacagtgcacagttgaggagccagagacttcttaaatcatccttagaaccgtgaccatagcagtatatattttcctcttggaacaaaaaactatttttgctgtatttttaccatataaagtatttaaaaaacatgaattgagtttctgtagatttctagttctcaactttagcctgaacgccaacacttgaaggtgtttttcatcctctgtatgttgaaggtggttatttgtatgtaggaacaggactgccatcccagctttgcatgccaaagaaataaagaacacactttaaagggcaaactgaagagatgagcgagcaaaggtgcccttcaggtctactgaaaagttagagtacaaaacaacactgttgatctggacaaaagaagaaaaattaccctttttgcttgtgttgtgacaacttcatttaatatggtttaaagatttatgagactgtcagctaaaagtcttttcacaagaatgtcaacagagaatggcatctcaaaatatatatatttctttgcacaatttgtgaaaccttataagccattttccccaggtacaatgtagttcctgctgatagaaaggaaatattttgtcaagagctttcatttaaaagctactacctccacaatcacccccaaacccagaaaatccccactggctcttgccagtctggttttcgtattgcagttattccaattgtatttgatctccctgataacgtattttcatgggtttgggtagaagatgctaatcagattagaagcaggaatagttatttgctgtctgtgaaattgagccttttggtgcgccacgtggtgccagatcaacacttctatccctctgcactgaccacgttgtgaactgggagaccaaatgcaagccatttcatggacatagcaatatacaaccaaactctgttccttggagttatattgtaaactcttgcaggtgggagagcagttcacctccttagctctgtttgccagctcttacagggtaaaataaacctggcaatttatcctcagtcctagtttgtggtttaatgttgctatcttaagcactggcatttgggcaaaacatgactgtgttctgtgggagaatccaaaggcattattcactctagttgagatagaattgggtggctaaacagggtgtgtggtacccaaaagattaaatgttacatgtccttttagtccttgaccaggtctagccttggcagaagcaagggagccactaagccaaactccctgtgcagacagaccatgtttcaaggctggaagtagtgccctggcaacacacaaaaggaacggtgaaatggtaggcaaagtgaacttggctctgctggcctctttggggtcacagaaattgctccttgtggtaatcttatatttctgtcaggcacagggccaagaagctgtgtaacagacattactttgcttgcatctctttttcataccttttccctctgaggcagcttttgcttagaaaacagtcccttcactctgcctttcctcctaacttcctgtgcctcttcatgttctgctcaagctttttaaagcaacgaagctgttggagaacttaaatccttgcaactgagagataagctacttaaaggcggtaga

SEQ ID NO: 3300 - protein, 76 aa, Homo sapiens; identical to SEQ ID NO: 3296

SEQ ID NO: 3301 - DNA, 1524 bp, Homo sapiens
ggtttgacggaaggagcggcggcgacggaggaggaggatggaggcggtggtgttcgtcttctctctcctcgattgttgcgcgctcatcttcctctcggtctacttcgtatccttgcctgaggcaggcgaacgccttgccgggggacacggctgagggtgggccagttgggcacccgggcagtgggtaattccagaattgattggccataccattgtcactgtattactgctcatgtcattgcactggttcatcttccttctcaacttacctgttgccacttggaatatatatcgatacattatggtgccgagtggtaacatgggagtgtttgatccaacagaaatacacaatcgagggcagctgaagtcacacatgaaagaagccatgatcaagcttggtttccacttgctctgcttcttcatgtatctttatagtatgatcttagctttgataaatgactgaagctggagaagccgtggttgaagtcagcctacactacagtgcacagttgaggagccagagacttcttaaatcatccttagaaccgtgaccatagcagtatatattttcctcttggaacaaaaaactatttttgctgtatttttaccatataaagtatttaaaaaacatgaattgagtttctgtagatttctagttctcaactttagcctgaacgccaacacttgaaggtgtttttcatcctctgtatgttgaaggtggttatttgtatgtaggaacaggactgccatcccagctttgcatgccaaagaaataaagaacacactttaaagggcaaactgaagagatgagcgagcaaaggtgcccttcaggtctactgaaaagttagagtacaaaacaacactgttgatctggacaaaagaagaaaaattaccctttttgcttgtgttgtgacaacttcatttaatatggtttaaagatttatgagactgtcagctaaaagtcttttcacaagaatgtcaacagagaatggcatctcaaaatatatatatttctttgcacaatttgtgaaaccttataagccattttccccaggtacaatgtagttcctgctgatagaaaggaaatattttgtcaagagctttcatttaaaagctactacctccacaatcacccccaaacccagaaaatccccactggctcttgccagtctggttttcgtattgcagttattccaattgtatttgatctccctgataacgtattttcatgggtttgggtagaagatgctaatcagattagaagcaggaatagttatttgctgtctgtgaaattgagccttttggtgcgccacgtggtgccagatcaacacttctatccctctgcactgaccacgttgtgaactgggagaccaaatgcaagccatttcatggacatagcaatatacaaccaaactctgttccttggagttatattgtaaactcttgcaggtgggagagcagttcacctccttagctctgtttgccagctcttacagggtaaaataaacctggcaatttatcctc

SEQ ID NO: 3302 - protein, 76 aa, Homo sapiens; identical to SEQ ID NO: 3296

SEQ ID NO: 3303 - DNA, 567 bp, Homo sapiens
acggaaggagcggcggcgacggaggaggaggatggaggcggtggtgttcgtcttctctctcctcgattgttgcgcgctcatcttcctctcggtctacttcataattacattgtctgatttagaatgtgattacattaatgctagatcatgttgctcaaatactgctcatgtcattgcactggttcatcttccttctcaacttacctgttgccacttggaatatatatcgatacattatggtgccgagtggtaacatgggagtgtttgatccaacagaaatacacaatcgagggcagctgaagtcacacatgaaagaagccatgatcaagcttggtttccacttgctctgcttcttcatgtatctttatagtatgatcttagctttgataaatgactgaagctggagaagccgtggttgaagtcagcctacactacagtgcacagttgaggagccagagacttcttaaatcatccttagaaccgtgaccatagcagtatatattttcctcttggaacaaaaaactatttttgctgtatttttaccatataaagtatttaaaaaacatg

SEQ ID NO: 3304 - protein, 86 aa, Homo sapiens
MLDHVAQILLMSLHWFIFLLNLPVATWNIYRYIMVPSGNMGVFDPTEIHNRGQLKSHMKEAMIKLGFHLLCFFMYLYSMILALIND

SEQ ID NO: 3305 - DNA, 1459 bp, Homo sapiens
acggaaggagcggcggcgacggaggaggaggatggaggcggtggtgttcgtcttctctctcctcgattgttgcgcgctcatcttcctctcggtctacttcataattacattgtctgatttagaatgtgattacattaatgctagatcatgttgctcaaatactgctcatgtcattgcactggttcatcttccttctcaacttacctgttgccacttggaatatatatcgatacattatggtgccgagtggtaacatgggagtgtttgatccaacagaaatacacaatcgagggcagctgaagtcacacatgaaagaagccatgatcaagcttggtttccacttgctctgcttcttcatgtatctttatagtatgatcttagctttgataaatgactgaagctggagaagccgtggttgaagtcagcctacactacagtgcacagttgaggagccagagacttcttaaatcatccttagaaccgtgaccatagcagtatatattttcctcttggaacaaaaaactatttttgctgtatttttaccatataaagtatttaaaaaacatgaattgagtttctgtagatttctagttctcaactttagcctgaacgccaacacttgaaggtgtttttcatcctctgtatgttgaaggtggttatttgtatgtaggaacaggactgccatcccagctttgcatgccaaagaaataaagaacacactttaaagggcaaactgaagagatgagcgagcaaaggtgcccttcaggtctactgaaaagttagagtacaaaacaacactgttgatctggacaaaagaagaaaaattaccctttttgcttgtgttgtgacaacttcatttaatatggtttaaagatttatgagactgtcagctaaaagtcttttcacaagaatgtcaacagagaatggcatctcaaaatatatatatttctttgcacaatttgtgaaaccttataagccattttccccaggtacaatgtagttcctgctgatagaaaggaaatattttgtcaagagctttcatttaaaagctactacctccacaatcacccccaaacccagaaaatccccactggctcttgccagtctggttttcgtattgcagttattccaattgtatttgatctccctgataacgtattttcatgggtttgggtagaagatgctaatcagattagaagcaggaatagttatttgctgtctgtgaaattgagccttttggtgcgccacgtggtgccagatcaacacttctatccctctgcactgaccacgttgtgaactgggagaccaaatgcaagccatttcatggacatagcaatatacaaccaaactctgttccttggagttatattgtaaactcttgcaggtgggagagcagttcacctccttagctctgtttgccagctcttacagggtaaaataaacctggcaatttatcctc

SEQ ID NO: 3306 - protein, 86 aa, Homo sapiens; identical to SEQ ID NO: 3304

SEQ ID NO: 3307 - DNA, 2058 bp, Homo sapiens
acggaaggagcggcggcgacggaggaggaggatggaggcggtggtgttcgtcttctctctcctcgattgttgcgcgctcatcttcctctcggtctacttcataattacattgtctgatttagaatgtgattacattaatgctagatcatgttgctcaaatactgctcatgtcattgcactggttcatcttccttctcaacttacctgttgccacttggaatatatatcgatacattatggtgccgagtggtaacatgggagtgtttgatccaacagaaatacacaatcgagggcagctgaagtcacacatgaaagaagccatgatcaagcttggtttccacttgctctgcttcttcatgtatctttatagtatgatcttagctttgataaatgactgaagctggagaagccgtggttgaagtcagcctacactacagtgcacagttgaggagccagagacttcttaaatcatccttagaaccgtgaccatagcagtatatattttcctcttggaacaaaaaactatttttgctgtatttttaccatataaagtatttaaaaaacatgaattgagtttctgtagatttctagttctcaactttagcctgaacgccaacacttgaaggtgtttttcatcctctgtatgttgaaggtggttatttgtatgtaggaacaggactgccatcccagctttgcatgccaaagaaataaagaacacactttaaagggcaaactgaagagatgagcgagcaaaggtgcccttcaggtctactgaaaagttagagtacaaaacaacactgttgatctggacaaaagaagaaaaattaccctttttgcttgtgttgtgacaacttcatttaatatggtttaaagatttatgagactgtcagctaaaagtcttttcacaagaatgtcaacagagaatggcatctcaaaatatatatatttctttgcacaatttgtgaaaccttataagccattttccccaggtacaatgtagttcctgctgatagaaaggaaatattttgtcaagagctttcatttaaaagctactacctccacaatcacccccaaacccagaaaatccccactggctcttgccagtctggttttcgtattgcagttattccaattgtatttgatctccctgataacgtattttcatgggtttgggtagaagatgctaatcagattagaagcaggaatagttatttgctgtctgtgaaattgagccttttggtgcgccacgtggtgccagatcaacacttctatccctctgcactgaccacgttgtgaactgggagaccaaatgcaagccatttcatggacatagcaatatacaaccaaactctgttccttggagttatattgtaaactcttgcaggtgggagagcagttcacctccttagctctgtttgccagctcttacagggtaaaataaacctggcaatttatcctcagtcctagtttgtggtttaatgttgctatcttaagcactggcatttgggcaaaacatgactgtgttctgtgggagaatccaaaggcattattcactctagttgagatagaattgggtggctaaacagggtgtgtggtacccaaaagattaaatgttacatgtccttttagtccttgaccaggtctagccttggcagaagcaagggagccactaagccaaactccctgtgcagacagaccatgtttcaaggctggaagtagtgccctggcaacacacaaaaggaacggtgaaatggtaggcaaagtgaacttggctctgctggcctctttggggtcacagaaattgctccttgtggtaatcttatatttctgtcaggcacagggccaagaagctgtgtaacagacattactttgcttgcatctctttttcataccttttccctctgaggcagcttttgcttagaaaacagtcccttcactctgcctttcctcctaacttcctgtgcctcttcatgttctgctcaagctttttaaagcaacgaagctgttggagaacttaaatccttgcaactgagagataagctacttaaaggcggtaga

SEQ ID NO: 3308 - protein, 86 aa, Homo sapiens; identical to SEQ ID NO: 3304

SEQ ID NO: 3309 - DNA, 1464 bp, Homo sapiens
cggaaggagcggcggcgacggaggaggaggatggaggcggtggtgttcgtcttctctctcctcgattgttgcgcgctcatcttcctctcggtctacttcataattacattgtctgatttagaatgtgattacattaatgctagatcatgttgctcaaaattaaacaagtgggtaattccagaattgattggccataccattgtcactgtattactgctcatgtcattgcactggttcatcttccttctcaacttacctgttgccacttggaatatatatcgaaatacacaatcgagggcagctgaagtcacacatgaaagaagccatgatcaagcttggtttccacttgctctgcttcttcatgtatctttatagtatgatcttagctttgataaatgactgaagctggagaagccgtggttgaagtcagcctacactacagtgcacagttgaggagccagagacttcttaaatcatccttagaaccgtgaccatagcagtatatattttcctcttggaacaaaaaactatttttgctgtatttttaccatataaagtatttaaaaaacatgaattgagtttctgtagatttctagttctcaactttagcctgaacgccaacacttgaaggtgtttttcatcctctgtatgttgaaggtggttatttgtatgtaggaacaggactgccatcccagctttgcatgccaaagaaataaagaacacactttaaagggcaaactgaagagatgagcgagcaaaggtgcccttcaggtctactgaaaagttagagtacaaaacaacactgttgatctggacaaaagaagaaaaattaccctttttgcttgtgttgtgacaacttcatttaatatggtttaaagatttatgagactgtcagctaaaagtcttttcacaagaatgtcaacagagaatggcatctcaaaatatatatatttctttgcacaatttgtgaaaccttataagccattttccccaggtacaatgtagttcctgctgatagaaaggaaatattttgtcaagagctttcatttaaaagctactacctccacaatcacccccaaacccagaaaatccccactggctcttgccagtctggttttcgtattgcagttattccaattgtatttgatctccctgataacgtattttcatgggtttgggtagaagatgctaatcagattagaagcaggaatagttatttgctgtctgtgaaattgagccttttggtgcgccacgtggtgccagatcaacacttctatccctctgcactgaccacgttgtgaactgggagaccaaatgcaagccatttcatggacatagcaatatacaaccaaactctgttccttggagttatattgtaaactcttgcaggtgggagagcagttcacctccttagctctgtttgccagctcttacagggtaaaataaacctggcaatttatcctc

SEQ ID NO: 3310 - protein, 114 aa, Homo sapiens
MEAVVFVFSLLDCCALIFLSVYFIITLSDLECDYINARSCCSKLNKWVIPELIGHTIVTVLLLMSLHWFIFLLNLPVATWNIYRNTQSRAAEVTHERSHDQAWFPLALLLHVSL

SEQ ID NO: 3311 - DNA, 2063 bp, Homo sapiens
cggaaggagcggcggcgacggaggaggaggatggaggcggtggtgttcgtcttctctctcctcgattgttgcgcgctcatcttcctctcggtctacttcataattacattgtctgatttagaatgtgattacattaatgctagatcatgttgctcaaaattaaacaagtgggtaattccagaattgattggccataccattgtcactgtattactgctcatgtcattgcactggttcatcttccttctcaacttacctgttgccacttggaatatatatcgaaatacacaatcgagggcagctgaagtcacacatgaaagaagccatgatcaagcttggtttccacttgctctgcttcttcatgtatctttatagtatgatcttagctttgataaatgactgaagctggagaagccgtggttgaagtcagcctacactacagtgcacagttgaggagccagagacttcttaaatcatccttagaaccgtgaccatagcagtatatattttcctcttggaacaaaaaactatttttgctgtatttttaccatataaagtatttaaaaaacatgaattgagtttctgtagatttctagttctcaactttagcctgaacgccaacacttgaaggtgtttttcatcctctgtatgttgaaggtggttatttgtatgtaggaacaggactgccatcccagctttgcatgccaaagaaataaagaacacactttaaagggcaaactgaagagatgagcgagcaaaggtgcccttcaggtctactgaaaagttagagtacaaaacaacactgttgatctggacaaaagaagaaaaattaccctttttgcttgtgttgtgacaacttcatttaatatggtttaaagatttatgagactgtcagctaaaagtcttttcacaagaatgtcaacagagaatggcatctcaaaatatatatatttctttgcacaatttgtgaaaccttataagccattttccccaggtacaatgtagttcctgctgatagaaaggaaatattttgtcaagagctttcatttaaaagctactacctccacaatcacccccaaacccagaaaatccccactggctcttgccagtctggttttcgtattgcagttattccaattgtatttgatctccctgataacgtattttcatgggtttgggtagaagatgctaatcagattagaagcaggaatagttatttgctgtctgtgaaattgagccttttggtgcgccacgtggtgccagatcaacacttctatccctctgcactgaccacgttgtgaactgggagaccaaatgcaagccatttcatggacatagcaatatacaaccaaactctgttccttggagttatattgtaaactcttgcaggtgggagagcagttcacctccttagctctgtttgccagctcttacagggtaaaataaacctggcaatttatcctcagtcctagtttgtggtttaatgttgctatcttaagcactggcatttgggcaaaacatgactgtgttctgtgggagaatccaaaggcattattcactctagttgagatagaattgggtggctaaacagggtgtgtggtacccaaaagattaaatgttacatgtccttttagtccttgaccaggtctagccttggcagaagcaagggagccactaagccaaactccctgtgcagacagaccatgtttcaaggctggaagtagtgccctggcaacacacaaaaggaacggtgaaatggtaggcaaagtgaacttggctctgctggcctctttggggtcacagaaattgctccttgtggtaatcttatatttctgtcaggcacagggccaagaagctgtgtaacagacattactttgcttgcatctctttttcataccttttccctctgaggcagcttttgcttagaaaacagtcccttcactctgcctttcctcctaacttcctgtgcctcttcatgttctgctcaagctttttaaagcaacgaagctgttggagaacttaaatccttgcaactgagagataagctacttaaaggcggtaga

SEQ ID NO: 3312 - protein, 114 aa, Homo sapiens; identical to SEQ ID NO: 3310

SEQ ID NO: 3313 - DNA, 1347 bp, Homo sapiens
gaggaggatggaggcggtggtgttcgtcttctctctcctcgattgttgcgcgctcatcttcctctcggtctacttcataattacattgtctgatttagaatgtgattacattaatgctagatcatgttgctcaaaattaaacaagtgggtaattccagaattgattggccataccattgtcactgtattactgctcatgtcattgcactggttcatcttccttctcaacttacctgttgccacttggaatatatatcgtatgatcttagctttgataaatgactgaagctggagaagccgtggttgaagtcagcctacactacagtgcacagttgaggagccagagacttcttaaatcatccttagaaccgtgaccatagcagtatatattttcctcttggaacaaaaaactatttttgctgtatttttaccatataaagtatttaaaaaacatgaattgagtttctgtagatttctagttctcaactttagcctgaacgccaacacttgaaggtgtttttcatcctctgtatgttgaaggtggttatttgtatgtaggaacaggactgccatcccagctttgcatgccaaagaaataaagaacacactttaaagggcaaactgaagagatgagcgagcaaaggtgcccttcaggtctactgaaaagttagagtacaaaacaacactgttgatctggacaaaagaagaaaaattaccctttttgcttgtgttgtgacaacttcatttaatatggtttaaagatttatgagactgtcagctaaaagtcttttcacaagaatgtcaacagagaatggcatctcaaaatatatatatttctttgcacaatttgtgaaaccttataagccattttccccaggtacaatgtagttcctgctgatagaaaggaaatattttgtcaagagctttcatttaaaagctactacctccacaatcacccccaaacccagaaaatccccactggctcttgccagtctggttttcgtattgcagttattccaattgtatttgatctccctgataacgtattttcatgggtttgggtagaagatgctaatcagattagaagcaggaatagttatttgctgtctgtgaaattgagccttttggtgcgccacgtggtgccagatcaacacttctatccctctgcactgaccacgttgtgaactgggagaccaaatgcaagccatttcatggacatagcaatatacaaccaaactctgttccttggagttatattgtaaactcttgcaggtgggagagcagttcacctccttagctctgtttgccagctcttacagggtaaaataaacctggcaatttatcctc

SEQ ID NO: 3314 - protein, 92 aa, Homo sapiens; identical to SEQ ID NO: 3288

SEQ ID NO: 3315 - DNA, 1946 bp, Homo sapiens
gaggaggatggaggcggtggtgttcgtcttctctctcctcgattgttgcgcgctcatcttcctctcggtctacttcataattacattgtctgatttagaatgtgattacattaatgctagatcatgttgctcaaaattaaacaagtgggtaattccagaattgattggccataccattgtcactgtattactgctcatgtcattgcactggttcatcttccttctcaacttacctgttgccacttggaatatatatcgtatgatcttagctttgataaatgactgaagctggagaagccgtggttgaagtcagcctacactacagtgcacagttgaggagccagagacttcttaaatcatccttagaaccgtgaccatagcagtatatattttcctcttggaacaaaaaactatttttgctgtatttttaccatataaagtatttaaaaaacatgaattgagtttctgtagatttctagttctcaactttagcctgaacgccaacacttgaaggtgtttttcatcctctgtatgttgaaggtggttatttgtatgtaggaacaggactgccatcccagctttgcatgccaaagaaataaagaacacactttaaagggcaaactgaagagatgagcgagcaaaggtgcccttcaggtctactgaaaagttagagtacaaaacaacactgttgatctggacaaaagaagaaaaattaccctttttgcttgtgttgtgacaacttcatttaatatggtttaaagatttatgagactgtcagctaaaagtcttttcacaagaatgtcaacagagaatggcatctcaaaatatatatatttctttgcacaatttgtgaaaccttataagccattttccccaggtacaatgtagttcctgctgatagaaaggaaatattttgtcaagagctttcatttaaaagctactacctccacaatcacccccaaacccagaaaatccccactggctcttgccagtctggttttcgtattgcagttattccaattgtatttgatctccctgataacgtattttcatgggtttgggtagaagatgctaatcagattagaagcaggaatagttatttgctgtctgtgaaattgagccttttggtgcgccacgtggtgccagatcaacacttctatccctctgcactgaccacgttgtgaactgggagaccaaatgcaagccatttcatggacatagcaatatacaaccaaactctgttccttggagttatattgtaaactcttgcaggtgggagagcagttcacctccttagctctgtttgccagctcttacagggtaaaataaacctggcaatttatcctcagtcctagtttgtggtttaatgttgctatcttaagcactggcatttgggcaaaacatgactgtgttctgtgggagaatccaaaggcattattcactctagttgagatagaattgggtggctaaacagggtgtgtggtacccaaaagattaaatgttacatgtccttttagtccttgaccaggtctagccttggcagaagcaagggagccactaagccaaactccctgtgcagacagaccatgtttcaaggctggaagtagtgccctggcaacacacaaaaggaacggtgaaatggtaggcaaagtgaacttggctctgctggcctctttggggtcacagaaattgctccttgtggtaatcttatatttctgtcaggcacagggccaagaagctgtgtaacagacattactttgcttgcatctctttttcataccttttccctctgaggcagcttttgcttagaaaacagtcccttcactctgcctttcctcctaacttcctgtgcctcttcatgttctgctcaagctttttaaagcaacgaagctgttggagaacttaaatccttgcaactgagagataagctacttaaaggcggtaga

SEQ ID NO: 3316 - protein, 92 aa, Homo sapiens; identical to SEQ ID NO: 3288

SEQ ID NO: 3317 - DNA, 2427 bp, Homo sapiens
tcctcccccggcccccaccgcgcccgcggccggcccaggcagcactcgcgagcagcggcggccccgccggcggccgagttgggagaatgcggcggcgctcgcggatgctgctctgcttcgccttcctgtgggtgctgggcatcgcctactacatgtactcggggggcggctctgcgctggccgggggcgcgggcggcggcgccggcaggaaggaggactggaatgaaattgaccccattaaaaagaaagaccttcatcacagcaatggagaagagaaagcacaaagcatggagaccctccctccagggaaagtacggtggccagactttaaccaggaagcttatgttggagggacgatggtccgctccgggcaggacccttacgcccgcaacaagttcaaccaggtggagagtgataagcttcgaatggacagagccatccctgacacccggcatgaccagtgtcagcggaagcagtggcgggtggatctgccggccaccagcgtggtgatcacgtttcacaatgaagccaggtcggccctactcaggaccgtggtcagcgtgcttaagaaaagcccgccccatctcataaaagaaatcatcttggtggatgactacagcaatgatcctgaggacggggctctcttggggaaaattgagaaagtgcgagttcttagaaatgatcgacgagaaggcctcatgcgctcacgggttcggggggccgatgctgcccaagccaaggtcctgaccttcctggacagtcactgcgagtgtaatgagcactggctggagcccctcctggaaagggtggcggaggacaggactcgggttgtgtcacccatcatcgatgtcattaatatggacaactttcagtatgtgggggcatctgctgacttgaagggcggttttgattggaacttggtattcaagtgggattacatgacgcctgagcagagaaggtcccggcaggggaacccagtcgcccctataaaaacccccatgattgctggtgggctgtttgtgatggataagttctattttgaagaactggggaagtacgacatgatgatggatgtgtggggaggagagaacctagagatctcgttccgcgtgtggcagtgtggtggcagcctggagatcatcccgtgcagccgtgtgggacacgtgttccggaagcagcacccctacacgttcccgggtggcagtggcactgtctttgcccgaaacacccgccgggcagcagaggtctggatggatgaatacaaaaatttctattatgcagcagtgccttctgctagaaacgttccttatggaaatattcagagcagattggagcttaggaagaaactcagctgcaagcctttcaaatggtaccttgaaaatgtctatccagagttaagggttccagaccatcaggatatagcttttggggccttgcagcagggaactaactgcctcgacactttgggacactttgctgatggtgtggttggagtttatgaatgtcacaatgctgggggaaaccaggaatgggccttgacgaaggagaagtcggtgaagcacatggatttgtgccttactgtggtggaccgggcaccgggctctcttataaagctgcagggctgccgagaaaatgacagcagacagaaatgggaacagatcgagggcaactccaagctgaggcacgtgggcagcaacctgtgcctggacagtcgcacggccaagagcgggggcctaagcgtggaggtgtgtggcccggccctttcgcagcagtggaagttcacgctcaacctgcagcagtaggagggtccgggaggccctgccgtcctgtctcctgcaccattgggtggagtctggtgatcacattattgattatgtttcttaaactttccgcgaaactaatatacctcagtattccatcatggtctgaaagtcaaacttcggcaaggcacggacgactgtgcagacacagcagcggcaagaagcgagaactgccctccccctcctctcggtgcagcccagccgggcccccttccccaggccggagcgcccctcttccttccagctttcacttctgccggctccgcaactgagtgacacccagcgacaaccgactggggagtggtagaagcaactgaacggatgcgtgcgagctgaggacagggcgggaggagggggcacacatgccccaggggagcgaggagaactcttgaaatctccattttcaatcccttcgaaatcacgtatggtttccacaaagccgagtcgtgtcacgtggcaggtttacgtcaatagtccctctctctgctcctccattcgcaagtgtcttcctgggccagactcccctccacctcatgtacttgctatattgaggatgaagttttctatggtgggacactaaatataaagctatatagagaaagaatgt

SEQ ID NO: 3318 - protein, 571 aa, Homo sapiens; identical to SEQ ID NO: 247

SEQ ID NO: 3319 - DNA, 4472 bp, Homo sapiens
tcctcccccggcccccaccgcgcccgcggccggcccaggcagcactcgcgagcagcggcggccccgccggcggccgagttgggagaatgcggcggcgctcgcggatgctgctctgcttcgccttcctgtgggtgctgggcatcgcctactacatgtactcggggggcggctctgcgctggccgggggcgcgggcggcggcgccggcaggaaggaggactggaatgaaattgaccccattaaaaagaaagaccttcatcacagcaatggagaagagaaagcacaaagcatggagaccctccctccagggaaagtacggtggccagactttaaccaggaagcttatgttggagggacgatggtccgctccgggcaggacccttacgcccgcaacaagttcaaccaggtggagagtgataagcttcgaatggacagagccatccctgacacccggcatgaccagtgtcagcggaagcagtggcgggtggatctgccggccaccagcgtggtgatcacgtttcacaatgaagccaggtcggccctactcaggaccgtggtcagcgtgcttaagaaaagcccgccccatctcataaaagaaatcatcttggtggatgactacagcaatgatcctgaggacggggctctcttggggaaaattgagaaagtgcgagttcttagaaatgatcgacgagaaggcctcatgcgctcacgggttcggggggccgatgctgcccaagccaaggtcctgaccttcctggacagtcactgcgagtgtaatgagcactggctggagcccctcctggaaagggtggcggaggacaggactcgggttgtgtcacccatcatcgatgtcattaatatggacaactttcagtatgtgggggcatctgctgacttgaagggcggttttgattggaacttggtattcaagtgggattacatgacgcctgagcagagaaggtcccggcaggggaacccagtcgcccctataaaaacccccatgattgctggtgggctgtttgtgatggataagttctattttgaagaactggggaagtacgacatgatgatggatgtgtggggaggagagaacctagagatctcgttccgcgtgtggcagtgtggtggcagcctggagatcatcccgtgcagccgtgtgggacacgtgttccggaagcagcacccctacacgttcccgggtggcagtggcactgtctttgcccgaaacacccgccgggcagcagaggtctggatggatgaatacaaaaatttctattatgcagcagtgccttctgctagaaacgttccttatggaaatattcagagcagattggagcttaggaagaaactcagctgcaagcctttcaaatggtaccttgaaaatgtctatccagagttaagggttccagaccatcaggatatagcttttggggccttgcagcagggaactaactgcctcgacactttgggacactttgctgatggtgtggttggagtttatgaatgtcacaatgctgggggaaaccaggaatgggccttgacgaaggagaagtcggtgaagcacatggatttgtgccttactgtggtggaccgggcaccgggctctcttataaagctgcagggctgccgagaaaatgacagcagacagaaatgggaacagatcgagggcaactccaagctgaggcacgtgggcagcaacctgtgcctggacagtcgcacggccaagagcgggggcctaagcgtggaggtgtgtggcccggccctttcgcagcagtggaagttcacgctcaacctgcagcagtaggagggtccgggaggccctgccgtcctgtctcctgcaccattgggtggagtctggtgatcacattattgattatgtttcttaaactttccgcgaaactaatatacctcagtattccatcatggtctgaaagtcaaacttcggcaaggcacggacgactgtgcagacacagcagcggcaagaagcgagaactgccctccccctcctctcggtgcagcccagccgggcccccttccccaggccggagcgcccctcttccttccagctttcacttctgccggctccgcaactgagtgacacccagcgacaaccgactggggagtggtagaagcaactgaacggatgcgtgcgagctgaggacagggcgggaggagggggcacacatgccccaggggagcgaggagaactcttgaaatctccattttcaatcccttcgaaatcacgtatggtttccacaaagccgagtcgtgtcacgtggcaggtttacgtcaatagtccctctctctgctcctccattcgcaagtgtcttcctgggccagactcccctccacctcatgtacttgctatattgaggatgaagttttctatggtgggacactaaatataaagctatatagagaaagaatgtacggtcagttccctatggtttctgtagatcatcgtcatcttgtatattccccacaaagccgttcgcagcttccgggagaaggggccagagcccggtggggccagtttctcacagagggaggaggtggcctttgtcccctggagcccgatcagccagttggtgctactgctgtggccagctggggggcttcctccagaccaccggcctcggccccggcatccctgttgggcgtcagcctgagagtccctactgtgcgtcagaatccaccttgcgtgctgtgcgtatctgtgaacctggagcggttacttattttgacagatatcactttgggtctttttacattaaatttcttttctctaaggaatataagacataccccatagctctgtgtgagccagcaataccgctgccccctggcgacagggcagaccaatgatgccaggcagctgtcacacgctagtattggcttcattgtgatctgagccctgcacgctgggccttcagaattaatggccagcagtgtcagggatgagcccgtcagccagggcacaggcctggctcacagtcctgcacacctgctggcctggggagctccagccaggcagcgagtcctgccccgcccgcagctccctcccacaccccgcctggccaagatgactgcttcagggggctttggggaaagaattaggaagggtcagaaccaaacaatacctgctcatttacactgaggattcagggcgggagacaggagccttggggtcctgttaaaccacagacagttatgaactgaaagtcataacggggagaggtgcctggcttctacctgggtgctcaggaatgttcctcgtcacccctgccactctgtggtcggtgccctgcttcctcctccactcctggccgccttctccagcgccgcacacacagatgctcagtctcagagaggctggcacggcctggcagtctgagaaaagcgtcagttaggcacacctgcaggcccctcggtgggacagcggcggccttggagttaggagccaccctgggaggttgtgccggtgccatgctcctccctgtgtcttgtatgaaaggggccactgtgtgtcttcctccccggcgggagccccacatgtgtgcactgtaggacagcggccccgaggtggaagcctggctggagggctgccctataggtcttctcttcccgcctcccctgccatgcaaccagatgtgttgtgagtgggcagcgtgcccccacgctggagtaactccgcacgcttctgtctttcacggtgggcgctcggggggagcctgaggaaaacccccttaggtacctgtgcgaggctgtggagtgcaggccagagcagggtgtgcgtagcccccagcacccaggttcttctgtcagaccctgtgacctgcgagctgctactactgtaaggagggaaatggatgaatctggctcgttttaaaatcacgttttctgacgaatcctttgccccttcacctttaccccgcccgcacccctaggccctctcagccttcctatcatcccacgtgtctacccagacccttgtgcggcccatgccctgggggcggcgtcctgtccctgagctgggaggcggctttggatggtccgggcgtcaagagcaggggtgggccggggaggggtcctttgcggtgagctatgtttacatgacacagtgtgccaaagtgacttactgcggttgcgttagtttttaatcatcaggactatctcaccctcccactcctgtttttaaaactcagaattctttcctaagagcccttcgagcaaagcgtgccgaagttagttgtcttctctgtgctggtcctttcttatgtcctcataaaagctcagatgatggtatctgtgagtatgttttgcaaattcaaaatatagtttggtaatttttttttccagttgatttttaaaaagaactgctgtacagagcttgtactttgtccattttatagatggaaaccatccttgaaaattgtttaacttaaataaagagaagatactttctagataccgc

SEQ ID NO: 3320 - protein, 571 aa, Homo sapiens; identical to SEQ ID NO: 247

SEQ ID NO: 3321 - DNA, 4597 bp, Homo sapiens
tcctcccccggcccccaccgcgcccgcggccggcccaggcagcactcgcgagcagcggcggccccgccggcggccgagttgggagaatgcggcggcgctcgcggatgctgctctgcttcgccttcctgtgggtgctgggcatcgcctactacatgtactcggggggcggctctgcgctggccgggggcgcgggcggcggcgccggcaggaaggaggactggaatgaaattgaccccattaaaaagaaagaccttcatcacagcaatggagaagagaaagcacaaagcatggagaccctccctccagggaaagtacggtggccagactttaaccaggaagcttatgttggagggacgatggtccgctccgggcaggacccttacgcccgcaacaagttcaaccaggtggagagtgataagcttcgaatggacagagccatccctgacacccggcatgaccagtgtcagcggaagcagtggcgggtggatctgccggccaccagcgtggtgatcacgtttcacaatgaagccaggtcggccctactcaggaccgtggtcagcgtgcttaagaaaagcccgccccatctcataaaagaaatcatcttggtggatgactacagcaatgatcctgaggacggggctctcttggggaaaattgagaaagtgcgagttcttagaaatgatcgacgagaaggcctcatgcgctcacgggttcggggggccgatgctgcccaagccaaggtcctgaccttcctggacagtcactgcgagtgtaatgagcactggctggagcccctcctggaaagggtggcggaggacaggactcgggttgtgtcacccatcatcgatgtcattaatatggacaactttcagtatgtgggggcatctgctgacttgaagggcggttttgattggaacttggtattcaagtgggattacatgacgcctgagcagagaaggtcccggcaggggaacccagtcgcccctataaaaacccccatgattgctggtgggctgtttgtgatggataagttctattttgaagaactggggaagtacgacatgatgatggatgtgtggggaggagagaacctagagatctcgttccgcgtgtggcagtgtggtggcagcctggagatcatcccgtgcagccgtgtgggacacgtgttccggaagcagcacccctacacgttcccgggtggcagtggcactgtctttgcccgaaacacccgccgggcagcagaggtctggatggatgaatacaaaaatttctattatgcagcagtgccttctgctagaaacgttccttatggaaatattcagagcagattggagcttaggaagaaactcagctgcaagcctttcaaatggtaccttgaaaatgtctatccagagttaagggttccagaccatcaggatatagcttttggggccttgcagcagggaactaactgcctcgacactttgggacactttgctgatggtgtggttggagtttatgaatgtcacaatgctgggggaaaccaggaatgggccttgacgaaggagaagtcggtgaagcacatggatttgtgccttactgtggtggaccgggcaccgggctctcttataaagctgcagggctgccgagaaaatgacagcagacagaaatgggaacagatcgagggcaactccaagctgaggcacgtgggcagcaacctgtgcctggacagtcgcacggccaagagcgggggcctaagcgtggaggtgtgtggcccggccctttcgcagcagtggaagttcacgctcaacctgcagcagtaggagggtccgggaggccctgccgtcctgtctcctgcaccattgggtggagtctggtgatcacattattgattatgtttcttaaactttccgcgaaactaatatacctcagtattccatcatggtctgaaagtcaaacttcggcaaggcacggacgactgtgcagacacagcagcggcaagaagcgagaactgccctccccctcctctcggtgcagcccagccgggcccccttccccaggccggagcgcccctcttccttccagctttcacttctgccggctccgcaactgagtgacacccagcgacaaccgactggggagtggtagaagcaactgaacggatgcgtgcgagctgaggacagggcgggaggagggggcacacatgccccaggggagcgaggagaactcttgaaatctccattttcaatcccttcgaaatcacgtatggtttccacaaagccgagtcgtgtcacgtggcaggtttacgtcaatagtccctctctctgctcctccattcgcaagtgtcttcctgggccagactcccctccacctcatgtacttgctatattgaggatgaagttttctatggtgggacactaaatataaagctatatagagaaagaatgtacggtcagttccctatggtttctgtagatcatcgtcatcttgtatattccccacaaagccgttcgcagcttccgggagaaggggccagagcccggtggggccagtttctcacagagggaggaggtggcctttgtcccctggagcccgatcagccagttggtgctactgctgtggccagctggggggcttcctccagaccaccggcctcggccccggcatccctgttgggcgtcagcctgagagtccctactgtgcgtcagaatccaccttgcgtgctgtgcgtatctgtgaacctggagcggttacttattttgacagatatcactttgggtctttttacattaaatttcttttctctaaggaatataagacataccccatagctctgtgtgagccagcaataccgctgccccctggcgacagggcagaccaatgatgccaggcagctgtcacacgctagtattggcttcattgtgatctgagccctgcacgctgggccttcagaattaatggccagcagtgtcagggatgagcccgtcagccagggcacaggcctggctcacagtcctgcacacctgctggcctggggagctccagccaggcagcgagtcctgccccgcccgcagctccctcccacaccccgcctggccaagatgactgcttcagggggctttggggaaagaattaggaagggtcagaaccaaacaatacctgctcatttacactgaggattcagggcgggagacaggagccttggggtcctgttaaaccacagacagttatgaactgaaagtcataacggggagaggtgcctggcttctacctgggtgctcaggaatgttcctcgtcacccctgccactctgtggtcggtgccctgcttcctcctccactcctggccgccttctccagcgccgcacacacagatgctcagtctcagagaggctggcacggcctggcagtctgagaaaagcgtcagttaggcacacctgcaggcccctcggtgggacagcggcggccttggagttaggagccaccctgggaggttgtgccggtgccatgctcctccctgtgtcttgtatgaaaggggccactgtgtgtcttcctccccggcgggagccccacatgtgtgcactgtaggacagcggccccgaggtggaagcctggctggagggctgccctataggtcttctcttcccgcctcccctgccatgcaaccagatgtgttgtgagtgggcagcgtgcccccacgctggagtaactccgcacgcttctgtctttcacggtgggcgctcggggggagcctgaggaaaacccccttaggtacctgtgcgaggctgtggagtgcaggccagagcagggtgtgcgtagcccccagcacccaggttcttctgtcagaccctgtgacctgcgagctgctactactgtaaggagggaaatggatgaatctggctcgttttaaaatcacgttttctgacgaatcctttgccccttcacctttaccccgcccgcacccctaggccctctcagccttcctatcatcccacgtgtctacccagacccttgtgcggcccatgccctgggggcggcgtcctgtccctgagctgggaggcggctttggatggtccgggcgtcaagagcaggggtgggccggggaggggtcctttgcggtgagctatgtttacatgacacagtgtgccaaagtgacttactgcggttgcgttagtttttaatcatcaggactatctcaccctcccactcctgtttttaaaactcagaattctttcctaagagcccttcgagcaaagcgtgccgaagttagttgtcttctctgtgctggtcctttcttatgtcctcataaaagctcagatgatggtatctgtgagtatgttttgcaaattcaaaatatagtttggtaatttttttttccagttgatttttaaaaagaactgctgtacagagcttgtactttgtccattttatagatggaaaccatccttgaaaattgtttaacttaaataaagagaagatactttctagataccgctctttgctggccagagtctgtcctggtgtgtgagggctgggtggggtgggtgtggggactgggattggggtcagccttctgcagctcctgctcagtggctgtttcttatcaccttttgcagatgc

SEQ ID NO: 3322 - protein, 571 aa, Homo sapiens; identical to SEQ ID NO: 247

SEQ ID NO: 3323 - DNA, 4038 bp, Homo sapiens
ggctgagcggggtccaaaacattgatgactaccctgaaagcaggacctgaccttgggctgtttgaggacagatgtccttcactgggtgtggtggtacatgcctatagtcccagctgctcaggaagctcaggcaggagaatcgcttgaacccgggaggcggaggtttcagtgagccgagatctcgccactgcactccagcttggcagcagagcgagactccatcaaaaaaaaaaaaagctagtgcaaacatggcagtctttcagcttagccccgcagaaaagaaagtgattttcccaggaactcttatcttatgtagtctgaactttaatgcagagctgtctgatagtgtcgtagccgtgacggagaaggccgtggggcctggaatctccttgctgtgctctgtggccccggccctctgtggacgcgtaatgtgagagtttttaaagagtaactttcttttgtccttctttaagatatagaccccagtccctcctttaaaatattggctcgtgctgtaatttccactttgccttttgccctttgaccatctgtgtgacaagaaagccattccaatggttcagtaagcacccgctgaggctggctccccacaggtccagctcgaggtgctggtggggacagcccaccctctgctgtgtgccgtgatcccagctggagctgctgcacacccagagggagccgcctcagtcacacgccagcagacaggtgcaaatggagtgatgcagacagaaagaaaggaaatcacacctcaagatttattttctttctagaaacacccgccgggcagcagaggtctggatggatgaatacaaaaatttctattatgcagcagtgccttctgctagaaacgttccttatggaaatattcagagcagattggagcttaggaagaaactcagctgcaagcctttcaaatggtaccttgaaaatgtctatccagagttaagggttccagaccatcaggatatagcttttggggccttgcagcagggaactaactgcctcgacactttgggacactttgctgatggtgtggttggagtttatgaatgtcacaatgctgggggaaaccaggaatgggccttgacgaaggagaagtcggtgaagcacatggatttgtgccttactgtggtggaccgggcaccgggctctcttataaagctgcagggctgccgagaaaatgacagcagacagaaatgggaacagatcgagggcaactccaagctgaggcacgtgggcagcaacctgtgcctggacagtcgcacggccaagagcgggggcctaagcgtggaggtgtgtggcccggccctttcgcagcagtggaagttcacgctcaacctgcagcagtaggagggtccgggaggccctgccgtcctgtctcctgcaccattgggtggagtctggtgatcacattattgattatgtttcttaaactttccgcgaaactaatatacctcagtattccatcatggtctgaaagtcaaacttcggcaaggcacggacgactgtgcagacacagcagcggcaagaagcgagaactgccctccccctcctctcggtgcagcccagccgggcccccttccccaggccggagcgcccctcttccttccagctttcacttctgccggctccgcaactgagtgacacccagcgacaaccgactggggagtggtagaagcaactgaacggatgcgtgcgagctgaggacagggcgggaggagggggcacacatgccccaggggagcgaggagaactcttgaaatctccattttcaatcccttcgaaatcacgtatggtttccacaaagccgagtcgtgtcacgtggcaggtttacgtcaatagtccctctctctgctcctccattcgcaagtgtcttcctgggccagactcccctccacctcatgtacttgctatattgaggatgaagttttctatggtgggacactaaatataaagctatatagagaaagaatgtacggtcagttccctatggtttctgtagatcatcgtcatcttgtatattccccacaaagccgttcgcagcttccgggagaaggggccagagcccggtggggccagtttctcacagagggaggaggtggcctttgtcccctggagcccgatcagccagttggtgctactgctgtggccagctggggggcttcctccagaccaccggcctcggccccggcatccctgttgggcgtcagcctgagagtccctactgtgcgtcagaatccaccttgcgtgctgtgcgtatctgtgaacctggagcggttacttattttgacagatatcactttgggtctttttacattaaatttcttttctctaaggaatataagacataccccatagctctgtgtgagccagcaataccgctgccccctggcgacagggcagaccaatgatgccaggcagctgtcacacgctagtattggcttcattgtgatctgagccctgcacgctgggccttcagaattaatggccagcagtgtcagggatgagcccgtcagccagggcacaggcctggctcacagtcctgcacacctgctggcctggggagctccagccaggcagcgagtcctgccccgcccgcagctccctcccacaccccgcctggccaagatgactgcttcagggggctttggggaaagaattaggaagggtcagaaccaaacaatacctgctcatttacactgaggattcagggcgggagacaggagccttggggtcctgttaaaccacagacagttatgaactgaaagtcataacggggagaggtgcctggcttctacctgggtgctcaggaatgttcctcgtcacccctgccactctgtggtcggtgccctgcttcctcctccactcctggccgccttctccagcgccgcacacacagatgctcagtctcagagaggctggcacggcctggcagtctgagaaaagcgtcagttaggcacacctgcaggcccctcggtgggacagcggcggccttggagttaggagccaccctgggaggttgtgccggtgccatgctcctccctgtgtcttgtatgaaaggggccactgtgtgtcttcctccccggcgggagccccacatgtgtgcactgtaggacagcggccccgaggtggaagcctggctggagggctgccctataggtcttctcttcccgcctcccctgccatgcaaccagatgtgttgtgagtgggcagcgtgcccccacgctggagtaactccgcacgcttctgtctttcacggtgggcgctcggggggagcctgaggaaaacccccttaggtacctgtgcgaggctgtggagtgcaggccagagcagggtgtgcgtagcccccagcacccaggttcttctgtcagaccctgtgacctgcgagctgctactactgtaaggagggaaatggatgaatctggctcgttttaaaatcacgttttctgacgaatcctttgccccttcacctttaccccgcccgcacccctaggccctctcagccttcctatcatcccacgtgtctacccagacccttgtgcggcccatgccctgggggcggcgtcctgtccctgagctgggaggcggctttggatggtccgggcgtcaagagcaggggtgggccggggaggggtcctttgcggtgagctatgtttacatgacacagtgtgccaaagtgacttactgcggttgcgttagtttttaatcatcaggactatctcaccctcccactcctgtttttaaaactcagaattctttcctaagagcccttcgagcaaagcgtgccgaagttagttgtcttctctgtgctggtcctttcttatgtcctcataaaagctcagatgatggtatctgtgagtatgttttgcaaattcaaaatatagtttggtaatttttttttccagttgatttttaaaaagaactgctgtacagagcttgtactttgtccattttatagatggaaaccatccttgaaaattgtttaacttaaataaagagaagatactttctagataccgc

SEQ ID NO: 3324 - protein, 183 aa, Homo sapiens [sequence omitted]

SEQ ID NO: 3325 - DNA, 861 bp, Homo sapiens
acacagaaaggagtgacctctccaaccttccataaatcatcagaacactgcagagtgacagtgggaactccagagattaaacacggaggtgaggctggccagggatcacaagaggcccaacacccagacagtacggaacctgggtgggcacctcgtccgttttgtcatccacagaccagaggcttctgcacttctgatgactccatccagatctccagcttgtcctgtggacccatccatgcagaagcagactcggcaggcacaaggaccattttccacacccctatgattgcacctcatccaatcagcagcacccactccctagtccccagctccctccagattatccttgaaaaaccctagcctctgaattttgggggagattgacttaagtaataaaattccagtctcccacttagccagctctgtgtgaactaaactctttctctattgcaattcccatcttgatgagtcaactgaggtaaagagcaacctggctgaaggtcaacagcagggctttttaatcagatccatgctgccccaaaataatgaaaccctggatcagcttcttttccaaatcttgagaatacaggctcctgggctgtgaaatacaatttgaaaatgtttctcttctaacaaagagtgcaatgtcttgagtactttaacatactgttttctgaaatctcactgtttgctggtaggtatcaatggctttggtgtggggcgtctgatatgtctatataaagaatctcatgctgccccaggaaaaagcacatatatccatatttttgtttgattttgtaaagcttattgtacaagatcacatttttgttttaataaagaacaaaaatgaagtttcaa

SEQ ID NO: 3326 - protein, 35 aa, Homo sapiens
MLPQEKAHISIFLFDFVKLIVQDHIFVLIKNKNEV

SEQ ID NO: 3327 - DNA, 295 bp, Homo sapiens
cggaggcgctgggagagcggcacacctggagagggcgtggaagctccaacaccccacctccacaccgcgtgctatgcatctctcccgtccagctgctcctgggtttcagtctttcctaatgaacagatgagtcaactgaggtaaagagcaacctggctgaaggtcaacagcagggctttttaatcagatccatgctgccccaaaataatgaaaccctggatcagcttcttttccaaatcttgagaatacaggctcctgggctgtgaaatacaatttgaaaatgtttctcttctaa

SEQ ID NO: 3328 - protein, 38 aa, Homo sapiens
EALGERHTWRGRGSSNTPPPHRVLCISPVQLLLGFSLS

SEQ ID NO: 3329 - DNA, 2176 bp, Homo sapiens
agcagcggcaagaagcgagaactgccctccccctcctctcggtgcagcccagccgggcccccttccccaggccggagcgcccctcttccttccagctttcacttctgccggctccgcaactgagtgacacccagcgacaaccgactggggagtggtagaagcaactgaacggatgcgtgcgagctgaggacagggcgggaggagggggcacacatgccccaggggagcgaggagaactcttgaaatctccattttcaatcccttcgaaatcacgtatggtttccacaaagccgagtcgtgtcacgtggcaggtttacgtcaatagtccctctctctgctcctccattcgcaagtgtcttcctgggccagactcccctccacctcatgtacttgctatattgaggatgaagttttctatggtgggacactaaatataaagctatatagagaaagaatgtacggtcagttccctatggtttctgtagatcatcgtcatcttgtatattccccacaaagccgttcgcagcttccgggagaaggggccagagcccggtggggccagtttctcacagagggaggaggtggcctttgtcccctggagcccgatcagccagttggtgctactgctgtggccagctggggggcttcctccagaccaccggcctcggccccggcatccctgttgggcgtcagcctgagagtccctactgtgcgtcagaatccaccttgcgtgctgtgcgtatctgtgaacctggagcggttacttattttgacagatatcactttgggtctttttacattaaatttcttttctctaaggaagggtcagaaccaaacaatacctgctcatttacactgaggattcagggcgggagacaggagccttggggtcctgttaaaccacagacagttatgaactgaaagtcataacggggagaggtgcctggcttctacctgggtgctcaggaatgttcctcgtcacccctgccactctgtggtcggtgccctgcttcctcctccactcctggccgccttctccagcgccgcacacacagatgctcagtctcagagaggctggcacggcctggcagtctgagaaaagcgtcagttaggcacacctgcaggcccctcggtgggacagcggcggccttggagttaggagccaccctgggaggttgtgccggtgccatgctcctccctgtgtcttgtatgaaaggggccactgtgtgtcttcctccccggcgggagccccacatgtgtgcactgtaggacagcggccccgaggtggaagcctggctggagggctgccctataggtcttctcttcccgcctcccctgccatgcaaccagatgtgttgtgagtgggcagcgtgcccccacgctggagtaactccgcacgcttctgtctttcacggtgggcgctcggggggagcctgaggaaaacccccttaggtacctgtgcgaggctgtggagtgcaggccagagcagggtgtgcgtagcccccagcacccaggttcttctgtcagaccctgtgacctgcgagctgctactactgtaaggagggaaatggatgaatctggctcgttttaaaatcacgttttctgacgaatcctttgccccttcacctttaccccgcccgcacccctaggccctctcagccttcctatcatcccacgtgtctacccagacccttgtgcggcccatgccctgggggcggcgtcctgtccctgagctgggaggcggctttggatggtccgggcgtcaagagcaggggtgggccggggaggggtcctttgcggtgagctatgtttacatgacacagtgtgccaaagtgacttactgcggttgcgttagtttttaatcatcaggactatctcaccctcccactcctgtttttaaaactcagaattctttcctaagagcccttcgagcaaagcgtgccgaagttagttgtcttctctgtgctggtcctttcttatgtcctcataaaagctcagatgatggtatctgtgagtatgttttgcaaattcaaaatatagtttggtaatttttttttccagttgatttttaaaaagaactgctgtacagagcttgtactttgtccattttatagatggaaaccatccttgaaaattgtttaacttaaataaagagaagatactttctagataccgc

SEQ ID NO: 3330 - protein, 134 aa, Homo sapiens
MYGQFPMVSVDHRHLVYSPQSRSQLPGEGARARWGQFLTEGGGGLCPLEPDQPVGATAVASWGASSRPPASAPASLLGVSLRVPTVRQNPPCVLCVSVNLERLLILTDITLGLFTLNFFSLRKGQNQTIPAHLH

SEQ ID NO: 3331 - DNA, 1950 bp, Homo sapiens
agcagcggcaagaagcgagaactgccctccccctcctctcggtgcagcccagccgggcccccttccccaggccggagcgcccctcttccttccagctttcacttctgccggctccgcaactgagtgacacccagcgacaaccgactggggagtggtagaagcaactgaacggatgcgtgcgagctgaggacagggcgggaggagggggcacacatgccccaggggagcgaggagaactcttgaaatctccattttcaatcccttcgaaatcacgtatggtttccacaaagccgagtcgtgtcacgtggcaggtttacgtcaatagtccctctctctgctcctccattcgcaagtgtcttcctgggccagactcccctccacctcatgtacttgctatattgaggatgaagttttctatggtgggacactaaatataaagctatatagagaaagaatgtacggtcagttccctatggtttctgtagatcatcgtcatcttgtatattccccacaaagccgttcgcagcttccgggagaaggggccagagcccggtggggccagtttctcacagagggaggaggtggcctttgtcccctggagcccgatcagccagttggtgctactgctgtggccagctggggggcttcctccagaccaccggcctcggccccggcatccctgttgggcgtcagcctgagagtccctactgtgcgtcagaatccaccttgcgtgctgtgcgtatctgtgaacctggagcggttacttattttgacagatatcactttgggtctttttacattaaatttcttttctctaaggaatataagacataccccatagctctgtgtgagccagcaataccgctgccccctggcgacagggcagaccaatgatgccaggcagctgtcacacgctagtattggcttcattgtgatctgagccctgcacgctgggccttcagaattaatggccagcagtgtcagggatgagcccgtcagccagggcacaggcctggctcacagtcctgcacacctgctggcctggggagctccagccaggcagcgagtcctgccccgcccgcagctccctcccacaccccgcctggccaagatgactgcttcagggggctttggggaaagaattaggaagggtcagaaccaaacaatacctgctcatttacactgaggattcagggcgggagacaggagccttggggtcctgttaaaccacagacagttatgaactgaaagtcataacggggagaggtgcctggcttctacctgggtgctcaggaatgttcctcgtcacccctgcgagctgctactactgtaaggagggaaatggatgaatctggctcgttttaaaatcacgttttctgacgaatcctttgccccttcacctttaccccgcccgcacccctaggccctctcagccttcctatcatcccacgtgtctacccagacccttgtgcggcccatgccctgggggcggcgtcctgtccctgagctgggaggcggctttggatggtccgggcgtcaagagcaggggtgggccggggaggggtcctttgcggtgagctatgtttacatgacacagtgtgccaaagtgacttactgcggttgcgttagtttttaatcatcaggactatctcaccctcccactcctgtttttaaaactcagaattctttcctaagagcccttcgagcaaagcgtgccgaagttagttgtcttctctgtgctggtcctttcttatgtcctcataaaagctcagatgatggtatctgtgagtatgttttgcaaattcaaaatatagtttggtaatttttttttccagttgatttttaaaaagaactgctgtacagagcttgtactttgtccattttatagatggaaaccatccttgaaaattgtttaacttaaataaagagaagatactttctagataccgc

SEQ ID NO: 3332 - protein, 128 aa, Homo sapiens [sequence omitted]

SEQ ID NO: 3333 - DNA, 2301 bp, Homo sapiens
agcagcggcaagaagcgagaactgccctccccctcctctcggtgcagcccagccgggcccccttccccaggccggagcgcccctcttccttccagctttcacttctgccggctccgcaactgagtgacacccagcgacaaccgactggggagtggtagaagcaactgaacggatgcgtgcgagctgaggacagggcgggaggagggggcacacatgccccaggggagcgaggagaactcttgaaatctccattttcaatcccttcgaaatcacgtatggtttccacaaagccgagtcgtgtcacgtggcaggtttacgtcaatagtccctctctctgctcctccattcgcaagtgtcttcctgggccagactcccctccacctcatgtacttgctatattgaggatgaagttttctatggtgggacactaaatataaagctatatagagaaagaatgtacggtcagttccctatggtttctgtagatcatcgtcatcttgtatattccccacaaagccgttcgcagcttccgggagaaggggccagagcccggtggggccagtttctcacagagggaggaggtggcctttgtcccctggagcccgatcagccagttggtgctactgctgtggccagctggggggcttcctccagaccaccggcctcggccccggcatccctgttgggcgtcagcctgagagtccctactgtgcgtcagaatccaccttgcgtgctgtgcgtatctgtgaacctggagcggttacttattttgacagatatcactttgggtctttttacattaaatttcttttctctaaggaagggtcagaaccaaacaatacctgctcatttacactgaggattcagggcgggagacaggagccttggggtcctgttaaaccacagacagttatgaactgaaagtcataacggggagaggtgcctggcttctacctgggtgctcaggaatgttcctcgtcacccctgccactctgtggtcggtgccctgcttcctcctccactcctggccgccttctccagcgccgcacacacagatgctcagtctcagagaggctggcacggcctggcagtctgagaaaagcgtcagttaggcacacctgcaggcccctcggtgggacagcggcggccttggagttaggagccaccctgggaggttgtgccggtgccatgctcctccctgtgtcttgtatgaaaggggccactgtgtgtcttcctccccggcgggagccccacatgtgtgcactgtaggacagcggccccgaggtggaagcctggctggagggctgccctataggtcttctcttcccgcctcccctgccatgcaaccagatgtgttgtgagtgggcagcgtgcccccacgctggagtaactccgcacgcttctgtctttcacggtgggcgctcggggggagcctgaggaaaacccccttaggtacctgtgcgaggctgtggagtgcaggccagagcagggtgtgcgtagcccccagcacccaggttcttctgtcagaccctgtgacctgcgagctgctactactgtaaggagggaaatggatgaatctggctcgttttaaaatcacgttttctgacgaatcctttgccccttcacctttaccccgcccgcacccctaggccctctcagccttcctatcatcccacgtgtctacccagacccttgtgcggcccatgccctgggggcggcgtcctgtccctgagctgggaggcggctttggatggtccgggcgtcaagagcaggggtgggccggggaggggtcctttgcggtgagctatgtttacatgacacagtgtgccaaagtgacttactgcggttgcgttagtttttaatcatcaggactatctcaccctcccactcctgtttttaaaactcagaattctttcctaagagcccttcgagcaaagcgtgccgaagttagttgtcttctctgtgctggtcctttcttatgtcctcataaaagctcagatgatggtatctgtgagtatgttttgcaaattcaaaatatagtttggtaatttttttttccagttgatttttaaaaagaactgctgtacagagcttgtactttgtccattttatagatggaaaccatccttgaaaattgtttaacttaaataaagagaagatactttctagataccgctctttgctggccagagtctgtcctggtgtgtgagggctgggtggggtgggtgtggggactgggattggggtcagccttctgcagctcctgctcagtggctgtttcttatcaccttttgcagatgc

SEQ ID NO: 3334 - protein, 134 aa, Homo sapiens; identical to SEQ ID NO: 3330

SEQ ID NO: 3335 - DNA, 2075 bp, Homo sapiens
agcagcggcaagaagcgagaactgccctccccctcctctcggtgcagcccagccgggcccccttccccaggccggagcgcccctcttccttccagctttcacttctgccggctccgcaactgagtgacacccagcgacaaccgactggggagtggtagaagcaactgaacggatgcgtgcgagctgaggacagggcgggaggagggggcacacatgccccaggggagcgaggagaactcttgaaatctccattttcaatcccttcgaaatcacgtatggtttccacaaagccgagtcgtgtcacgtggcaggtttacgtcaatagtccctctctctgctcctccattcgcaagtgtcttcctgggccagactcccctccacctcatgtacttgctatattgaggatgaagttttctatggtgggacactaaatataaagctatatagagaaagaatgtacggtcagttccctatggtttctgtagatcatcgtcatcttgtatattccccacaaagccgttcgcagcttccgggagaaggggccagagcccggtggggccagtttctcacagagggaggaggtggcctttgtcccctggagcccgatcagccagttggtgctactgctgtggccagctggggggcttcctccagaccaccggcctcggccccggcatccctgttgggcgtcagcctgagagtccctactgtgcgtcagaatccaccttgcgtgctgtgcgtatctgtgaacctggagcggttacttattttgacagatatcactttgggtctttttacattaaatttcttttctctaaggaatataagacataccccatagctctgtgtgagccagcaataccgctgccccctggcgacagggcagaccaatgatgccaggcagctgtcacacgctagtattggcttcattgtgatctgagccctgcacgctgggccttcagaattaatggccagcagtgtcagggatgagcccgtcagccagggcacaggcctggctcacagtcctgcacacctgctggcctggggagctccagccaggcagcgagtcctgccccgcccgcagctccctcccacaccccgcctggccaagatgactgcttcagggggctttggggaaagaattaggaagggtcagaaccaaacaatacctgctcatttacactgaggattcagggcgggagacaggagccttggggtcctgttaaaccacagacagttatgaactgaaagtcataacggggagaggtgcctggcttctacctgggtgctcaggaatgttcctcgtcacccctgcgagctgctactactgtaaggagggaaatggatgaatctggctcgttttaaaatcacgttttctgacgaatcctttgccccttcacctttaccccgcccgcacccctaggccctctcagccttcctatcatcccacgtgtctacccagacccttgtgcggcccatgccctgggggcggcgtcctgtccctgagctgggaggcggctttggatggtccgggcgtcaagagcaggggtgggccggggaggggtcctttgcggtgagctatgtttacatgacacagtgtgccaaagtgacttactgcggttgcgttagtttttaatcatcaggactatctcaccctcccactcctgtttttaaaactcagaattctttcctaagagcccttcgagcaaagcgtgccgaagttagttgtcttctctgtgctggtcctttcttatgtcctcataaaagctcagatgatggtatctgtgagtatgttttgcaaattcaaaatatagtttggtaatttttttttccagttgatttttaaaaagaactgctgtacagagcttgtactttgtccattttatagatggaaaccatccttgaaaattgtttaacttaaataaagagaagatactttctagataccgctctttgctggccagagtctgtcctggtgtgtgagggctgggtggggtgggtgtggggactgggattggggtcagccttctgcagctcctgctcagtggctgtttcttatcaccttttgcagatgc

SEQ ID NO: 3336 - protein, 128 aa, Homo sapiens [sequence omitted]

SEQ ID NO: 3337 - DNA, 2103 bp, Homo sapiens
atcccttcgaaatcacgtatggtttccacaaagccgagtcgtgtcacgtggcaggtttacgtcaatagtccctctctctgctcctccattcgcaagtgtcttcctgggccagactcccctccacctcatgtacttgctatattgaggatgaagttttctatggtgggacactaaatataaagctatatagagaaagaatgtacggtcagttccctatggtttctgtagatcatcgtcatcttgtatattccccacaaagccgttcgcagcttccgggagaaggggccagagcccggtggggccagtttctcacagagggaggaggtggcctttgtcccctggagcccgatcagccagttggtgctactgctgtggccagctggggggcttcctccagaccaccggcctcggccccggcatccctgttgggcgtcagcctgagagtccctactgtgcgtcagaatccaccttgcgtgctgtgcgtatctgtgaacctggagcggttacttattttgacagatatcactttgggtctttttacattaaatttcttttctctaaggaatataagacataccccatagctctgtgtgagccagcaataccgctgccccctggcgacagggcagaccaatgatgccaggcagctgtcacacgctagtattggcttcattgtgatctgagccctgcacgctgggccttcagaattaatggccagcagtgtcagggatgagcccgtcagccagggcacaggcctggctcacagtcctgcacacctgctggcctggggagctccagccaggcagcgagtcctgccccgcccgcagctccctcccacaccccgcctggccaagatgactgcttcagggggctttggggaaagaattaggaagggtcagaaccaaacaatacctgctcatttacactgaggattcagggcgggagacaggagccttggggtcctgttaaaccacagacagttatgaactgaaagtcataacggggagaggtgcctggcttctacctgggtgctcaggaatgttcctcgtcacccctgccactctgtggtcggtgccctgcttcctcctccactcctggccgccttctccagcgccgcacacacagatgctcagtctcagagaggctggcacggcctggcagtctgagaaaagcgtcagttaggcacacctgcaggcccctcggtgggacagcggcggccttggagttaggagccaccctgggaggttgtgccggtgccatgctcctccctgtgtcttgtatgaaaggggccactgtgtgtcttcctccccggcgggagccccacatgtgtgcactgtaggacagcggccccgaggtggaagcctggctggagggctgccctataggtcttctcttcccgcctcccctgccatgcaaccagatgtgttgtgagtgggcagcgtgcccccacgctggagtaactccgcacgctttgctactactgtaaggagggaaatggatgaatctggctcgttttaaaatcacgttttctgacgaatcctttgccccttcacctttaccccgcccgcacccctaggccctctcagccttcctatcatcccacgtgtctacccagacccttgtgcggcccatgccctgggggcggcgtcctgtccctgagctgggaggcggctttggatggtccgggcgtcaagagcaggggtgggccggggaggggtcctttgcggtgagctatgtttacatgacacagtgtgccaaagtgacttactgcggttgcgttagtttttaatcatcaggactatctcaccctcccactcctgtttttaaaactcagaattctttcctaagagcccttcgagcaaagcgtgccgaagttagttgtcttctctgtgctggtcctttcttatgtcctcataaaagctcagatgatggtatctgtgagtatgttttgcaaattcaaaatatagtttggtaatttttttttccagttgatttttaaaaagaactgctgtacagagcttgtactttgtccattttatagatggaaaccatccttgaaaattgtttaacttaaataaagagaagatactttctagataccgc

SEQ ID NO: 3338 - protein, 128 aa, Homo sapiens [sequence omitted]

SEQ ID NO: 3339 - DNA, 2228 bp, Homo sapiens
atcccttcgaaatcacgtatggtttccacaaagccgagtcgtgtcacgtggcaggtttacgtcaatagtccctctctctgctcctccattcgcaagtgtcttcctgggccagactcccctccacctcatgtacttgctatattgaggatgaagttttctatggtgggacactaaatataaagctatatagagaaagaatgtacggtcagttccctatggtttctgtagatcatcgtcatcttgtatattccccacaaagccgttcgcagcttccgggagaaggggccagagcccggtggggccagtttctcacagagggaggaggtggcctttgtcccctggagcccgatcagccagttggtgctactgctgtggccagctggggggcttcctccagaccaccggcctcggccccggcatccctgttgggcgtcagcctgagagtccctactgtgcgtcagaatccaccttgcgtgctgtgcgtatctgtgaacctggagcggttacttattttgacagatatcactttgggtctttttacattaaatttcttttctctaaggaatataagacataccccatagctctgtgtgagccagcaataccgctgccccctggcgacagggcagaccaatgatgccaggcagctgtcacacgctagtattggcttcattgtgatctgagccctgcacgctgggccttcagaattaatggccagcagtgtcagggatgagcccgtcagccagggcacaggcctggctcacagtcctgcacacctgctggcctggggagctccagccaggcagcgagtcctgccccgcccgcagctccctcccacaccccgcctggccaagatgactgcttcagggggctttggggaaagaattaggaagggtcagaaccaaacaatacctgctcatttacactgaggattcagggcgggagacaggagccttggggtcctgttaaaccacagacagttatgaactgaaagtcataacggggagaggtgcctggcttctacctgggtgctcaggaatgttcctcgtcacccctgccactctgtggtcggtgccctgcttcctcctccactcctggccgccttctccagcgccgcacacacagatgctcagtctcagagaggctggcacggcctggcagtctgagaaaagcgtcagttaggcacacctgcaggcccctcggtgggacagcggcggccttggagttaggagccaccctgggaggttgtgccggtgccatgctcctccctgtgtcttgtatgaaaggggccactgtgtgtcttcctccccggcgggagccccacatgtgtgcactgtaggacagcggccccgaggtggaagcctggctggagggctgccctataggtcttctcttcccgcctcccctgccatgcaaccagatgtgttgtgagtgggcagcgtgcccccacgctggagtaactccgcacgctttgctactactgtaaggagggaaatggatgaatctggctcgttttaaaatcacgttttctgacgaatcctttgccccttcacctttaccccgcccgcacccctaggccctctcagccttcctatcatcccacgtgtctacccagacccttgtgcggcccatgccctgggggcggcgtcctgtccctgagctgggaggcggctttggatggtccgggcgtcaagagcaggggtgggccggggaggggtcctttgcggtgagctatgtttacatgacacagtgtgccaaagtgacttactgcggttgcgttagtttttaatcatcaggactatctcaccctcccactcctgtttttaaaactcagaattctttcctaagagcccttcgagcaaagcgtgccgaagttagttgtcttctctgtgctggtcctttcttatgtcctcataaaagctcagatgatggtatctgtgagtatgttttgcaaattcaaaatatagtttggtaatttttttttccagttgatttttaaaaagaactgctgtacagagcttgtactttgtccattttatagatggaaaccatccttgaaaattgtttaacttaaataaagagaagatactttctagataccgctctttgctggccagagtctgtcctggtgtgtgagggctgggtggggtgggtgtggggactgggattggggtcagccttctgcagctcctgctcagtggctgtttcttatcaccttttgcagatgc

SEQ ID NO: 3340 - protein, 128 aa, Homo sapiens [sequence omitted]

SEQ ID NO: 3341 - DNA, 1297 bp, Homo sapiens
gggggcttcctccagaccaccggcctcggccccggcatccctgttgggcgtcagcctgagagtccctactgtgcgtcagaatccaccttgcgtgctgtgcgtatctgtgaacctggagcggttacttattttgacagatatcactttgggtctttttacattaaatttcttttctctaaggaatataagacataccccatagctctgtgtgagccagcaataccgctgccccctggcgacagggcagaccaatgatgccaggcagctgtcacacgctagtattggcttcattgtgatctgagccctgcacgctgggccttcagaattaatggccagcagtgtcagggatgagcccgtcagccagggcacaggcctggctcacagtcctgcacacctgctggcctggggagctccagccaggcagcgagtcctgccccgcccgcagctccctcccacaccccgcctggccaagatgactgcttcagggggctttggggaaagaattaggaagggtcagaaccaaacaatacctgctcatttacactgaggattcagggcgggagacaggagccttggggtcctgttaaaccacagacagttatgaactgaaagtcataacggggagaggtgcctggcttctacctgggtgctcaggaatgttcctcgtcacccctgccactctgtggtcggtgccctgcttcctcctccactcctggccgccttctccagcgccgcacacacagatgctcagtctcagagaggctggcacggcctggcagtctgagaaaagcgtcagttaggcacacctgcaggcccctcggtgggacagcggcggccttggagttaggagccaccctgggaggttgtgccggtgccatgctcctccctgtgtcttgtatgaaaggggggtcctttgcggtgagctatgtttacatgacacagtgtgccaaagtgacttactgcggttgcgttagtttttaatcatcaggactatctcaccctcccactcctgtttttaaaactcagaattctttcctaagagcccttcgagcaaagcgtgccgaagttagttgtcttctctgtgctggtcctttcttatgtcctcataaaagctcagatgatggtatctgtgagtatgttttgcaaattcaaaatatagtttggtaatttttttttccagttgatttttaaaaagaactgctgtacagagcttgtactttgtccattttatagatggaaaccatccttgaaaattgtttaacttaaataaagagaagatactttctagataccgctc

SEQ ID NO: 3342 - protein, 34 aa, Homo sapiens
MLLPVSCMKGGSFAVSYVYMTQCAKVTYCGCVSF

SEQ ID NO: 3343 - DNA, 2363 bp, Homo sapiens
tgccctgagagccaggtatgcgtgtgtgtatctggggagcacgccccaaacatgagcagggacggtgttcccagctatccgagaggtcatgcccaagccaaaaggaaggctctagctcttaaacatgaataagtttattcctttcatttccacagtgtcttatgcttgcttctgttttctccaaggaagtatggtgcccacctactcctccagcctgacgatccatgtgagggttccttgttcccagcccaattctcatgtcccacctttctccactaagaaacagccaaattttggcaagagtcgtggtaggaaaaaaaaacaataattgggcagatgaggatttttcactttttgactagttctttctctagactttcctgtctttttaaaacttctagtttcccccttgagcgctccctcccagtgggtagaccacggaaggaatgaacaggggatggaagcaggggatgcagtccctattatttcaatagattggaaagatgggcccagaacaattgcgtacggtgttcagtgtaaattgaagatctggagttgcaggattgttgaggcaatttttagttgctttgctccatctaaacacaaggccataggatagtgtgactttgtagcttcatcaccgtatccacatcagaagtacaatgtccacttaatacatatatacacatatgtacgtatacacatatacacatgtgtacatatgtatgtatacacatgcacatgtgtacgtatgtatgtatacacatacatatatgtgtacacatatacatatgtatgtatacacatagatatatgtgtacacataaacatatgtgtacacatatacttatgtatgtatacacatacatatatgtgtacacatatacttatgtatgtatacacatacatatatgtgtacacatatacacatatacatatatgtgtacacataaatatgtatgtatccatatatgtatatatatacacatgtatacagatatgcatctatatgtatacctctatatgtatgcacatatacatatatgtatacatatatacatatatgcatacatctataatatatgtatgtgtatatatacacatacagtgtccacttaatatatatatctatcttgtgtgtatgtgtgtgtaaatatacacacacatacacacacgataaaatacagagtctaccacatgatgagcctctgctaggtccttagcaatcaaaccacatgtccagtcctggcccccattctacaactaaacacatgggccagtttaggggtccaggagggcaagaatggtgggtccacgtagaaaccaggtgagggaggagcagtccacagggctggggtgatgggctggtgaagcagtgttccaggaggggaactgctgctcacagggctgtcctggtcgccctcgggatacagccagacttgatccgagtggctcccggggctgaatggggaccgccgggtgcatatcccaggaggcagccttcagctcagtggggaaagcagtttccaaccttagagctgcccaacactagcacagggcacctgagaaaggaggggcccctctgcctttactctgtctcccactagaggcagctggttccttcagggaactctggtggggggtgagggggtggctggttctcagtgggcaggggtgaccctactggggtcagtgggctggcaatgctggtcttcactaagaagagttgaaaatagccaggaagctaagccctggctcctgggctcctgggcagatgcttaattaggaggaagaaggaaccaaaatcatgaacacaactggctctctcagggggaggctgtcaccctccaagctcttcttccccttcctcaaatggagattcacactcatccctagttcaggagagccgccattgatgatgaggaaatccgtgtcaaagaagctggaaagactgctattcattgtgagaattttgtttccactgctacattacattgtttcttcttgttttcccttccaatttccagttaagaatctttcacagaaaatttttaattttatcacaaactgcacagatatcacacagctgcacccccatttggtgacacaaagcatacccttctgtgaagattttcactttacgccaaggcatgattgtcactttacgccaaggcaataaatttttacaaattttgtataacaggagctgaattctgggttctcaaatgtgaaatgtggcaaaaaaaaaaaaaaaaaaaaaaaagatttaattcaagcattttgtcatgtggttcttatttcttcaaccaagtttgtttacagtcactgcctttgaaatacagtcaaatacatctgtttgcttc

SEQ ID NO: 3344 - protein, 143 aa, Homo sapiens
MYVYTCTCVRMYVYTYIYVYTYTYVCIHIDICVHINICVHIYLCMYTHTYMCTHILMYVYTYIYVYTYTHIHICVHINMYVSIYVYIYTCIQICIYMYTSICMHIYIYVYIYTYMHTSIIYVCVYIHIQCPLNIYIYLVCMCV

SEQ ID NO: 3345 - DNA, 3444 bp, Homo sapiens
atgcctgactacagaactcgagctctcttcgtgcaaagtactctcggggactctgcaggacctgagctgcagttgctcagcatagtgcccggccgggatctgcagccaagcgattcattcacagcctcctcctcaccaccaccatctgtgtggtcagaacttgagcacatccgtggaaaatcagaagcaaccacagagctaaaaagacccagccttccagggagtattcattcctgcctatgtggggtgtggtgtggcgtggggaagagaacccccagctccttggtgtccagcttgcaggaccttgagctccttggccagaggcagcgacagctgtggatggagtcgacgcctcggccgccctataatccattcctcgtgccctgcacacccgtggggaaactcagtgcagagcatggaggtcccacccgaaagatgccccccagcgccagtgccgtggacttcttccagctctttgtcccagacaacgtcctcaagaacatggtggtgcagacaaacatgtatgccaagaagttccaggagcggtttgggagcgacggagcctgggtggaggtgacgctgacggagatgaaggcgttcctgggctacatgatctccaccagcatctcccactgcgagtccgtcctcagcatctggagcggaggcttctacagcaaccgcagcctcgccctcgtcatgagccaggcccgcttcgagaagatcctcaagtacttccacgtcgtggccttccgctccagccagaccacgcacgggctctacaaggtccagcccttcctcgactccctgcagaacagcttcgactctgccttcaggccttcccaaacccaggtgctacatgaacccctgatcgatgaggatcctgtattcattgccacgtgcacagagcgggagctgcgaaagaggaaaaagcggaaattcagcctctgggtcagacaatgttcttccactggcttcatcatccagatttatgtccacctgaaggaaggtgggggcccagatggcctggatgcgctgaagaataagccccagctccacagcatggtggccaggagcctgtgccggaacgcggcaggcaagaactacatcattttcacggggcccagcatcaccagcctgacgctgtttgaagagtttgagaagcaagggatttactgctgcggcttgctccgcgcgcggaagagtgactgcaccggcctcccactgtccatgctgaccaacccagccacacccccggcccggggccagtaccaaatcaagatgaaggggaacatgtccttgatctgctggtacaacaaaggacacttccgcttcctgaccaacgcctactccccggtgcagcagggagtcatcatcaaaaggaagagtggggagatcccatgccccttggccgtggaggcgtttgccgctcacctgagctacatctgcagatacgatgacaaatacagcaagtatttcatttctcataaaccaaacaagacctggcagcaggtgttctggttcgccatcagcatcgccatcaacaatgcctacatcctgtacaaaatgtcagacgcctaccacgtgaagaggtacagccgggcgcagtttggagagagactcgtcagagagctgctgggcttggaggatgcctctccgacccactgatgctgggggcgcaggactcggtcaagggaggggcaagaggaggaggagagcctgccgttccaacttgcccatcagagacccggacacggcctggtgtgtggcttgctgcctgggagggatgcacagggcctctggagggacaggatggacctggtcagaggacggttgctgtcctcatttgcattccaagaagagcatgtcctccctcgagaaacagtgccgccggtgtgatgagcacttacacccacgttctcaagggcagattctctcatgacatccgtggagcttgcgaggcagcgtggactggtgactgtgaaggaaggcccccgtggtagaatgagctggagcacgctctaagagagatgcctgcttcctaaagatctacagcaatctgggacgtggttcaagttcaagacttgaaggaagcaaagacgccctgcatggttacaatggctcaggtgtcaggggaggccggagggttttccagcatttgcctcatgccagcacctttgaaccggtctcttagaagaagacacacatcctgggtgtacagtggtgaaatggggagtgggtgcccattctgaaaaacgaggcattcctgctcattccctctgcttagctggtgggcaggggagagagggaaatgccaaaaacttggagtgaaggatgatgctattttttatttttaaatatatcttcaggttattttcttactgttgcttcagatctaatgtaaaaggcagatgtcccctcctctccacccccgacgctgaccccggcctcagtcacggctctttgcatgatcacagttctgtgttctggcctgtggcagggccgggaagggccgctggcttccgaacagacgtggttgctctccacgaggcgcatggggagcccgcgggccctaagctttgtcgcagatgtcatcattggcagaattacttgtcttgaaaaataagtagcattgctgaaacacacaaccgaattctctacgatggccatttgctcattgtctttcctctgtgtgtagtgagtgaccctggcagtgtttgcctgctcagagtggcccctcagaacaacagggctggccttggaaaaaccccaaaacaggactgtggtgacaactctggtcaggtgtgatttgacatgagggccggaggcggttgctgacggcaggactggagaggctgcgtgcccggcactggcagcgaggctcgtgtgtcccccaggcagatctgggcactttcccaacccaggtttatgcgtctccagggaagcctcggtgccagagtggtgggcagatctgaccatccccacagaccagaaacaaggaatttctgggattacccagtcccccttcaacccagttgatgtaaccacctcattttttacaaatacagaatctattctactcaggctatgggcctcgtcctcactcagttattgcgagtgttgctgtccgcatgctccgggccccacgtggctcctgtgctctagatcatggtgactcccccgccctgtggttggaatcgatgccacggattgcaggccaaatttcagatcgtgtttccaaacacccttgctgtgccctttaatgggattgaaagcacttttaccacatggagaaatatatttttaatttgtgatgcttttctacaaggtccactatttctgagtttaatgtgtttccaacacttaaggagactctaatgaaagctgatgaattttcttttctgtccaaacaagtaaaataaaaataaaagtctatttagatgttga

SEQ ID NO: 3346 - protein, 554 aa, Homo sapiens; identical to SEQ ID NO: 249

SEQ ID NO: 3347 - DNA, 368 bp, Homo sapiens
attccaagaagagcatgtcctccctcgagaaacagtgccgccggtgtgatgagcacttacacccacgttgtggctcctgtgctctagatcatggtgactcccccgccctgtggttggaatcgatgccacggattgcaggccaaatttcagatcgtgtttccaaacacccttgctgtgccctttaatgggattgaaagcacttttaccacatggagaaatatatttttaatttgtgatgcttttctacaaggtccactatttctgagtttaatgtgtttccaacacttaaggagactctaatgaaagctgatgaattttcttttctgtccaaacaagtaaaataaaaataaaagtctatttagatgttg

SEQ ID NO: 3348 - protein, 56 aa, Homo sapiens
MSSLEKQCRRCDEHLHPRCGSCALDHGDSPALWLESMPRIAGQISDRVSKHPCCAL

SEQ ID NO: 3349 - DNA, 857 bp, Homo sapiens
aggtgttctggttcgccatcagcatcgccatcaacaatgcctacatcctgtacaaaatgtcagacgcctaccacgtgaagaggtacagccgggcgcagtttggagagagactcgtcagagagctgctgggcttggaggatgcctctccgacccactgatgctgggggcgcaggactcggtcaagggaggggcaagaggaggaggagagcctgccgttccaacttgcccatcagagacccggacacggcctggtgtgtggcttgctgcctgggagggatgcacagggcctctggagggacaggatggacctggtcagaggacggttgctgtcctcatttgcattccaagaagagcatgtcctccctcgagaaacagtgccgccggtgtgatgagcacttacacccacgttctcaagggcagattctctcatgacatccgtggagcttgcgaggcagcgtggactggtgactgtgaaggaaggcccccgtggtagaatgagctggagcacgctctaagagagatgcctgcttcctaaagatctacagcaatctgggacgtggttcaagttcaagacttgaaggaagcaaagacgccctgcatggttggaatcgatgccacggattgcaggccaaatttcagatcgtgtttccaaacacccttgctgtgccctttaatgggattgaaagcacttttaccacatggagaaatatatttttaatttgtgatgcttttctacaaggtccactatttctgagtttaatgtgtttccaacacttaaggagactctaatgaaagctgatgaattttcttttctgtccaaacaagtaaaataaaaataaaagtctatttagatgttg

SEQ ID NO: 3350 - protein, 39 aa, Homo sapiens
MVGIDATDCRPNFRSCFQTPLLCPLMGLKALLPHGEIYF

SEQ ID NO: 3351 - DNA, 2421 bp, Homo sapiens
ggcttctacagcaaccgcagcctcgccctcgtcatgagccaggcccgcttcgagaagatcctcaagtacttccacgtcgtggccttccgctccagccagaccacgcacgggctctacaaggtccagcccttcctcgactccctgcagaacagcttcgactctgccttcaggccttcccaaacccaggtgctacatgaacccctgatcgatgaggatcctgtattcattgccacgtgcacagagcgggagctgcgaaagaggaaaaagcggaaattcagcctctgggtcagacaatgttcttccactggcttcatcatccagatttatgtccacctgaaggaaggtgggggcccagatggcctggatgcgctgaagaataagccccagctccacagcatggtggccaggagcctgtgccggaacgcggcaggcaagaactacatcattttcacggggcccagcatcaccagcctgacgctgtttgaagagtttgagaagcaagggatttactgctgcggcttgctccgcgcgcggaagagtgactgcaccggcctcccactgtccatgctgaccaacccagccacacccccggcccggggccagtaccaaatcaagatgaaggggaacatgtccttgatctgctggtacaacaaaggacacttccgcttcctgaccaacgcctactccccggtgcagcagggagtcatcatcaaaaggaagagtggggagatcccatgccccttggccgtggaggcgtttgccgctcacctgagctacatctgcagatacgatgacaaatacagcaagtatttcatttctcataaaccaaacaagacctggcagcaggtgttctggttcgccatcagcatcgccatcaacaatgcctacatcctgtacaaaatgtcagacgcctaccacgtgaagaggtacagccgggcgcagtttggagagagactcgtcagagagctgctgggcttggaggatgcctctccgacccactgatgctgggggcgcaggactcggtcaagggaggggcaagaggaggaggagagcctgccgttccaacttgcccatcagagacccggacacggcctggtgtgtggcttgctgcctgggagggatgcacagggcctctggagggacaggatggacctggtcagaggacggttgctgtcctcatttgcattccaagaagagcatgtcctccctcgagaaacagtgccgccggtgtgatgagcacttacacccacgttctcaagggcagattctctcatgacatccgtggagcttgcgaggcagcgtggactggtgactgtgaaggaaggcccccgtggtagaatgagctggagcacgctctaagagagatgcctgcttcctaaagatctacagcaatctgggacgtggttcaagttcaagacttgaaggaagcaaagacgccctgcatggttacaatggctcaggtgtcaggggaggccggagggttttccagcatttgcctcatgccagcacctttgaaccggtctcttagaagaagacacacatcctgggtgtacagtggtgaaatggggagtgggtgcccattctgaaaaacgaggcattcctgctcattccctctgcttagctggtgggcaggggagagagggaaatgccaaaaacttggagtgaaggatgatgctattttttatttttaaatatatcttcaggttattttcttactgttgcttcagatctaatgtaaaaggcagatgtcccctcctctccacccccgacgctgaccccggcctcagtcacggctctttgcatgatcacagttctgtgttctggcctgtggcagggccgggaagggccgctggcttccgaacagacgtggttgctctccacgaggcgcatggggagcccgcgggccctaagctttgtcgcagatgtcatcattggcagaattacttgtcttgaaaaataagtagcattgctgaaacacacaaccgaattctctacgatggccatttgctcattgtctttcctctgtgtgtagtgagtgaccctggcagtgtttgcctgctcagagtggcccctcagaacaacagggctggccttggaaaaaccccaaaacaggactgtggtgacaactctggtcaggtgtgatttgacatgagggccggaggcggttgctgacggcaggactggagaggctgcgtgcccggcactggcagcgaggctcgtgtgtcccccaggcagatctgggcactttcccaacccaggtttatgcgtctccagggaagcctcggtgccagagtggtgggcagatctgaccatccccacagaccagaaacaaggaatttctgggattacccagtcccccttcaacccagttgatgtaaccacctcattttttacaaatacagaatctattctactcaggct

SEQ ID NO: 3352 - protein, 322 aa, Homo sapiens
MSQARFEKILKYFHVVAFRSSQTTHGLYKVQPFLDSLQNSFDSAFRPSQTQVLHEPLIDEDPVFIATCTERELRKRKKRKFSLWVRQCSSTGFIIQIYVHLKEGGGPDGLDALKNKPQLHSMVARSLCRNAAGKNYIIFTGPSITSLTLFEEFEKQGIYCCGLLRARKSDCTGLPLSMLTNPATPPARGQYQIKMKGNMSLICWYNKGHFRFLTNAYSPVQQGVIIKRKSGEIPCPLAVEAFAAHLSYICRYDDKYSKYFISHKPNKTWQQVFWFAISIAINNAYILYKMSDAYHVKRYSRAQFGERLVRELLGLEDASPTH

SEQ ID NO: 3353 - DNA, 3114 bp, Homo sapiens
agcgcacagctgggagggctctcccggtcgcggcgagactcacgcctgcggtgtgctagggcggcggcgacggtgacgggcgtggggcgcggcgctgcctcggctgccgggtcgttgcggcgagcgcgcgggccggcctggagtcaccgggctgaaccgccgcgcctgcatcgtgccgcacgccgcggaggcgctcgggtacagaccgcgcgggcgcgcacaaagcggcccggggcggccggcgcggcgcagaccctcggtgggcagcgcactccagtcttcccaggctagcggctgcagggagctccggcccgcggcccctccgcctcaagtctgggagctgccggtcccactctgtctttgcctatggggattcgagagtttcccagcggcgcacccaggggcaagagcattgccgttggcatgaggaggtcaccggacgtcagcccccggagactgtccgacatcagcccccagctccggcagctcaagtacttggtggtggacgaggcgattaaggaggatctgaaatggtcgcgctccgtggaggatctcaccagcgggccggtggggctcacgtccatcgaggagcggatcctgcgcatcactggctactatggctaccagccctgggcagcgagctgcaaaagggaggagcgcccccgggactccccgggcccggcggaggcccaggcaccggccggggtggaggccggcgggagagcgagtcgccgctgctggacgtgctcccgggcgcaactcaagaagatcttctggggcgtggcggtcgtgctgtgcgtgtgctcctcgtgggcgggctccacgcagctcgccaagctgaccttcaggaagttcgacgcgcccttcaccctcacgtggtttgccaccaactggaactttttattcttcccgttgtactacgtggggcacgtctgcaagtccacagagaagcagtctgtgaagcagcgatacagggaatgctgtcgattttttggagacaatggcttgactttgaaggtgttttttaccaaggcagcaccctttggtgttctttggacactcacaaactacctgtacttacatgcaataaagaaaataaacactacggatgtctccgtgttgttctgctgcaacaaagcttttgtgttcttgctctcatggatcgttctcagggacagattcatgggagtgaggattgtggccgccatcctcgccatcgctggcattgtgatgatgacctacgctgatggcttccacagccactccgtcatcggcatcgcactggtggtggcctcagcatcgatgtctgccctctacaaggttttgttcaagctcctcctgggcagtgctaagtttggagaagccgccttatttttgtccatcttgggtgtgtttaacatcctcttcatcacctgcattcctattatcctctactttaccaaagtggaatactggagctcttttgatgacattccatggggaaacctttgtggattttcagttcttttattgacattcaatattgtattaaattttggaattgccgttacatatcccactctgatgtctcttggaatcgtcctcagcatacctgtgaatgcagtgattgatcactacaccagtcagatcgtcttcaatggggtccgggtcatcgccatcatcatcatcggcctgggttttctcctcctgctcctgccagaggagtgggatgtctggttgatcaagctgctcacccgactcaaagtgaggaagaaggaggagcctgcagagggcgctgccgacctgagctcaggacctcagagcaagaacagaagagcccgcccttccttcgcccgctaacaccactcctctagaactcggtggtaatgactgggaggtctattcctgccgggaggaacctcagttgggtaaggtgtacatacctgtacagttttggtcatctgcggtaagttctatggtatttattggcatgtccaatttgcttgcacttttccacatcagaccttccacttaagggtaccaattcaatacaaaagagaaaagaagaacctctcagtgcttttccaacgaatgtaaagtgggtttaaaagttccctgcgtagatcgttttggatggctgacgttcttgacaagccagccatcagggcaagtgttttgaatcttagcaagtgttttgaatcttagcaactgaacatgacattgcacactgtgattatttttcagctatggtaggtcatattttgttttataccagagctgtactcttaattttaaggaatttcaatgaaccaaaagataactgtcaatttatttggatggatggatggagggatggaaggagggagggaaggatgtctgggatgtgaagaggcaaggcagaaatggatgatgaacatcaaaaactgtcagaggacaggtctgtgccaggtaccaggaaggacaagataagtccaagccccggctggcctgctctcacgtgtctgtgtaagatcatgcaagagaaatcacagtgccttctacagaattttcgtctttacctatgtgaagcgaggtgacgtgatacgtcactggcgccgtcttataatttagatgtaaaaatctttagaaacaaataaaactctctatatatgtgtatgtctgtgtacaaaaaaatgacagagctgatggccagtgtatacagagcgtggcccgcggtgtacaatacccatataaggtacattgtgcaggaggggaattgctggctgcttttacttcctgaccaagactgaaaaattatttactgaaatctgtaaacctttttatgaaacttttaagcaccaggctgtttacttacacaatttaggtctgccagaaaattctatctgtgatagatctgtaaagagggtcaggggttagagtttactatttttgaagtttacattgttacatatgaaatggaaacattattttgaaacgttgtcataacccaatggtgcattctgtaaccatggagtcttctgtttcctgggggaaaggggcattcatgacctgaactttttagcaaattattattctcagtttccattacctgtttggccaaacagattaataaaatatttgaaaaagaagcgttca

SEQ ID NO: 3354 - protein, 490 aa, Homo sapiens; identical to SEQ ID NO: 251

SEQ ID NO: 3355 - DNA, 2444 bp, Homo sapiens
cagtccccgggagaagaagcggaggagggagagagccagcgaggcggcccaggggagcgggcgcgagtggcggctgccggagccgcctgtgcacgggcggcggcgaggcgagggtggcggtcgcctgagcagctagagccggggcggcgcggaatccgcatccgccgcgagtgtgatgaagctaccctgcctcgctgctccgcttgccgccagctgacaccgcctgcacccagcccgcccgggaggggagacgccgcggggccgtgaccttggcggaggagggcacactgataattcttgtatcttgagagtggaccaagttttgggtgacatggcccaggggaataattatgggcagaccagcaacggggtggccgatgaatcacccaacatgctggtgtacagaaagatggaagacgtcatagcacggatgcaagatgaaaaaaatggaattcctattcgtacggtcaaaagctttctttccaagatacctagcgtcttctctggttcagacattgttcaatggttgataaagaacttaactatagaagatccagtggaggcgctccatttgggaacattaatggctgcccacggctacttctttccaatctcagatcatgtcctcacactcaaggatgatggcaccttttaccggtttcaaaccccctatttttggccatcaaattgttgggagccggaaaacacagattatgccgtttacctctgcaagagaacaatgcaaaacaaggcacgactggagctcgcagactatgaggctgagagcctggccaggctgcagagagcatttgcccggaagtgggagttcattttcatgcaagcagaagcacaagcaaaagtggacaagaagagagacaagattgaaaggaagatccttgacagccaagagagagcgttctgggacgtgcacaggcccgtgcctggatgtgtaaatacaactgaagtggacattaagaagtcatccagaatgagaaacccccacaaaacacggaagtctgtctatggtttacaaaatgatattagaagtcacagtcctacccacacacccacaccagaaactaaacctccaacagaagatgagttacaacaacagataaaatattggcaaatacagttagatagacatcggttaaaaatgtcaaaagtcgctgacagtctactaagttacacggaacagtatttagaatacgacccgtttcttttgccacctgacccttctaacccatggctgtccgatgacaccactttctgggaacttgaggcaagcaaagaaccgagccagcagagggtaaaacgatggggttttggcatggacgaggcattgaaagacccagttgggagagaacagttccttaaatttctagagtcagaattcagctcggaaaatttaagattctggctggcagtggaggacctgaaaaagaggcctattaaagaagtaccctcaagagttcaggaaatatggcaagagtttctggctcccggagcccccagtgctattaacttggattccaagagttatgacaaaaccacacagaacgtgaaggaacctggacgatacacatttgaagatgctcaggagcacatttacaaactgatgaaaagtgattcatacccacgttttataagatccagtgcctatcaggagcttctacaggcaaagaaaaagtctggaaactcaatggatcgcagaacatcttttgaaaaatttgcacagaatgtggggaaatctctcacgtccaagaggttaacaagccttgctcagtcttactaaacggatcatcttgtagcatgaatgcagactggagtcactgcacacactttgtagctcaatgttgtgacctggagcagaggacattagaacaagatgttgcatgagcaaaggacctaaattgttatttttgtgtgtacattccatctccaatggactcttccgtctcaatgcctccattccaaactgttgtctgctttctttctccttctactatgctggatctgtgtctcttcctttttaacaagttcaagtgaagtaaaaccttttctttttttccttctttctctctctctctctctcaaagcttcagttagacacacagttcactgaaaattcagtcagtcaaaaactggaagaactgtaaaagaaaaaagtatatatcaataagtatacatgtggcttcacatttattaaacaataaattccgcacagaaagtttcatttcaccaatgtgtcacagtcagaaacaaactcatgtcttcgtctgttgtctgtacattctccgttaatgtttctcgcatttatttttataccatatttaaagaagaaacaccttttactccaaatgtattaaagttgatcccttctctgtaaatttgtgtatgtttatattgttgttttatctttcattaaaagatgcagaatctca

SEQ ID NO: 3356 - protein, 487 aa, Homo sapiens
MAQGNNYGQTSNGVADESPNMLVYRKMEDVIARMQDEKNGIPIRTVKSFLSKIPSVFSGSDIVQWLIKNLTIEDPVEALHLGTLMAAHGYFFPISDHVLTLKDDGTFYRFQTPYFWPSNCWEPENTDYAVYLCKRTMQNKARLELADYEAESLARLQRAFARKWEFIFMQAEAQAKVDKKRDKIERKILDSQERAFWDVHRPVPGCVNTTEVDIKKSSRMRNPHKTRKSVYGLQNDIRSHSPTHTPTPETKPPTEDELQQQIKYWQIQLDRHRLKMSKVADSLLSYTEQYLEYDPFLLPPDPSNPWLSDDTTFWELEASKEPSQQRVKRWGFGMDEALKDPVGREQFLKFLESEFSSENLRFWLAVEDLKKRPIKEVPSRVQEIWQEFLAPGAPSAINLDSKSYDKTTQNVKEPGRYTFEDAQEHIYKLMKSDSYPRFIRSSAYQELLQAKKKSGNSMDRRTSFEKFAQNVGKSLTSKRLTSLAQSY

SEQ ID NO: 3357 - DNA, 2390 bp, Homo sapiens
cagtccccgggagaagaagcggaggagggagagagccagcgaggcggcccaggggagcgggcgcgagtggcggctgccggagccgcctgtgcacgggcggcggcgaggcgagggtggcggtcgcctgagcagctagagccggggcggcgcggaatccgcatccgccgcgagtgtgatgaagctaccctgcctcgctgctccgcttgccgccagctgacaccgcctgcacccagcccgcccgggaggggagacgccgcggggccgtgaccttggcggaggagggcacactgataattcttgtatcttgagagtggaccaagttttgggtgacatggcccaggggaataattatgggcagaccagcaacggggtggccgatgaatcacccaacatgctggtgtacagaaagatggaagacgtcatagcacggatgcaagatgaaaaaaatggaattcctattcgtacggtcaaaagctttctttccaagatacctagcgtcttctctggttcagacattgttcaatggttgataaagaacttaactatagaagatccagtggaggcgctccatttgggaacattaatggctgcccacggctacttctttccaatctcagatcatgtcctcacactcaaggatgatggcaccttttaccggtttcaaaccccctatttttggccatcaaattgttgggagccggaaaacacagattatgccgtttacctctgcaagagaacaatgcaaaacaaggcacgactggagctcgcagactatgaggctgagagcctggccaggctgcagagagcatttgcccggaagtgggagttcattttcatgcaagcagaagcacaagcaaaagtggacaagaagagagacaagattgaaaggaagatccttgacagccaagagagagcgttctgggacgtgcacaggcccgtgcctggatgtgtaaatacaactgaagtggacattaagaagtcatccagaatgagaaacccccacaaaacacggaagtctgtctatggtttacaaaatgatattagaagtcacagtcctacccacacacccacaccagaaactaaacctccaacagaagatgagttacaacaacagataaaatattggcaaatacagttagatagacatcggttaaaaatgtcaaaagtcgctgacagtctactaagttacacggaacagtatttagaatacgacccgtttcttttgccacctgacccttctaacccatggctgtccgatgacaccactttctgggaacttgaggcaagcaaagaaccgagccagcagagggtaaaacgatggggttttggcatggacgaggcattgaaagacccagttgggagagaacagttccttaaatttctagagtcagaattcagctcggaaaatttaagattctggctggcagtggaggacctgaaaaagaggcctattaaagaagtaccctcaagagttcaggaaatatggcaagagtttctggctcccggagcccccagtgctattaacttggattccaagagttatgacaaaaccacacagaacgtgaaggaacctggacgatacacatttgaagatgctcaggagcacatttacaaactgatgaaaagtgattcatacccacgttttataagatccagtgcctatcaggagcttctacaggcaaagaaaaaggggaaatctctcacgtccaagaggttaacaagccttgctcagtcttactaaacggatcatcttgtagcatgaatgcagactggagtcactgcacacactttgtagctcaatgttgtgacctggagcagaggacattagaacaagatgttgcatgagcaaaggacctaaattgttatttttgtgtgtacattccatctccaatggactcttccgtctcaatgcctccattccaaactgttgtctgctttctttctccttctactatgctggatctgtgtctcttcctttttaacaagttcaagtgaagtaaaaccttttctttttttccttctttctctctctctctctctcaaagcttcagttagacacacagttcactgaaaattcagtcagtcaaaaactggaagaactgtaaaagaaaaaagtatatatcaataagtatacatgtggcttcacatttattaaacaataaattccgcacagaaagtttcatttcaccaatgtgtcacagtcagaaacaaactcatgtcttcgtctgttgtctgtacattctccgttaatgtttctcgcatttatttttataccatatttaaagaagaaacaccttttactccaaatgtattaaagttgatcccttctctgtaaatttgtgtatgtttatattgttgttttatctttcattaaaagatgcagaatctca

SEQ ID NO: 3358 - protein, 469 aa, Homo sapiens
MAQGNNYGQTSNGVADESPNMLVYRKMEDVIARMQDEKNGIPIRTVKSFLSKIPSVFSGSDIVQWLIKNLTIEDPVEALHLGTLMAAHGYFFPISDHVLTLKDDGTFYRFQTPYFWPSNCWEPENTDYAVYLCKRTMQNKARLELADYEAESLARLQRAFARKWEFIFMQAEAQAKVDKKRDKIERKILDSQERAFWDVHRPVPGCVNTTEVDIKKSSRMRNPHKTRKSVYGLQNDIRSHSPTHTPTPETKPPTEDELQQQIKYWQIQLDRHRLKMSKVADSLLSYTEQYLEYDPFLLPPDPSNPWLSDDTTFWELEASKEPSQQRVKRWGFGMDEALKDPVGREQFLKFLESEFSSENLRFWLAVEDLKKRPIKEVPSRVQEIWQEFLAPGAPSAINLDSKSYDKTTQNVKEPGRYTFEDAQEHIYKLMKSDSYPRFIRSSAYQELLQAKKKGKSLTSKRLTSLAQSY

SEQ ID NO: 3359 - DNA, 591 bp, Homo sapiens
aatagctatttggagactcattggccaattaaatattgaaggaaaatttttaaatgttttataacaaatcaaaaagttcatcaggctctttagtgtcatattaccatattatctttccatctttgattcttctagacattatacatatatttgctttgtgaaattcttaattatctttttatttttcatattgtttcttcccggatcattcaatagatttagtagcttgtatttaagagagggttagtagcttagtagccgggcctggtgacacacatgtgtaatcctagccactcaggaggccgaggcaggaggatcacttgaccccaggagttcgaggctacggtgagctataattgtaccactgcactccagccctgggtgacagagtgaaactcctctaaaaattttaaaagaaaaaagagagagagggtgagtaaagttgctgcaaaggaaaatagtatatataaaaattcttggggcaattgtgtatgtaataaaggtgttgttgatgtctgttttggtggcacagtgtagcttgttcctaaatagttggtcctcggttagcaggactcagatggtggttgcagc

SEQ ID NO: 3360 - protein, 35 aa, Homo sapiens
MFYNKSKSSSGSLVSYYHIIFPSLILLDIIHIFAL

SEQ ID NO: 3361 - DNA, 445 bp, Homo sapiens
acaacgacgccattatcagcaccccctgccggcgcctccggcgcagcccgcgcaggatattttgaaaagcgccggagagctaggtgaagagctgggctcccaagggggtgatagaaccagcccgcggcccggcctcctcctcccgcttcccattcgcagcccgcctcccgccgggaagcggcccggctgctgcagaacggccgcgcctgccctcccggtttctcccgtccagtcttcaccgtcctttcccagagaaagcgacagcacagcctatgacaaccgaagctaaaacggaaaaactgggccgggcgcaagaggaaaccagagccattcgactattgctagaggagaggaatagctgcaggaaaacatgcgcaaaatagcacaaacattgcgtcgtcaaggctgcaatgtctaatacaaaatagaaggttctcatagcaac

SEQ ID NO: 3362 - protein, 36 aa, Homo sapiens
MTTEAKTEKLGRAQEETRAIRLLLEERNSCRKTCAK

SEQ ID NO: 3363 - DNA, 2137 bp, Homo sapiens
gggaggcgggctgcgaatgggaagcgggaggaggaggccgggccgcgggctggttctatcacccccttgggagcccagctcttcacctagctctccggcgcttttcaaaatctgcagttaacaacaaaaatcgagcaacgccacgtcgcacaaacaggacaggagggggcgaggggccaggctcgccgcggggcgctgagcaggccgggacaccgcggccgaggttatcgttaggcatctcccaggcgaccggctccgcagcaagatggcggacgagaaggacagggaagagataatagtagcagaatttcacaaaaaaatcaaagaggcatttgaagtctttgaccatgagtcgaataatacagtggatgtgagagagattggaacaattatcaggtcattaggatgctgtcctacggaaggagagctgcatgatctgattgcagaggtagaggaagaagaacccactggatacattcgattcgaaaaatttcttccggtgatgacagaaatactactagaaagaaaatacagaccaattccagaagatgtccttcttcgagcttttgaggttttagattcagctaaacgtgggtttcttactaaggacgagctgatcaagtatatgactgaagaaggtgagcctttttctcaagaggaaatggaagaaatgttgtctgctgcaattgatccagaatcaaattcaattaattacaaggactatataacaatgatggtgatagatgaaaattaaatgttctaaagataatttctgattgaaagaacaattttagaaattgcttgttcttgttaatttcacatcttatcttaggattcctatatgtgatatttaataccttgtgacataactattttaagacactttgtttttaaagatgatcgtaacactttaaaccaaatttagtatgtctagccttacagaatgataaattactatttatttaaaaactattcttaaaacattttaacattagaatggattgttgtttattttctacaataaaactcaggtcaccttcgaattaattaagctgacaaaatgaaaatgacttaattacccaaggtttggcatgtaaagatcttaagagggggcagaacgaaccactcgaaaacgagtagcagtgtaatgaaggcttcttttttaaacaataacaaatgcttcatcaatctgagtgtggaaggtgatttatcaaaataaatattactaatttatttttttatgagtgccaattacaaatatcatttgggataataataacttagtgtaaacatttatatttgctgatccagcatgtcaccatttatggagtagctaaaggagttgagatcattggaactagagaaaagaaggttgagtggaagttgatagtgtaaggtagtggcaattctccctttgtctttagaattctcacccactccgcatatctgtcatgggagcattgtcctgaatactgagtaagaatactgagaaatgttatggtgtgcaaatgtacagctcctgaaagagcagaatgaagcacaagcagtcacaatggaaaaatatatggcatggccactgcctcctccttgcaattctctccgatcttggcatcttatatggcaactatatggcaacttacaagcaaaggggaagataaagtaaagggaagtgaacaattttccaaacttagatattctgttataacaagacacacacacacacacacacacacacacacacacgggtctctatttgaagatggcttcaccactatatgtgtgtatctacatagatgtaaacatttagagttgctgtgagccttcctcaggcatgtagtcttgcccccaaaagaggcggctgctacccaagagactgtcgctgttcattcattcatgaaacactgaaggagtaccatgagatgatgtgctgggaaccggagtccctaacgaatccaggtcacagtttagtgagggaagcctgcaaggcagtcagcagccacatttcagataggggcatgttcagggtcccgtgcaagtgccgaagagaggcagctactcagccttgcagggagagagctttctggaagatgaaaggtgctagtgagcggagaaggcttcccaggacaggaagctcctg

SEQ ID NO: 3364 - protein, 162 aa, Homo sapiens; identical to SEQ ID NO: 255

SEQ ID NO: 3365 - DNA, 1994 bp, Homo sapiens
gcagttaacaacaaaaatcgagcaacgccacgtcgcacaaacaggacaggagggggcgaggggtgtgtgcgcgcgcgtgctgtccccaaatggatgagaaataagggaaaggaggggttggggaccgtgtgatgaagcaacatgctaggcccgggacaagtccggctccggcctcgggtctggagggacaaggccgggggccgggtggcagacggggcctctggtcttcccccagcgcgagggtcgtggcgcgaaacggggacagggcgcgcgctcggagcctcctccccgccccgccccgcccaagggtcttcctcccccgggattcagagcggcccctcctccaggccaggctcgccgcggggcgctgagcaggccgggacaccgcggccgaggttatcgttaggcatctcccaggcgaccggctccgcagcaagatggcggacgagaaggacagggaagggcctgggatacaacagtgatgagataaggcctcggactttactgatcgaacatctaatggaaggtggaagaagagaccatcacacaatgacggtgttatggggaacacaggagataatagtagcagaatttcacaaaaaaatcaaagaggcatttgaagtctttgaccatgagtcgaataatacagtggatgtgagagagattggaacaattatcaggtcattaggatgctgtcctacggaaggagagctgcatgatctgattgcagaggtagaggaagaagaacccactggatacattcgattcgaaaaatttcttccggtgatgacagaaatactactagaaagaaaatacagaccaattccagaagatgtccttcttcgagcttttgaggttttagattcagctaaacgtgggtttcttactaaggacgagctgatcaagtatatgactgaagaagatggagtttcgctccgtcgcccaggctgaagtgcagtggcgtgatcttggctcgttgcaacctccacctcccgggttcaagagattctcctgcctcagcctcctgagcagctgggatgacaggcacacaccaccacgcctggctaatttctgtatttttagtagagacggggtttcaccatggtctggtgacctcctggtctcgaactcctgacctcaagtgatcctcccgcctcagcctcccaaagttctgggattacaggcatgagccaccgcacccggctgcttccttaactcttgatctcctctctgtatcttgctttgtctagctgttctcttctctccatattcatccaaacatttgcttagaagtacccagaagcatggcgttgaatgtggtacaccttgaacgaagggtgaagaaacgaggcagagtgacttagtagcaagtgacagcacacagtttaaattttaatattagcccatttacaaacaacagcttatataatagtcattcacatacctcaacactcaccatcccctccccactttttttctggagacagggtttcactgtcaccccagctggaatgcaggtggcatgatcacagctcactgtagcatcgacctcctggactcaaggggtcctcgcgcctcagcctcctgagtagctgggaccacaggtgcatgccaccacgcccagctaatgtttttttttattttttgtagagacagggtctggctatgttgcttaggctggtctcaaactcctgggttcaagcgatcctgccacctcagcctcccaaagtgttaggattacagatgtgagccactgtgcccagccaacattcaccccattcaagtgtgcaattcaatggattctagtatcttcacagtgctgtgcaactatcactcctatctacttacaaagcatttccatcatcttaaaaagaatccccatgtccaatagcagttccccttcccccaccgtcatcctcgggcaaccgctaatcttcctgtgtgtctgtggatttgcctcttcagggcatttcacataaacacaatcatacaat

SEQ ID NO: 3366 - protein, 269 aa, Homo sapiens
MLGPGQVRLRPRVWRDKAGGRVADGASGLPPARGSWRETGTGRALGASSPPRPAQGSSSPGIQSGPSSRPGSPRGAEQAGTPRPRLSLGISQATGSAARWRTRRTGKGLGYNSDEIRPRTLLIEHLMEGGRRDHHTMTVLWGTQEIIVAEFHKKIKEAFEVFDHESNNTVDVREIGTIIRSLGCCPTEGELHDLIAEVEEEEPTGYIRFEKFLPVMTEILLERKYRPIPEDVLLRAFEVLDSAKRGFLTKDELIKYMTEEDGVSLRRPG

SEQ ID NO: 3367 - DNA, 1636 bp, Homo sapiens
aagggtcttcctcccccgggattcagagcggcccctcctccaggccaggctcgccgcggggcgctgagcaggccgggacaccgcggccgaggttatcgttaggcatctcccaggcgaccggctccgcagcaagatggcggacgagaaggacagggaagagagattggaacaattatcaggtcattaggatgctgtcctacggaaggagagctgcatgatctgattgcagaggtagaggaagaagaacccactggatacattcgattcgaaaaatttcttccggtgatgacagaaatactactagaaagaaaatacagaccaattccagaagatgtccttcttcgagcttttgaggttttagattcagctaaacgtgggtttcttactaaggacgagctgatcaagtatatgactgaagaaggataacctgagattttcccaaggtaaaatccaaatagagacctgatgtgccactggctcggccgtgcatgctagaatcaccagccagagatgaggatgaaccgcgtgccttcaggacagggcggagacggaggaggaaaggagtgtggtgatcctcggaacatcagcagacaggctgttgatgataggaacacattgcagcggggaaggaggatggctgagatatgaaatacccttcaaggtggacgcatacccaggggcatgtcattcggtggcaggggccagcacggacatgcagcactgaggcgtgtgctagcgcccagtgcgtcgacccaggcacggacttgtttggagcatacaggacagctctgcgttaagacctgtaagccattaaagaagtacagtctggtgaatgaaccctaatctcttgatgatcaagtgatgacatcatattctgtctccgaggagacaccctcttgcacagaaggcagtagaggaagcttgcgtcgagattgcctacctccccagccccaccttcgagggttctttcaaaagttcggactgatgttcaacttcacatcttgtctcaaggcaatcctctctgtttagtctcatagagttggctttgtggaatgtaattcatttttatctttagcacaaatttgtctgtttcttttaaggccaccagaaagcacaacatagactccccacagaaatctcattttatctcctaagttgcagaataaacgtaccttgtttgcaaagggaacattttcctttacactcaaatcacttcaatgtgtattttgcctcttcagctcactgacctcgcccgcagcatctgatgtaagtcaccatatgccatttcccgactaggagagtgcttggcctcttgtgcaggaagtttgcttaccctcatgactcctggcttccgcagagcctgccataccccacagcttggccgggccctgtggaaagccatctctattctcacactgctggggaaggtgcatgactcaggacccgacacacaggcctgagagtctggcgatcttgtgctctgatcccagcttcatgtgtgactcactctggatcaggcgcttcacttcctgtgcacctctgtctgtaaaatagagagcccagctctagtccttctccctcctgagaagcaatgcagagatttagtcccctttgcagtcacccagtgtctaagtac

SEQ ID NO: 3368 - protein, 46 aa, Homo sapiens
MTEILLERKYRPIPEDVLLRAFEVLDSAKRGFLTKDELIKYMTEEG

SEQ ID NO: 3369 - DNA, 1855 bp, Homo sapiens
gagcaggccgggacaccgcggccgaggttatcgttaggcatctcccaggcgaccggctccgcagcaagatggcggacgagaaggacagggaagagagattggaacaattatcaggtcattaggatgctgtcctacggaaggagagctgcatgatctgattgcagaggtagaggaagaagaacccactggatacattcgattcgaaaaatttcttccggtgatgacagaaatactactagaaagaaaatacagaccaattccagaagatgtccttcttcgagcttttgaggttttagattcagctaaacgtgggtttcttactaaggacgagctgatcaagtatatgactgaagaaggtgagcctttttctcaagaggaaatggaagaaatgttgtctgctgcaattgatccagaatcaaattcaattaattacaaggactatataacaatgatggtgatagatgaaaattaaatgttctaaagataatttctgattgaaagaacaattttagaaattgcttgttcttgttaatttcacatcttatcttaggattcctatatgtgatatttaataccttgtgacataactattttaagacactttgtttttaaagatgatcgtaacactttaaaccaaatttagtatgtctagccttacagaatgataaattactatttatttaaaaactattcttaaaacattttaacattagaatggattgttgtttattttctacaataaaactcaggtcaccttcgaattaattaagctgacaaaatgaaaatgacttaattacccaaggtttggcatgtaaagatcttaagagggggcagaacgaaccactcgaaaacgagtagcagtgtaatgaaggcttcttttttaaacaataacaaatgcttcatcaatctgagtgtggaaggtgatttatcaaaataaatattactaatttatttttttatgagtgccaattacaaatatcatttgggataataataacttagtgtaaacatttatatttgctgatccagcatgtcaccatttatggagtagctaaaggagttgagatcattggaactagagaaaagaaggttgagtggaagttgatagtgtaaggtagtggcaattctccctttgtctttagaattctcacccactccgcatatctgtcatgggagcattgtcctgaatactgagtaagaatactgagaaatgttatggtgtgcaaatgtacagctcctgaaagagcagaatgaagcacaagcagtcacaatggaaaaatatatggcatggccactgcctcctccttgcaattctctccgatcttggcatcttatatggcaactatatggcaacttacaagcaaaggggaagataaagtaaagggaagtgaacaattttccaaacttagatattctgttataacaagacacacacacacacacacacacacacacacacacgggtctctatttgaagatggcttcaccactatatgtgtgtatctacatagatgtaaacatttagagttgctgtgagccttcctcaggcatgtagtcttgcccccaaaagaggcggctgctacccaagagactgtcgctgttcattcattcatgaaacactgaaggagtaccatgagatgatgtgctgggaaccggagtccctaacgaatccaggtcacagtttagtgagggaagcctgcaaggcagtcagcagccacatttcagataggggcatgttcagggtcccgtgcaagtgccgaagagaggcagctactcagccttgcagggagagagctttctggaagatgaaaggtgctagtgagcggagaaggcttcccaggacaggaagctcctg

SEQ ID NO: 3370 - protein, 83 aa, Homo sapiens [sequence omitted]

SEQ ID NO: 3371 - DNA, 2042 bp, Homo sapiens
ggacaccgcggccgaggttatcgttaggcatctcccaggcgaccggctccgcagcaagatggcggacgagaaggacagggaagggcctgggatacaacagtgatgagataaggcctcggactttactgatcgaacatctaatggaaggtggaagaagagaccatcacacaatgacggtgttatggggaacacaggagataatagtagcagaatttcacaaaaaaatcaaagaggcatttgaagtctttgaccatgagtcgaataatacagtggatgtgagagagattggaacaattatcaggtcattaggatgctgtcctacggaaggagagctgcatgatctgattgcagaggtagaggaagaagaacccactggatacattcgattcgaaaaatttcttccggtgatgacagaaatactactagaaagaaaatacagaccaattccagaagatgtccttcttcgagcttttgaggttttagattcagctaaacgtgggtttcttactaaggacgagctgatcaagtatatgactgaagaaggtgagcctttttctcaagaggaaatggaagaaatgttgtctgctgcaattgatccagaatcaaattcaattaattacaaggactatataacaatgatggtgatagatgaaaattaaatgttctaaagataatttctgattgaaagaacaattttagaaattgcttgttcttgttaatttcacatcttatcttaggattcctatatgtgatatttaataccttgtgacataactattttaagacactttgtttttaaagatgatcgtaacactttaaaccaaatttagtatgtctagccttacagaatgataaattactatttatttaaaaactattcttaaaacattttaacattagaatggattgttgtttattttctacaataaaactcaggtcaccttcgaattaattaagctgacaaaatgaaaatgacttaattacccaaggtttggcatgtaaagatcttaagagggggcagaacgaaccactcgaaaacgagtagcagtgtaatgaaggcttcttttttaaacaataacaaatgcttcatcaatctgagtgtggaaggtgatttatcaaaataaatattactaatttatttttttatgagtgccaattacaaatatcatttgggataataataacttagtgtaaacatttatatttgctgatccagcatgtcaccatttatggagtagctaaaggagttgagatcattggaactagagaaaagaaggttgagtggaagttgatagtgtaaggtagtggcaattctccctttgtctttagaattctcacccactccgcatatctgtcatgggagcattgtcctgaatactgagtaagaatactgagaaatgttatggtgtgcaaatgtacagctcctgaaagagcagaatgaagcacaagcagtcacaatggaaaaatatatggcatggccactgcctcctccttgcaattctctccgatcttggcatcttatatggcaactatatggcaacttacaagcaaaggggaagataaagtaaagggaagtgaacaattttccaaacttagatattctgttataacaagacacacacacacacacacacacacacacacacacgggtctctatttgaagatggcttcaccactatatgtgtgtatctacatagatgtaaacatttagagttgctgtgagccttcctcaggcatgtagtcttgcccccaaaagaggcggctgctacccaagagactgtcgctgttcattcattcatgaaacactgaaggagtaccatgagatgatgtgctgggaaccggagtccctaacgaatccaggtcacagtttagtgagggaagcctgcaaggcagtcagcagccacatttcagataggggcatgttcagggtcccgtgcaagtgccgaagagaggcagctactcagccttgcagggagagagctttctggaagatgaaaggtgctagtgagcggagaaggcttcccaggacaggaagctcctg

SEQ ID NO: 3372 - protein, 172 aa, Homo sapiens
MEGGRRDHHTMTVLWGTQEIIVAEFHKKIKEAFEVFDHESNNTVDVREIGTIIRSLGCCPTEGELHDLIAEVEEEEPTGYIRFEKFLPVMTEILLERKYRPIPEDVLLRAFEVLDSAKRGFLTKDELIKYMTEEGEPFSQEEMEEMLSAAIDPESNSINYKDYITMMVIDEN

SEQ ID NO: 3373 - DNA, 1389 bp, Homo sapiens
atctcccaggcgaccggctccgcagcaagatggcggacgagaaggacagggaagagagattggaacaattatcaggtcattaggatgctgtcctacggaaggagagctgcatgatctgattgcagaggtagaggaagaagaacccactggatacattcgattcgaaaaatttcttccggtgatgacagaaatactactagaaagaaaatacagaccaattccagaagatgtccttcttcgagcttttgaggttttagattcagctaaacgtgggtttcttactaaggacgagctgatcaagtatatgactgaagaagatggagtttcgctccgtcgcccaggctgaagtgcagtggcgtgatcttggctcgttgcaacctccacctcccgggttcaagagattctcctgcctcagcctcctgagcagctgggatgacaggcacacaccaccacgcctggctaatttctgtatttttagtagagacggggtttcaccatggtctggtgacctcctggtctcgaactcctgacctcaagtgatcctcccgcctcagcctcccaaagttctgggattacaggcatgagccaccgcacccggctgcttccttaactcttgatctcctctctgtatcttgctttgtctagctgttctcttctctccatattcatccaaacatttgcttagaagtacccagaagcatggcgttgaatgtggtacaccttgaacgaagggtgaagaaacgaggcagagtgacttagtagcaagtgacagcacacagtttaaattttaatattagcccatttacaaacaacagcttatataatagtcattcacatacctcaacactcaccatcccctccccactttttttctggagacagggtttcactgtcaccccagctggaatgcaggtggcatgatcacagctcactgtagcatcgacctcctggactcaaggggtcctcgcgcctcagcctcctgagtagctgggaccacaggtgcatgccaccacgcccagctaatgtttttttttattttttgtagagacagggtctggctatgttgcttaggctggtctcaaactcctgggttcaagcgatcctgccacctcagcctcccaaagtgttaggattacagatgtgagccactgtgcccagccaacattcaccccattcaagtgtgcaattcaatggattctagtatcttcacagtgctgtgcaactatcactcctatctacttacaaagcatttccatcatcttaaaaagaatccccatgtccaatagcagttccccttcccccaccgtcatcctcgggcaaccgctaatcttcctgtgtgtctgtggatttgcctcttcagggcatttcacataaacacaatcatacaat

SEQ ID NO: 3374 - protein, 70 aa, Homo sapiens
MEFRSVAQAEVQWRDLGSLQPPPPGFKRFSCLSLLSSWDDRHTPPRLANFCIFSRDGVSPWSGDLLVSNS

SEQ ID NO: 3375 - DNA, 361 bp, Homo sapiens
tacaacagtgatgagataaggcctcggactttactgatcgaacatctaatggaaggtggaagaagagaccatcacacaatgacggtgttatggggaacacaggagataatagtagcagaatttcacaaaaaaatcaaagaggcatttgaagtctttgaccatgagtcgaataatacagtggatgtgagattcttcctattttgctcccgactgatttgatcctgctgtgtgtctcctactcctttgcgtctacctcctcatgggttcagatgctttgtgattctgcacctgccttctctctctgtgccgttcctcttccatctctcttccatctgtatgtcttgctttaaaactcccaagg

SEQ ID NO: 3376 - protein, 56 aa, Homo sapiens
MEGGRRDHHTMTVLWGTQEIIVAEFHKKIKEAFEVFDHESNNTVDVRFFLFCSRLI

SEQ ID NO: 3377 - DNA, 1887 bp, Homo sapiens
agagataatagtagcagaatttcacaaaaaaatcaaagaggcatttgaagtctttgaccatgagtcgaataatacagtggatgtgagagagattggaacaattatcaggtcattaggatgctgtcctacggaaggagagctgcatgatctgattgcagaggaggagaagccaggcgtatcagggccttggttttccaggtagaggaagaagaacccactggatacattcgattcgaaaaatttcttccggtgatgacagaaatactactagaaagaaaatacagaccaattccagaagatgtccttcttcgagcttttgaggttttagattcagctaaacgtgggtttcttactaaggacgagctgatcaagtatatgactgaagaaggtgagcctttttctcaagaggaaatggaagaaatgttgtctgctgcaattgatccagaatcaaattcaattaattacaaggactatataacaatgatggtgatagatgaaaattaaatgttctaaagataatttctgattgaaagaacaattttagaaattgcttgttcttgttaatttcacatcttatcttaggattcctatatgtgatatttaataccttgtgacataactattttaagacactttgtttttaaagatgatcgtaacactttaaaccaaatttagtatgtctagccttacagaatgataaattactatttatttaaaaactattcttaaaacattttaacattagaatggattgttgtttattttctacaataaaactcaggtcaccttcgaattaattaagctgacaaaatgaaaatgacttaattacccaaggtttggcatgtaaagatcttaagagggggcagaacgaaccactcgaaaacgagtagcagtgtaatgaaggcttcttttttaaacaataacaaatgcttcatcaatctgagtgtggaaggtgatttatcaaaataaatattactaatttatttttttatgagtgccaattacaaatatcatttgggataataataacttagtgtaaacatttatatttgctgatccagcatgtcaccatttatggagtagctaaaggagttgagatcattggaactagagaaaagaaggttgagtggaagttgatagtgtaaggtagtggcaattctccctttgtctttagaattctcacccactccgcatatctgtcatgggagcattgtcctgaatactgagtaagaatactgagaaatgttatggtgtgcaaatgtacagctcctgaaagagcagaatgaagcacaagcagtcacaatggaaaaatatatggcatggccactgcctcctccttgcaattctctccgatcttggcatcttatatggcaactatatggcaacttacaagcaaaggggaagataaagtaaagggaagtgaacaattttccaaacttagatattctgttataacaagacacacacacacacacacacacacacacacacacgggtctctatttgaagatggcttcaccactatatgtgtgtatctacatagatgtaaacatttagagttgctgtgagccttcctcaggcatgtagtcttgcccccaaaagaggcggctgctacccaagagactgtcgctgttcattcattcatgaaacactgaaggagtaccatgagatgatgtgctgggaaccggagtccctaacgaatccaggtcacagtttagtgagggaagcctgcaaggcagtcagcagccacatttcagataggggcatgttcagggtcccgtgcaagtgccgaagagaggcagctactcagccttgcagggagagagctttctggaagatgaaaggtgctagtgagcggagaaggcttcccaggacaggaagctcctg

SEQ ID NO: 3378 - protein, 83 aa, Homo sapiens [sequence omitted]

SEQ ID NO: 3379 - DNA, 663 bp, Homo sapiens
gtaactagtgataccactttatgcacagagcaagtaaactccatctttaccatggccaactgtagcaatagagttcagtgttttctatatcacagatagaagaagtaacaaaacttcatccatttcatcttcatatatagtaaggcgaggtgtctgagaggcaggggtgagaaagacaagactggcatgcatggtattgaaatggctgtgaaagggagaagatttgcttatagtagcagggcccaggtagcatgggaattcattacttttatctttaaaggggttagaaacaagtgttcagaggtgccatgcagtaatgaaaccagtccaggagccaggctgtaagtgctgtaattcaagtaagcttttggttaatttaaagggatggtagttacaccagctcctaacccatcgccatcttctgtttcatgtttttgattactgagaagtgacactcaaatgtttattttttcttaaaactactgagtacattttgtaacagctccagtttctactgagagctcatttatgccatatttcctttgctcacataactctaagagtacttctgttttttactgaaagcttgtatttctgtctctgctaagttataaacttactgatgacaaaataaaaaaacaaaaacccaaaaaagaaagcaaa

SEQ ID NO: 3380 - protein, 52 aa, Homo sapiens
MHGIEMAVKGRRFAYSSRAQVAWEFITFIFKGVRNKCSEVPCSNETSPGARL

SEQ ID NO: 3381 - DNA, 1714 bp, Homo sapiens
agagagattggaacaattatcaggtcattaggatgctgtcctacggaaggagagctgcatgatctgattgcagaggtagaggaagaagaacccactggatacattcgattcgaaaaatttcttccggtgatgacagaaatactactagaaagaaaattcagctaaacgtgggtttcttactaaggacgagctgatcaagtatatgactgaagaaggtgagcctttttctcaagaggaaatggaagaaatgttgtctgctgcaattgatccagaatcaaattcaattaattacaaggactatataacaatgatggtgatagatgaaaattaaatgttctaaagataatttctgattgaaagaacaattttagaaattgcttgttcttgttaatttcacatcttatcttaggattcctatatgtgatatttaataccttgtgacataactattttaagacactttgtttttaaagatgatcgtaacactttaaaccaaatttagtatgtctagccttacagaatgataaattactatttatttaaaaactattcttaaaacattttaacattagaatggattgttgtttattttctacaataaaactcaggtcaccttcgaattaattaagctgacaaaatgaaaatgacttaattacccaaggtttggcatgtaaagatcttaagagggggcagaacgaaccactcgaaaacgagtagcagtgtaatgaaggcttcttttttaaacaataacaaatgcttcatcaatctgagtgtggaaggtgatttatcaaaataaatattactaatttatttttttatgagtgccaattacaaatatcatttgggataataataacttagtgtaaacatttatatttgctgatccagcatgtcaccatttatggagtagctaaaggagttgagatcattggaactagagaaaagaaggttgagtggaagttgatagtgtaaggtagtggcaattctccctttgtctttagaattctcacccactccgcatatctgtcatgggagcattgtcctgaatactgagtaagaatactgagaaatgttatggtgtgcaaatgtacagctcctgaaagagcagaatgaagcacaagcagtcacaatggaaaaatatatggcatggccactgcctcctccttgcaattctctccgatcttggcatcttatatggcaactatatggcaacttacaagcaaaggggaagataaagtaaagggaagtgaacaattttccaaacttagatattctgttataacaagacacacacacacacacacacacacacacacacacgggtctctatttgaagatggcttcaccactatatgtgtgtatctacatagatgtaaacatttagagttgctgtgagccttcctcaggcatgtagtcttgcccccaaaagaggcggctgctacccaagagactgtcgctgttcattcattcatgaaacactgaaggagtaccatgagatgatgtgctgggaaccggagtccctaacgaatccaggtcacagtttagtgagggaagcctgcaaggcagtcagcagccacatttcagataggggcatgttcagggtcccgtgcaagtgccgaagagaggcagctactcagccttgcagggagagagctttctggaagatgaaaggtgctagtgagcggagaaggcttcccaggacaggaagctcctg

SEQ ID NO: 3382 - protein, 42 aa, Homo sapiens [sequence omitted]

SEQ ID NO: 3383 - DNA, 722 bp, Homo sapiens
ggctacgtcaaggagtcggtcctgagagcagcgaggcaggagtgaggtcgagtgggcaggcgtgagagccgagcacaggggcagaaaggaagactctgcacccagaaagcggaaaggagatggagtttcgctccgtcgcccaggctgaagtgcagtggcgtgatcttggctcgttgcaacctccacctcccgggttcaagagattctcctgcctcagcctcctgagcagctgggatgacaggcacacaccaccacgcctggctaatttctgtatttttagtagagacggggtttcaccatggtctggtgacctcctggtctcgaactcctgacctcaagtgatcctcccgcctcagcctcccaaagttctgggattacaggcatgagccaccgcacccggctgcttccttaactcttgatctcctctctgtatcttgctttgtctagctgttctcttctctccatattcatccaaacatttgcttagaagtacccagaagcatggcgttgaatgtggtacaccttgaacgaagggtgaagaaacgaggcagagtgacttagtagcaagtgacagcacacagtttaaattttaatattagcccatttacaaacaacagcttatataatagtcattcacatacctcaacactcaccatcccctccccactttttttctggagacagggtttcactgtcaccccagctggaatgcaggtggcatg

SEQ ID NO: 3384 - protein, 70 aa, Homo sapiens; identical to SEQ ID NO: 3374

SEQ ID NO: 3385 - DNA, 375 bp, Homo sapiens
tagagcacagactatatcgtcacgttactctgttgtcttctcattgttcaattcagcagcattttagaaggcccgctgtgtgctctgcactgtgctaagtactgcgagaaacagaaaagttgaagacgtggttattgtctgaaatggcagctcctgggaaaaagtgccgtagaaagaggagctggctatagaaaatatggtaatttctaacctaaaattaatatgccactgtaatcccagctactcaggaggctgaggcaggagaatcgcttgagccccaggaggcggaggttgtggtaagccaagatcgcaccactgcactccagcctgggcaacaagagcaaaacgccatctcaaaaaaagaaaagaaaagaa

SEQ ID NO: 3386 - protein, 50 aa, Homo sapiens
YATVIPATQEAEAGESLEPQEAEVVVSQDRTTALQPGQQEQNAISKKEKK

SEQ ID NO: 3387 - DNA, 724 bp, Homo sapiens
acacccgtgctggccagtctgcaggttgctgacccgccgttaagggacacaggccatactacacttgctagaaaaactgaggcaggaaaaagaggtgcaaggcactgggggaagagcaggtacctatagctttaaagctcagtgttgaaggggtaatccttgcaggaggcacagctcaccaagacacagaccctcccgttcctgttgtagctgactacagtggtcacatcaggctgctcagttgaaagtcgaagtcctccaagttttcagcagtgcgttccagcatcaccaccgaaatgatgataggaattaccaccaaattcctatgcatgggaaaccagatcagaacctgggctgcgtttttatttgtttattttttttactgtgcttggctgtgattgctttggtgctgggatcccccagacctgtcacgagagctgaggggactacaggcagtcaccaccttgcctttggattggcagccctggattaacttctcctgaggtgggtgcaggtggcactcactgtggttaaccactgtttttaagccaggtttctttttttctgtctgtcatatatatatatatatatttagagacagggtctcactctatcactcaggcctggatgagctatgatcgcaccactgcactccagctttgggctaaagagcaagaccacatcttgaaaataaaataaaaaataaaaaagagaaataataacc

SEQ ID NO: 3388 - protein, 55 aa, Homo sapiens
MHGKPDQNLGCVFICLFFLLCLAVIALVLGSPRPVTRAEGTTGSHHLAFGLAALD

SEQ ID NO: 3389 - DNA, 3994 bp, Homo sapiens
agttaccaagctcggtgaaggagacaagttcccacagctgactcggctcggctctcccaccttcccggcagcggccgcgagccctgattgtatccctcgctttcctcgtgggggagcacggactgacttggctgaagaaaatgccagttctgtggatgtggccgtgacaagaggacgtgcggctggaagaggcagaaggggacgaggaaaagcatgctttgaagagaagaataaaccagcgaccccaaccctttctgcaaattggtgctattacttgtgggatccatttgctttcattccctcccaccccaccgctgaagaaaccttgccctgagggctgagagccagccccctgcagccgggggacgcttctgggttggaggaccttctggatgtagcgtcggtggaacctttagatactctcctctggaaaagccaccatgaattcggtagctgggaataaagagaggcttgcggtctccaccaggggcaagaaatacggggtgaatgaagtctgctcgcccaccaagcccgcagcgcccttctccccggaaagctggtaccggaaagcatacgaggagtcgcgcgccggcagccggcccactcctgagggcgcgggctcagcgctcggctcctcggggaccccgtctcccggctcgggcacctcgtccccgagctcgttcaccggctccccgggacccgcctcccccggcatcggcactagttcgccgggctccttgggcggctctccgggcttcggcacaggctccccgggctccggcagcggcggcggctcctcccccggctcggaccgcggcgtctggtgcgagaactgcaacgcccgcctggtggagctcaagaggcaggccctgaggttgctcctcccggggcccttcccgggcaaggaccctgctttctcggctgtgattcacgacaaactccaggtccccaacaccatccggaaggcatggaacgaccgggacaaccgctgtgacatttgcgccactcacctgaaccagttgaagcaggaggccatccagatggtgctgacgttggagcaggcagccggcagtgagcactacgacgcctcgccctgctccccgccaccgctctccaacatccccaccctggtggggtcccggcacgtgggtgggctccagcagcccagagactgggcctttgtgcccgccccctgtgccacctccaactacacaggcttcgccaacaagcacggcagcaaacccagcagccttggggtcagcaatggggcggaaaagaagagcgggtccccaacccaccaggccaaggtcagcctccagatggccaccagtccaagcaatgggaacatcctcaattcggtggccatccaggctcaccagtacctggatggcacctggtccctgtcgagaaccaacggggtcaccctgtacccataccagatctcccagctgatgacagagagtagccgggagggactaacagaagcacggccacggcagcgacaacagcagcgtgctgagcggggagctcccgccggccatggggaagacggccctgttctaccacagcggcggcagcagcggctacgagagcgtgatgcgggacagcgaggccaccggcagcgcgtcctcggcgcaggactccacgagcgagaacagcagctccgtgggcggcaggtgccggagcctcaagaccccgaagaaacgctccaatccaggttctcagagacggaggcttatcccagcactatccctggacacctcttcccctgtgagaaaaccccccaacagcacaggcgtccgctgggtggatggccccttgcggagcagcccgaggggccttggggaaccctttgagattaaagtctatgaaatcgatgacgtggagcgcctgcagcggcgacgagggggtgccagcaaggaggccatgtgcttcaatgcaaagctgaagattctggaacaccgccagcagaggatcgccgaggtccgcgcgaagtacgagtggctgatgaaggagctggaggcgaccaaacagtatctgatgctggatcccaacaagtggctcagtgaatttgacttggagcaggtttgggagctggattccctggagtacctggaggcactggagtgtgtgacggagcgcctggagagccgtgtcaacttctgcaaggcccatctcatgatgatcacctgcttcgacatcacctccaggcgccggtagatgagccagacccttgtcctagtggtcccccgctccccaggacttcagagatgttgcacgcccctaggccctctgtgctggggcatcaaagacaatgaatgaggatgaaggttggtggcaagtctggagcgggcgttgagcggaaggcgagttttcttttgttttctgtaggaaaggtgcaaacgtcaaacaccgtggaaggagaaaaggatgggaagcccgaggggtgtccaagccctgtgagactgaaaaagcactttgaggaaccttaaagaccttgtttgtacataagaactgctagcaaaagagacctcactcttctcttgctttcgtgagaaaggaggggcgtggatgtaggattgctgtggaaagcgaacacaaaacaacccagaatgactgattaagtgccttgcaaatctttattattatccaaacatttatgttcatactttcttgtgtacagatggtgctagtcaagatgaaaacaacaaaacaaacaagaaaaacattttggaaatgtattcacagctctttttctcttggtgttttatcctatttctgacttgctgtttctaagtaagttgtgtttgtagagctatttcttaatcagtattgcttatgaataaatattacctgtcttttatggttattctggtgaggccactcaaacagagagacttccctcggcacgagccagtgtgtgtgtttccaaagtaggtttggagcagcaggtgacctcgatgccacatcccaacaagcagcgtggtcaggtagacccagaaggttgattgtggggcaggtgctttagagaacaggtgaggagacggcacctgcagcacaggggaggaggagtcctttgcgacctgggccctccctgctcctgggaggtgggccgtatgttctgtagaccgtttgcccccctcaagtcctccacacatgtggttccttgacccacaaatccacagtttgcgtggccctcaaaattcatattcatttttattccaaaaagtcttgaacgaaagctggaaccaattcaccagagccatatttctttctttagtattttctagtgttgtgttgtagattgattaaagtgggtttttccccagctgagagaccttctcaggcttgttcagagacttcaactgtattggattagaagaaggattcttgagactgtacatcttgtctgttgtccagagtacaaggatttcagctctcctgtgtcccaaagcctctatgccaagaagggacaggcttgtcctctcagtctttgctcctgcccaaaggcagagagagcttcccctccataactcacacgaccctggataggcagaacatagctgaagactatggatgtccaggtcttggctcccaacaactcaggacctcaaattcagatgttcctccctataacaattcccttaggaattatgatacccattttagtgattgatagaaacctggggtacagagtggtcaagggatttccctgataaaagctgtggtgctgatgatagtgcagcccagaatctaagagtccctgcagccttcgcatcgaggatggtacttaggcgtgtgcagagcacgcttcccttttgccctcaaatgcagcatatcttcatgagcctatttatttccaagctaggctgtctttattaaccaacaactcagccccagccactccccaagcggggaaaaaaacactacgtttcttggtcagtgtacctctggacactgcagcccacacagctggctgaactcggtaaatggg

SEQ ID NO: 3390 - protein, 471 aa, Homo sapiens
MNSVAGNKERLAVSTRGKKYGVNEVCSPTKPAAPFSPESWYRKAYEESRAGSRPTPEGAGSALGSSGTPSPGSGTSSPSSFTGSPGPASPGIGTSSPGSLGGSPGFGTGSPGSGSGGGSSPGSDRGVWCENCNARLVELKRQALRLLLPGPFPGKDPAFSAVIHDKLQVPNTIRKAWNDRDNRCDICATHLNQLKQEAIQMVLTLEQAAGSEHYDASPCSPPPLSNIPTLVGSRHVGGLQQPRDWAFVPAPCATSNYTGFANKHGSKPSSLGVSNGAEKKSGSPTHQAKVSLQMATSPSNGNILNSVAIQAHQYLDGTWSLSRTNGVTLYPYQISQLMTESSREGLTEARPRQRQQQRAERGAPAGHGEDGPVLPQRRQQRLRERDAGQRGHRQRVLGAGLHEREQQLRGRQVPEPQDPEETLQSRFSETEAYPSTIPGHLFPCEKTPQQHRRPLGGWPLAEQPEGPWGTL

SEQ ID NO: 3391 - DNA, 461 bp, Homo sapiens
aggatgaagccaaggaagaagagaagagaggaaggacacgcccattaaccaaaggacccaaaacatatctcaaggagctcatgaagtcatcctcatgcacacagtttcccaggtgtcagatctgtttgggccacaaacctaagaagaacatcatgtgaggatgaaggcagagagcagggtgatgcagctgaagccaaggacactgaagacttcctgcaaacccccagaagctggggcagaggccctccagtctccagaagaggccaaccatgctgataccttgaccttggactcctagccccagaactatgagaaataaatttctgttatttaagtcactcagttgtcttacttggttgtggcagccctgagaggctaattctcagcgctttctctgaatgtcctcaacactctcctggttctcctcctgcctcaaaagcactcctcagctggttcctttc

SEQ ID NO: 3392 - protein, 45 aa, Homo sapiens
MKAESRVMQLKPRTLKTSCKPPEAGAEALQSPEEANHADTLTLDS

SEQ ID NO: 3393 - DNA, 6247 bp, Homo sapiens
cgcccaggcagatgcgatccagcggctctgggggcggcagcggtggtagcagctggtacctcccgccgcctctgttcggagggtcgcggggcaccgaggtgctttccggccgccctctggtcggccacccaaagccgcgggcgctgatgatgggtgaggagggggcggcaagatttcgggcgcccctgccctgaacgccctcagctgctgccgccggggccgctccagtgcctgcgaactctgaggagccgaggcgccggtgagagcaaggacgctgcaaacttgcgcagcgcgggggctgggattcacgcccagaagttcagcaggcagacagtccgaagccttcccgcagcggagagatagcttgagggtgcgcaagacggcagcctccgccctcggttcccgcccagaccgggcagaagagcttggaggagccaaaaggaacgcaaaaggcggccaggacagcgtgcagcagctgggagccgccgttctcagccttaaaagttgcagagattggaggctgccccgagaggggacagaccccagctccgactgcggggggcaggagaggacggtacccaactgccacctcccttcaaccatagtagttcctctgtaccgagcgcagcgagctacagacgggggcgcggcactcggcgcggagagcgggaggctcaaggtcccagccagtgagcccagtgtgcttgagtgtctctggactcgcccctgagcttccaggtctgtttcatttagactcctgctcgcctccgtgcagttgggggaaagcaagagacttgcgcgcacgcacagtcctctggagatcaggtggaaggagccgctgggtaccaaggactgttcagagcctcttcccatctcggggagagcgaagggtgaggctgggcccggagagcagtgtaaacggcctcctccggcgggatgggagccatcgggctcctgtggctcctgccgctgctgctttccacggcagctgtgggctccgggatggggaccggccagcgcgcgggctccccagctgcggggccgccgctgcagccccgggagccactcagctactcgcgcctgcagaggaagagtctggcagttgacttcgtggtgccctcgctcttccgtgtctacgcccgggacctactgctgccaccatcctcctcggagctgaaggctggcaggcccgaggcccgcggctcgctagctctggactgcgccccgctgctcaggttgctggggccggcgccgggggtctcctggaccgccggttcaccagccccggcagaggcccggacgctgtccagggtgctgaagggcggctccgtgcgcaagctccggcgtgccaagcagttggtgctggagctgggcgaggaggcgatcttggagggttgcgtcgggccccccggggaggcggctgtggggctgctccagttcaatctcagcgagctgttcagttggtggattcgccaaggcgaagggcgactgaggatccgcctgatgcccgagaagaaggcgtcggaagtgggcagagagggaaggctgtccgcggcaattcgcgcctcccagccccgccttctcttccagatcttcgggactggtcatagctccttggaatcaccaacaaacatgccttctccttctcctgattattttacatggaatctcacctggataatgaaagactccttccctttcctgtctcatcgcagccgatatggtctggagtgcagctttgacttcccctgtgagctggagtattcccctccactgcatgacctcaggaaccagagctggtcctggcgccgcatcccctccgaggaggcctcccagatggacttgctggatgggcctggggcagagcgttctaaggagatgcccagaggctcctttctccttctcaacacctcagctgactccaagcacaccatcctgagtccgtggatgaggagcagcagtgagcactgcacactggccgtctcggtgcacaggcacctgcagccctctggaaggtacattgcccagctgctgccccacaacgaggctgcaagagagatcctcctgatgcccactccagggaagcatggttggacagtgctccagggaagaatcgggcgtccagacaacccatttcgagtggccctggaatacatctccagtggaaaccgcagcttgtctgcagtggacttctttgccctgaagaactgcagtgaaggaacatccccaggctccaagatggccctgcagagctccttcacttgttggaatgggacagtcctccagcttgggcaggcctgtgacttccaccaggactgtgcccagggagaagatgagagccagatgtgccggaaactgcctgtgggtttttactgcaactttgaagatggcttctgtggctggacccaaggcacactgtcaccccacactcctcaatggcaggtcaggaccctaaaggatgcccggttccaggaccaccaagaccatgctctattgctcagtaccactgatgtccccgcttctgaaagtgctacagtgaccagtgctacgtttcctgcaccgatcaagagctctccatgtgagctccgaatgtcctggctcattcgtggagtcttgaggggaaacgtgtccttggtgctagtggagaacaaaaccgggaaggagcaaggcaggatggtctggcatgtcgccgcctatgaaggcttgagcctgtggcagtggatggtgttgcctctcctcgatgtgtctgacaggttctggctgcagatggtcgcatggtggggacaaggatccagagccatcgtggcttttgacaatatctccatcagcctggactgctacctcaccattagcggagaggacaagatcctgcagaatacagcacccaaatcaagaaacctgtttgagagaaacccaaacaaggagctgaaacccggggaaaattcaccaagacagacccccatctttgaccctacagttcattggctgttcaccacatgtggggccagcgggccccatggccccacccaggcacagtgcaacaacgcctaccagaactccaacctgagcgtggaggtggggagcgagggccccctgaaaggcatccagatctggaaggtgccagccaccgacacctacagcatctcgggctacggagctgctggcgggaaaggcgggaagaacaccatgatgcggtcccacggcgtgtctgtgctgggcatcttcaacctggagaaggatgacatgctgtacatcctggttgggcagcagggagaggacgcctgccccagtacaaaccagttaatccagaaagtctgcattggagagaacaatgtgatagaagaagaaatccgtgtgaacagaagcgtgcatgagtgggcaggaggcggaggaggagggggtggagccacctacgtatttaagatgaaggatggagtgccggtgcccctgatcattgcagccggaggtggtggcagggcctacggggccaagacagacacgttccacccagagagactggagaataactcctcggttctagggctaaacggcaattccggagccgcaggtggtggaggtggctggaatgataacacttccttgctctgggccggaaaatctttgcaggagggtgccaccggaggacattcctgcccccaggccatgaagaagtgggggtgggagacaagagggggtttcggagggggtggaggggggtgctcctcaggtggaggaggcggaggatatataggcggcaatgcagcctcaaacaatgaccccgaaatggatggggaagatggggtttccttcatcagtccactgggcatcctgtacaccccagctttaaaagtgatggaaggccacggggaagtgaatattaagcattatctaaactgcagtcactgtgaggtagacgaatgtcacatggaccctgaaagccacaaggtcatctgcttctgtgaccacgggacggtgctggctgaggatggcgtctcctgcattgtgtcacccaccccggagccacacctgccactctcgctgatcctctctgtggtgacctctgccctcgtggccgccctggtcctggctttctccggcatcatgattgtgtaccgccggaagcaccaggagctgcaagccatgcagatggagctgcagagccctgagtacaagctgagcaagctccgcacctcgaccatcatgaccgactacaaccccaactactgctttgctggcaagacctcctccatcagtgacctgaaggaggtgccgcggaaaaacatcaccctcattcggggtctgggccatggcgcctttggggaggtgtatgaaggccaggtgtccggaatgcccaacgacccaagccccctgcaagtggctgtgaagacgctgcctgaagtgtgctctgaacaggacgaactggatttcctcatggaagccctgatcatcagcaaattcaaccaccagaacattgttcgctgcattggggtgagcctgcaatccctgccccggttcatcctgctggagctcatggcggggggagacctcaagtccttcctccgagagacccgccctcgcccgagccagccctcctccctggccatgctggaccttctgcacgtggctcgggacattgcctgtggctgtcagtatttggaggaaaaccacttcatccaccgagacattgctgccagaaactgcctcttgacctgtccaggccctggaagagtggccaagattggagacttcgggatggcccgagacatctacagggcgagctactatagaaagggaggctgtgccatgctgccagttaagtggatgcccccagaggccttcatggaaggaatattcacttctaaaacagacacatggtcctttggagtgctgctatgggaaatcttttctcttggatatatgccataccccagcaaaagcaaccaggaagttctggagtttgtcaccagtggaggccggatggacccacccaagaactgccctgggcctgtataccggataatgactcagtgctggcaacatcagcctgaagacaggcccaactttgccatcattttggagaggattgaatactgcacccaggacccggatgtaatcaacaccgctttgccgatagaatatggtccacttgtggaagaggaagagaaagtgcctgtgaggcccaaggaccctgagggggttcctcctctcctggtctctcaacaggcaaaacgggaggaggagcgcagcccagctgccccaccacctctgcctaccacctcctctggcaaggctgcaaagaaacccacagctgcagagatctctgttcgagtccctagagggccggccgtggaagggggacacgtgaatatggcattctctcagtccaaccctccttcggagttgcacaaggtccacggatccagaaacaagcccaccagcttgtggaacccaacgtacggctcctggtttacagagaaacccaccaaaaagaataatcctatagcaaagaaggagccacacgacaggggtaacctggggctggagggaagctgtactgtcccacctaacgttgcaactgggagacttccgggggcctcactgctcctagagccctcttcgctgactgccaatatgaaggaggtacctctgttcaggctacgtcacttcccttgtgggaatgtcaattacggctaccagcaacagggcttgcccttagaagccgctactgcccctggagctggtcattacgaggataccattctgaaaagcaagaatagcatgaaccagcctgggccctgagctcggtcgcacactcacttctcttccttgggatccctaagaccgtggaggagagagaggcaatggctccttcacaaaccagagaccaaatgtcacgttttgttttgtgccaacctattttgaagtaccaccaaaaaagctgtattttgaaaatgctttagaaaggttttgagcatgggttcatcctattctttcgaaagaagaaaatatcataaaaatgagtgataaatacaaggcccagatgtggttgcataaggtttttatgcatgtttgttgtatacttccttatgcttctttcaaattgtgtgtgctctgcttcaatgtagtcagaattagctgcttctatgtttcatagttggggtcatagatgtttccttgccttgttgatgtggacatgagccatttgaggggagagggaacggaaataaaggagttatttgtaatgact

SEQ ID NO: 3394 - protein, 1620 aa, Homo sapiens; identical to SEQ ID NO: 261

SEQ ID NO: 3395 - DNA, 612 bp, Homo sapiens
ctccccttgaatctaggcaggcttgtgactgtttgactaatagtgtgtggcagaaatgacccaggatgacttctgagcataggacagaaaaggtcgtgcagctttctcctgattcttgagatgcacttgaccacagtcctgacaaggtagtgttagctaagggcaatcttccttctttctcttcccttgtgggaggaagtggacatggctggggccataggcctgagttttgagttacatctctttttctgtttagtctcttataaaagggctaacaaagatgaaggtacaggcaaatagataggtatagggccagggtactacacatgcatgatggattattcttagttaactggctgaaatgtacacttgacttttcaacaacccctgcacagttgaccctttacacagtcaaaaatccaagtagaacatttgacttcccaaaaacataactactattatgattaaccactaatagcatactgttgactgaaagtcttactgataacataaacagtcagttaacacatactttgcatattatgtgtattttatactgtgttcttacaataaaataagccagaggaaaggaaatgttattaacacaactat

SEQ ID NO: 3396 - protein, 41 aa, Homo sapiens
MHDGLFLVNWLKCTLDFSTTPAQLTLYTVKNPSRTFDFPKT

SEQ ID NO: 3397 - DNA, 691 bp, Homo sapiens
gttggtgcagtgggatggctgctgctcttcttcaggctgtcagtagattcagatctgctccatgcatcttcccatcccagtcatacagccaggaacagcaggtgtgagattcaaacttaggtcttcttcactgaaatttccattctattcagttcctcttttattatgttttgagaagatgtgtgctgagctatgagttgggggcttccttccaagacttgagaagtcttctggcctgtgtggcctgaggcaagtctccaataacacagaattgaggcaagggaacggttagctaccaggagaccttggttcttagatggggggacacagctgattaagtcactggcttaagatgagtcgtatatgtgaagcaggactgatggcagctaccctgccacccgctcagagattcagaggggccgtggagagagaatatacgtaaaaattctttgtaaactgtttaacatcattcaaatagatgacaatgttgttggttctctttagaaggaaatgggaacaaacctaactgccattttccctcaacagaggttctgcctgaaaaggcaatcctgtcccctaaaatgtttgttttgagggttctaggacacggcaaagaatatcacgcctataacctttttgtagtagagagtacaacagagaatttcagactcacttttagaaaactcagggc

SEQ ID NO: 3398 - protein, 44 aa, Homo sapiens
MHLPIPVIQPGTAGVRFKLRSSSLKFPFYSVPLLLCFEKMCAEL

SEQ ID NO: 3399 - DNA, 331 bp, Homo sapiens
ctacaggtataaattcagcctgagattccagaatattctgtgtattgaccaccacagcaagaagaaaaagtccatgtaggactgaaatgaggaagaatgagaaggagttgatttctgctgaatccaggagaaagagctttcctcactactaacaagacagaggtgttgaacgagaaatggaaactcatttcccccctcagtttttttctttcttgcgtacttttccaatgccacttccaaattcatagtgaatagcatgattaggaggttttcacatggccctctctgttttttattcctctaaatgatttttaaagttgtccaaggtgaa

SEQ ID NO: 3400 - protein, 47 aa, Homo sapiens
FLLNPGERAFLTTNKTEVLNEKWKLISPLSFFLSCVLFQCHFQIHSE

SEQ ID NO: 3401 - DNA, 602 bp, Homo sapiens
cagagaattgatacaaaaaatgatcatgtgaagaatttgcatcttctgcagaactaccggtatcagtcagcagtaggagattgtataaattcagcctgagattccagaatattctgtgtattgaccaccacagcaagaagaaaaagtccatgtaggactgaaatctgtggtacttctgcggtggcacttcttacacaagtgagaagcagcgacaccgtgacacctgcacgccggagccctgcgttagtgagaagcagcgacaccgtgacacctgcacgccggagccctgcgttagtgagaagcagcgacaccgtgacacctgcacgccggagccctgcgttaggctgggtaagggcggggacctgggcatcacacagtcttagatgtgggcctgcctccaacagctccctcctgggtgtgatgctgaagggggtccttgacacctctgaagtctcagtctcctcaaggtcacacccagcttataggattgtgcttctgtggattaaacaagacacagcagtcctcccttatccatggttctgttttccttggccaaaaatattaaatagaaaattccagaaataaacaatttatgttttaaa

SEQ ID NO: 3402 - protein, 54 aa, Homo sapiens
MLKGVLDTSEVSVSSRSHPAYRIVLLWIKQDTAVLPYPWFCFPWPKILNRKFQK

SEQ ID NO: 3403 - DNA, 1603 bp, Homo sapiens
cgttgaggcccaaccagggagaggcggggccaaggccagggcctgactaaacctggagactcgggtggccgaggggcttcataccagctgaagagcgacaagccgctggcagccgcggatctcaccgccgctcaggagatctgttggtaatctgaggatttttattctacgtcgtcttgacagatggaaaacctgaagtaacttcgggctaaccttgtgtttttggaaaattagtagacttggtggtgaagaaactgggaggagtaggatattagctaactttgcatagccacatatagagcgtcgcagctgcattccaccaaagaggaaccaaaaggcctgtggtgttcccagggtacatattcatgccagaagtgaagtgctttggtgaattcgtttcctgaaagtttatcgcatacttgtactgggttagccttatgccagcctggaccatcttggaggcagtgtaggatcatggaagaactttgaattaggtttttagaacttcagccataaaaatgggcagaattttccttgatcatatcggtggtacccgtctgttttcttgtgcaaactgtgatacgatcctgaccaaccgctcagaactcatctccactcgtttcacaggcgccactggcagagcatttctttttaacaaggtagttaacctgcagtacagtgaagttcaagatcgggtcatgctcactggccgccacatggttcgagatgtgagctgcaaaaactgcaatagcaaactgggatggatctatgagtttgccactgaagacagccagcgatataaggaaggccgcgtgatcctggaacgtgctctagttcgagagagtgagggctttgaggagcatgtaccatctgataactcttgaagatacagagagaaatccatcttttcccaggtctccttcactgaaaacaaaaatctacttacatacactgtcaccttagcatcagagtcggattaatgaactgcggaacaagaggttgtgagaatctaagatggaacctttctttctttctttctttttttttaaattttgtattttccatccaacagcagtgtgtagagagaatattatgcagatgccgttaattttttaccctatgtttacatcttgaggcagcagagtctgtctgcagctatgtggtgagctatgtaaggaaaaaaatctgggctgttagagtgaaaaagtgtgttttatgtcaattgtgaaaggaaaatgttaggagtatggtttttaaacttgggcttcattttaaacttttttttttaaacccagttatttcacttgatttgctagcttcagagaagagatccgaatctgtgcccagcgctaaaggctcagtgttagcatggcttgtgctggccggtgtgccatattcttgttggagatgaaccgtagcaccagagcccattcttccttgtcagtcttggcccaaagatgtcaccattcctagttatttgtcaccacataattggtgttgattggaaactttttctgagatgggacagaactgctgggttgtctttttccatgtaacttaagcatagtaatataaataaagtaatagttggatgcttttggtc

SEQ ID NO: 3404 - protein, 121 aa, Homo sapiens; identical to SEQ ID NO: 263

SEQ ID NO: 3405 - DNA, 2573 bp, Homo sapiens
cgttgaggcccaaccagggagaggcggggccaaggccagggcctgactaaacctggagactcgggtggccgaggggcttcataccagctgaagagcgacaagccgctggcagccgcggatctcaccgccgctcaggagatctgttggtaatctgaggatttttattctacgtcgtcttgacagatggaaaacctgaagtaacttcgggctaaccttgtgtttttggaaaattagtagacttggtggtgaagaaactgggaggagtaggatattagctaactttgcatagccacatatagagcgtcgcagctgcattccaccaaagaggaaccaaaaggcctgtggtgttcccagggtacatattcatgccagaagtgaagtgctttggtgaattcgtttcctgaaagtttatcgcatacttgtactgggttagccttatgccagcctggaccatcttggaggcagtgtaggatcatggaagaactttgaattaggtttttagaacttcagccataaaaatgggcagaattttccttgatcatatcggtggtacccgtctgttttcttgtgcaaactgtgatacgatcctgaccaaccgctcagaactcatctccactcgtttcacaggcgccactggcagagcatttctttttaacaaggtagttaacctgcagtacagtgaagttcaagatcgggtcatgctcactggccgccacatggttcgagatgtgagctgcaaaaactgcaatagcaaactgggatggatctatgagtttgccactgaagacagccagcgatataaggaaggccgcgtgatcctggaacgtgctctagttcgagagagtgagggctttgaggagcatgtaccatctgataactcttgaagatacagagagaaatccatcttttcccaggtctccttcactgaaaacaaaaatctacttacatacactgtcaccttagcatcagagtcggattaatgaactgcggaacaagaggttgtgagaatctaagatggaacctttctttctttctttctttttttttaaattttgtattttccatccaacagcagtgtgtagagagaatattatgcagatgccgttaattttttaccctatgtttacatcttgaggcagcagagtctgtctgcagctatgtggtgagctatgtaaggaaaaaaatctgggctgttagagtgaaaaagtgtgttttatgtcaattgtgaaaggaaaatgttaggagtatggtttttaaacttgggcttcattttaaacttttttttttaaacccagttatttcacttgatttgctagcttcagagaagagatccgaatctgtgcccagcgctaaaggctcagtgttagcatggcttgtgctggccggtgtgccatattcttgttggagatgaaccgtagcaccagagcccattcttccttgtcagtcttggcccaaagatgtcaccattcctagttatttgtcaccacataattggtgttgattggaaactttttctgagatgggacagaactgctgggttgtctttttccatgtaacttaagcatagtaatataaataaagtaatagttggatgcttttggtcctgtgttgcttttaaaaacaccttataaaagaggagagtatttgataagcaattttcatagtagtaaagttttttttcatctcttaaactaaattgaccatgcatataatattctttgtttaaatgaaagcatactgttgaaacccgcagtgttgcatttagaaaacagttgaacagaatgtcaatgtgcattcatgcaaaaaaacatttaatctgcatctgttttagaaaagggggaaatgaagcaacttgtctaaaaatactgctttacaaagcatttcagcctttccccctcagttttgcattgattttttgacaagtctgtagagcctaatagtttccatcaaaggcctagatctcttatttagcatttttttcagctcttctctcagaagttcagctgttgaaacgaaaactgtactttgtaccctcacatacaaagggatcaaatttgacctggtgttattttagccccaaatttatgacattacacaatattaaaatgtaaatgtttctttacccaaactacttctagatattctagtatttgcttctggtggaattaaatgacggtaaaattggctaattatttgaatgaatgaatggatggatgttttgcatgctcaatttctaggtcctttgtctagaaaggaaatttgcctcagttgaattagtgaaatatttctgtcgttgatattaaaagtgacttctgagtacagttaagttcctcctatttgccactgggctgttggttagaagcataggtaactgattaagtaggtatgatactgcatttgaaataagtggacacaaactatcctttctccaccatggactcaatctgagaacaacagcattcatttccattcatttccatactggcttttgattatatgcagattcctagtagcatgccttacctacagcactatgtgcatttgctgtcacaataaagtatattttgtcttgc

SEQ ID NO: 3406 - protein, 121 aa, Homo sapiens; identical to SEQ ID NO: 263

SEQ ID NO: 3407 - DNA, 2904 bp, Homo sapiens
cgttgaggcccaaccagggagaggcggggccaaggccagggcctgactaaacctggagactcgggtggccgaggggcttcataccagctgaagagcgacaagccgctggcagccgcggatctcaccgccgctcaggagatctgttggtaatctgaggatttttattctacgtcgtcttgacagatggaaaacctgaagtaacttcgggctaaccttgtgtttttggaaaattagtagacttggtggtgaagaaactgggaggagtaggatattagctaactttgcatagccacatatagagcgtcgcagctgcattccaccaaagaggaaccaaaaggcctgtggtgttcccagggtacatattcatgccagaagtgaagtgctttggtgaattcgtttcctgaaagtttatcgcatacttgtactgggttagccttatgccagcctggaccatcttggaggcagtgtaggatcatggaagaactttgaattaggtttttagaacttcagccataaaaatgggcagaattttccttgatcatatcggtggtacccgtctgttttcttgtgcaaactgtgatacgatcctgaccaaccgctcagaactcatctccactcgtttcacaggcgccactggcagagcatttctttttaacaaggtagttaacctgcagtacagtgaagttcaagatcgggtcatgctcactggccgccacatggttcgagatgtgagctgcaaaaactgcaatagcaaactgggatggatctatgagtttgccactgaagacagccagcgatataaggaaggccgcgtgatcctggaacgtgctctagttcgagagagtgagggctttgaggagcatgtaccatctgataactcttgaagatacagagagaaatccatcttttcccaggtctccttcactgaaaacaaaaatctacttacatacactgtcaccttagcatcagagtcggattaatgaactgcggaacaagaggttgtgagaatctaagatggaacctttctttctttctttctttttttttaaattttgtattttccatccaacagcagtgtgtagagagaatattatgcagatgccgttaattttttaccctatgtttacatcttgaggcagcagagtctgtctgcagctatgtggtgagctatgtaaggaaaaaaatctgggctgttagagtgaaaaagtgtgttttatgtcaattgtgaaaggaaaatgttaggagtatggtttttaaacttgggcttcattttaaacttttttttttaaacccagttatttcacttgatttgctagcttcagagaagagatccgaatctgtgcccagcgctaaaggctcagtgttagcatggcttgtgctggccggtgtgccatattcttgttggagatgaaccgtagcaccagagcccattcttccttgtcagtcttggcccaaagatgtcaccattcctagttatttgtcaccacataattggtgttgattggaaactttttctgagatgggacagaactgctgggttgtctttttccatgtaacttaagcatagtaatataaataaagtaatagttggatgcttttggtcctgtgttgcttttaaaaacaccttataaaagaggagagtatttgataagcaattttcatagtagtaaagttttttttcatctcttaaactaaattgaccatgcatataatattctttgtttaaatgaaagcatactgttgaaacccgcagtgttgcatttagaaaacagttgaacagaatgtcaatgtgcattcatgcaaaaaaacatttaatctgcatctgttttagaaaagggggaaatgaagcaacttgtctaaaaatactgctttacaaagcatttcagcctttccccctcagttttgcattgattttttgacaagtctgtagagcctaatagtttccatcaaaggcctagatctcttatttagcatttttttcagctcttctctcagaagttcagctgttgaaacgaaaactgtactttgtaccctcacatacaaagggatcaaatttgacctggtgttattttagccccaaatttatgacattacacaatattaaaatgtaaatgtttctttacccaaactacttctagatattctagtatttgcttctggtggaattaaatgacggtaaaattggctaattatttgaatgaatgaatggatggatgttttgcatgctcaatttctaggtcctttgtctagaaaggaaatttgcctcagttgaattagtgaaatatttctgtcgttgatattaaaagtgacttctgagtacagttaagttcctcctatttgccactgggctgttggttagaagcataggtaactgattaagtaggtatgatactgcatttgaaataagtggacacaaactatcctttctccaccatggactcaatctgagaacaacagcattcatttccattcatttccatactggcttttgattatatgcagattcctagtagcatgccttacctacagcactatgtgcatttgctgtcacaataaagtatattttgtcttgcattgatgcagtactgctgcttattttccactgatcttgtctagtgatcatcttaatttttatctctgaacacatacttggtatctttgagtacctgtagctttcttcatttggcaatgatagtgatgtctgacttgattaactgcctaattcacacatgaagacattgactttgccagtattaacttctctgagatcattttgccttagatactgataactatagttcagtatatataaacaaaaaaatttcatattactaggttaacttttaggtaactggcaggtaccagcagcaagctcctctgtgccttttaaaaacttccatttgc

SEQ ID NO: 3408 - protein, 121 aa, Homo sapiens; identical to SEQ ID NO: 263

SEQ ID NO: 3409 - DNA, 1239 bp, Homo sapiens
ggcccaaccagggagaggcggggccaaggccagggcctgactaaacctggagactcgggtggccgaggggcttcataccagctgaagagcgacaagccgctggcagccgcggatctcaccgccgctcagggtttttagaacttcagccataaaaatgggcagaattttccttgatcatatcggtggtacccgtctgttttcttgtgcaaactgtgatacgatcctgaccaaccgctcagaactcatctccactcgtttcacaggcgccactggcagagcatttctttttaacaaggtagttaacctgcagtacagtgaagttcaagatcgggtcatgctcactggccgccacatggttcgagatgtgagctgcaaaaactgcaatagcaaactgggatggatctatgagtttgccactgaagacagccagcgatataaggaaggccgcgtgatcctggaacgtgctctagttcgagagagtgagggctttgaggagcatgtaccatctgataactcttgaagatacagagagaaatccatcttttcccaggtctccttcactgaaaacaaaaatctacttacatacactgtcaccttagcatcagagtcggattaatgaactgcggaacaagaggttgtgagaatctaagatggaacctttctttctttctttctttttttttaaattttgtattttccatccaacagcagtgtgtagagagaatattatgcagatgccgttaattttttaccctatgtttacatcttgaggcagcagagtctgtctgcagctatgtggtgagctatgtaaggaaaaaaatctgggctgttagagtgaaaaagtgtgttttatgtcaattgtgaaaggaaaatgttaggagtatggtttttaaacttgggcttcattttaaacttttttttttaaacccagttatttcacttgatttgctagcttcagagaagagatccgaatctgtgcccagcgctaaaggctcagtgttagcatggcttgtgctggccggtgtgccatattcttgttggagatgaaccgtagcaccagagcccattcttccttgtcagtcttggcccaaagatgtcaccattcctagttatttgtcaccacataattggtgttgattggaaactttttctgagatgggacagaactgctgggttgtctttttccatgtaacttaagcatagtaatataaataaagtaatagttggatgcttttggtc

SEQ ID NO: 3410 - protein, 121 aa, Homo sapiens; identical to SEQ ID NO: 263

SEQ ID NO: 3411 - DNA, 2209 bp, Homo sapiens
ggcccaaccagggagaggcggggccaaggccagggcctgactaaacctggagactcgggtggccgaggggcttcataccagctgaagagcgacaagccgctggcagccgcggatctcaccgccgctcagggtttttagaacttcagccataaaaatgggcagaattttccttgatcatatcggtggtacccgtctgttttcttgtgcaaactgtgatacgatcctgaccaaccgctcagaactcatctccactcgtttcacaggcgccactggcagagcatttctttttaacaaggtagttaacctgcagtacagtgaagttcaagatcgggtcatgctcactggccgccacatggttcgagatgtgagctgcaaaaactgcaatagcaaactgggatggatctatgagtttgccactgaagacagccagcgatataaggaaggccgcgtgatcctggaacgtgctctagttcgagagagtgagggctttgaggagcatgtaccatctgataactcttgaagatacagagagaaatccatcttttcccaggtctccttcactgaaaacaaaaatctacttacatacactgtcaccttagcatcagagtcggattaatgaactgcggaacaagaggttgtgagaatctaagatggaacctttctttctttctttctttttttttaaattttgtattttccatccaacagcagtgtgtagagagaatattatgcagatgccgttaattttttaccctatgtttacatcttgaggcagcagagtctgtctgcagctatgtggtgagctatgtaaggaaaaaaatctgggctgttagagtgaaaaagtgtgttttatgtcaattgtgaaaggaaaatgttaggagtatggtttttaaacttgggcttcattttaaacttttttttttaaacccagttatttcacttgatttgctagcttcagagaagagatccgaatctgtgcccagcgctaaaggctcagtgttagcatggcttgtgctggccggtgtgccatattcttgttggagatgaaccgtagcaccagagcccattcttccttgtcagtcttggcccaaagatgtcaccattcctagttatttgtcaccacataattggtgttgattggaaactttttctgagatgggacagaactgctgggttgtctttttccatgtaacttaagcatagtaatataaataaagtaatagttggatgcttttggtcctgtgttgcttttaaaaacaccttataaaagaggagagtatttgataagcaattttcatagtagtaaagttttttttcatctcttaaactaaattgaccatgcatataatattctttgtttaaatgaaagcatactgttgaaacccgcagtgttgcatttagaaaacagttgaacagaatgtcaatgtgcattcatgcaaaaaaacatttaatctgcatctgttttagaaaagggggaaatgaagcaacttgtctaaaaatactgctttacaaagcatttcagcctttccccctcagttttgcattgattttttgacaagtctgtagagcctaatagtttccatcaaaggcctagatctcttatttagcatttttttcagctcttctctcagaagttcagctgttgaaacgaaaactgtactttgtaccctcacatacaaagggatcaaatttgacctggtgttattttagccccaaatttatgacattacacaatattaaaatgtaaatgtttctttacccaaactacttctagatattctagtatttgcttctggtggaattaaatgacggtaaaattggctaattatttgaatgaatgaatggatggatgttttgcatgctcaatttctaggtcctttgtctagaaaggaaatttgcctcagttgaattagtgaaatatttctgtcgttgatattaaaagtgacttctgagtacagttaagttcctcctatttgccactgggctgttggttagaagcataggtaactgattaagtaggtatgatactgcatttgaaataagtggacacaaactatcctttctccaccatggactcaatctgagaacaacagcattcatttccattcatttccatactggcttttgattatatgcagattcctagtagcatgccttacctacagcactatgtgcatttgctgtcacaataaagtatattttgtcttgc

SEQ ID NO: 3412 - protein, 121 aa, Homo sapiens; identical to SEQ ID NO: 263

SEQ ID NO: 3413 - DNA, 2540 bp, Homo sapiens
ggcccaaccagggagaggcggggccaaggccagggcctgactaaacctggagactcgggtggccgaggggcttcataccagctgaagagcgacaagccgctggcagccgcggatctcaccgccgctcagggtttttagaacttcagccataaaaatgggcagaattttccttgatcatatcggtggtacccgtctgttttcttgtgcaaactgtgatacgatcctgaccaaccgctcagaactcatctccactcgtttcacaggcgccactggcagagcatttctttttaacaaggtagttaacctgcagtacagtgaagttcaagatcgggtcatgctcactggccgccacatggttcgagatgtgagctgcaaaaactgcaatagcaaactgggatggatctatgagtttgccactgaagacagccagcgatataaggaaggccgcgtgatcctggaacgtgctctagttcgagagagtgagggctttgaggagcatgtaccatctgataactcttgaagatacagagagaaatccatcttttcccaggtctccttcactgaaaacaaaaatctacttacatacactgtcaccttagcatcagagtcggattaatgaactgcggaacaagaggttgtgagaatctaagatggaacctttctttctttctttctttttttttaaattttgtattttccatccaacagcagtgtgtagagagaatattatgcagatgccgttaattttttaccctatgtttacatcttgaggcagcagagtctgtctgcagctatgtggtgagctatgtaaggaaaaaaatctgggctgttagagtgaaaaagtgtgttttatgtcaattgtgaaaggaaaatgttaggagtatggtttttaaacttgggcttcattttaaacttttttttttaaacccagttatttcacttgatttgctagcttcagagaagagatccgaatctgtgcccagcgctaaaggctcagtgttagcatggcttgtgctggccggtgtgccatattcttgttggagatgaaccgtagcaccagagcccattcttccttgtcagtcttggcccaaagatgtcaccattcctagttatttgtcaccacataattggtgttgattggaaactttttctgagatgggacagaactgctgggttgtctttttccatgtaacttaagcatagtaatataaataaagtaatagttggatgcttttggtcctgtgttgcttttaaaaacaccttataaaagaggagagtatttgataagcaattttcatagtagtaaagttttttttcatctcttaaactaaattgaccatgcatataatattctttgtttaaatgaaagcatactgttgaaacccgcagtgttgcatttagaaaacagttgaacagaatgtcaatgtgcattcatgcaaaaaaacatttaatctgcatctgttttagaaaagggggaaatgaagcaacttgtctaaaaatactgctttacaaagcatttcagcctttccccctcagttttgcattgattttttgacaagtctgtagagcctaatagtttccatcaaaggcctagatctcttatttagcatttttttcagctcttctctcagaagttcagctgttgaaacgaaaactgtactttgtaccctcacatacaaagggatcaaatttgacctggtgttattttagccccaaatttatgacattacacaatattaaaatgtaaatgtttctttacccaaactacttctagatattctagtatttgcttctggtggaattaaatgacggtaaaattggctaattatttgaatgaatgaatggatggatgttttgcatgctcaatttctaggtcctttgtctagaaaggaaatttgcctcagttgaattagtgaaatatttctgtcgttgatattaaaagtgacttctgagtacagttaagttcctcctatttgccactgggctgttggttagaagcataggtaactgattaagtaggtatgatactgcatttgaaataagtggacacaaactatcctttctccaccatggactcaatctgagaacaacagcattcatttccattcatttccatactggcttttgattatatgcagattcctagtagcatgccttacctacagcactatgtgcatttgctgtcacaataaagtatattttgtcttgcattgatgcagtactgctgcttattttccactgatcttgtctagtgatcatcttaatttttatctctgaacacatacttggtatctttgagtacctgtagctttcttcatttggcaatgatagtgatgtctgacttgattaactgcctaattcacacatgaagacattgactttgccagtattaacttctctgagatcattttgccttagatactgataactatagttcagtatatataaacaaaaaaatttcatattactaggttaacttttaggtaactggcaggtaccagcagcaagctcctctgtgccttttaaaaacttccatttgc

SEQ ID NO: 3414 - protein, 121 aa, Homo sapiens; identical to SEQ ID NO: 263

SEQ ID NO: 3415 - DNA, 1522 bp, Homo sapiens
gaggcggggccaaggccagggcctgactaaacctggagactcgggtggccgaggggcttcataccagctgaagagcgacaagccgctggcagccgcggatctcaccgccgctcaggagatctgttggtaatctgaggatttttattctacgtcgtcttgacagatggaaaacctgaagtaacttcgggctaaccttgtgtttttggaaaattagtagacttggtggtgaagaaactgggaggagtaggatattagctaactttgcatagccacatatagagcgtcgcagctgcattccaccaaagaggaaccaaaaggcctgtggtgttcccagggtacatattcatgccagaagtgaagtgctttggtgaattcgtttcctgaaagtttatcgcatacttgtactgggttaggtttttagaacttcagccataaaaatgggcagaattttccttgatcatatcggtggtacccgtctgttttcttgtgcaaactgtgatacgatcctgaccaaccgctcagaactcatctccactcgtttcacaggcgccactggcagagcatttctttttaacaaggtagttaacctgcagtacagtgaagttcaagatcgggtcatgctcactggccgccacatggttcgagatgtgagctgcaaaaactgcaatagcaaactgggatggatctatgagtttgccactgaagacagccagcgatataaggaaggccgcgtgatcctggaacgtgctctagttcgagagagtgagggctttgaggagcatgtaccatctgataactcttgaagatacagagagaaatccatcttttcccaggtctccttcactgaaaacaaaaatctacttacatacactgtcaccttagcatcagagtcggattaatgaactgcggaacaagaggttgtgagaatctaagatggaacctttctttctttctttctttttttttaaattttgtattttccatccaacagcagtgtgtagagagaatattatgcagatgccgttaattttttaccctatgtttacatcttgaggcagcagagtctgtctgcagctatgtggtgagctatgtaaggaaaaaaatctgggctgttagagtgaaaaagtgtgttttatgtcaattgtgaaaggaaaatgttaggagtatggtttttaaacttgggcttcattttaaacttttttttttaaacccagttatttcacttgatttgctagcttcagagaagagatccgaatctgtgcccagcgctaaaggctcagtgttagcatggcttgtgctggccggtgtgccatattcttgttggagatgaaccgtagcaccagagcccattcttccttgtcagtcttggcccaaagatgtcaccattcctagttatttgtcaccacataattggtgttgattggaaactttttctgagatgggacagaactgctgggttgtctttttccatgtaacttaagcatagtaatataaataaagtaatagttggatgcttttggtc

SEQ ID NO: 3416 - protein, 121 aa, Homo sapiens; identical to SEQ ID NO: 263

SEQ ID NO: 3417 - DNA, 1286 bp, Homo sapiens
gaggcggggccaaggccagggcctgactaaacctggagactcgggtggccgaggggcttcataccagctgaagagcgacaagccgctggcagccgcggatctcaccgccgctcaggccttatgccagcctggaccatcttggaggcagtgtaggatcatggaagaactttgaattaggtttttagaacttcagccataaaaatgggcagaattttccttgatcatatcggtggtacccgtctgttttcttgtgcaaactgtgatacgatcctgaccaaccgctcagaactcatctccactcgtttcacaggcgccactggcagagcatttctttttaacaaggtagttaacctgcagtacagtgaagttcaagatcgggtcatgctcactggccgccacatggttcgagatgtgagctgcaaaaactgcaatagcaaactgggatggatctatgagtttgccactgaagacagccagcgatataaggaaggccgcgtgatcctggaacgtgctctagttcgagagagtgagggctttgaggagcatgtaccatctgataactcttgaagatacagagagaaatccatcttttcccaggtctccttcactgaaaacaaaaatctacttacatacactgtcaccttagcatcagagtcggattaatgaactgcggaacaagaggttgtgagaatctaagatggaacctttctttctttctttctttttttttaaattttgtattttccatccaacagcagtgtgtagagagaatattatgcagatgccgttaattttttaccctatgtttacatcttgaggcagcagagtctgtctgcagctatgtggtgagctatgtaaggaaaaaaatctgggctgttagagtgaaaaagtgtgttttatgtcaattgtgaaaggaaaatgttaggagtatggtttttaaacttgggcttcattttaaacttttttttttaaacccagttatttcacttgatttgctagcttcagagaagagatccgaatctgtgcccagcgctaaaggctcagtgttagcatggcttgtgctggccggtgtgccatattcttgttggagatgaaccgtagcaccagagcccattcttccttgtcagtcttggcccaaagatgtcaccattcctagttatttgtcaccacataattggtgttgattggaaactttttctgagatgggacagaactgctgggttgtctttttccatgtaacttaagcatagtaatataaataaagtaatagttggatgcttttggtc

SEQ ID NO: 3418 - protein, 121 aa, Homo sapiens; identical to SEQ ID NO: 263

SEQ ID NO: 3419 - DNA, 2256 bp, Homo sapiens
gaggcggggccaaggccagggcctgactaaacctggagactcgggtggccgaggggcttcataccagctgaagagcgacaagccgctggcagccgcggatctcaccgccgctcaggccttatgccagcctggaccatcttggaggcagtgtaggatcatggaagaactttgaattaggtttttagaacttcagccataaaaatgggcagaattttccttgatcatatcggtggtacccgtctgttttcttgtgcaaactgtgatacgatcctgaccaaccgctcagaactcatctccactcgtttcacaggcgccactggcagagcatttctttttaacaaggtagttaacctgcagtacagtgaagttcaagatcgggtcatgctcactggccgccacatggttcgagatgtgagctgcaaaaactgcaatagcaaactgggatggatctatgagtttgccactgaagacagccagcgatataaggaaggccgcgtgatcctggaacgtgctctagttcgagagagtgagggctttgaggagcatgtaccatctgataactcttgaagatacagagagaaatccatcttttcccaggtctccttcactgaaaacaaaaatctacttacatacactgtcaccttagcatcagagtcggattaatgaactgcggaacaagaggttgtgagaatctaagatggaacctttctttctttctttctttttttttaaattttgtattttccatccaacagcagtgtgtagagagaatattatgcagatgccgttaattttttaccctatgtttacatcttgaggcagcagagtctgtctgcagctatgtggtgagctatgtaaggaaaaaaatctgggctgttagagtgaaaaagtgtgttttatgtcaattgtgaaaggaaaatgttaggagtatggtttttaaacttgggcttcattttaaacttttttttttaaacccagttatttcacttgatttgctagcttcagagaagagatccgaatctgtgcccagcgctaaaggctcagtgttagcatggcttgtgctggccggtgtgccatattcttgttggagatgaaccgtagcaccagagcccattcttccttgtcagtcttggcccaaagatgtcaccattcctagttatttgtcaccacataattggtgttgattggaaactttttctgagatgggacagaactgctgggttgtctttttccatgtaacttaagcatagtaatataaataaagtaatagttggatgcttttggtcctgtgttgcttttaaaaacaccttataaaagaggagagtatttgataagcaattttcatagtagtaaagttttttttcatctcttaaactaaattgaccatgcatataatattctttgtttaaatgaaagcatactgttgaaacccgcagtgttgcatttagaaaacagttgaacagaatgtcaatgtgcattcatgcaaaaaaacatttaatctgcatctgttttagaaaagggggaaatgaagcaacttgtctaaaaatactgctttacaaagcatttcagcctttccccctcagttttgcattgattttttgacaagtctgtagagcctaatagtttccatcaaaggcctagatctcttatttagcatttttttcagctcttctctcagaagttcagctgttgaaacgaaaactgtactttgtaccctcacatacaaagggatcaaatttgacctggtgttattttagccccaaatttatgacattacacaatattaaaatgtaaatgtttctttacccaaactacttctagatattctagtatttgcttctggtggaattaaatgacggtaaaattggctaattatttgaatgaatgaatggatggatgttttgcatgctcaatttctaggtcctttgtctagaaaggaaatttgcctcagttgaattagtgaaatatttctgtcgttgatattaaaagtgacttctgagtacagttaagttcctcctatttgccactgggctgttggttagaagcataggtaactgattaagtaggtatgatactgcatttgaaataagtggacacaaactatcctttctccaccatggactcaatctgagaacaacagcattcatttccattcatttccatactggcttttgattatatgcagattcctagtagcatgccttacctacagcactatgtgcatttgctgtcacaataaagtatattttgtcttgc

SEQ ID NO: 3420 - protein, 121 aa, Homo sapiens; identical to SEQ ID NO: 263

SEQ ID NO: 3421 - DNA, 2492 bp, Homo sapiens
gaggcggggccaaggccagggcctgactaaacctggagactcgggtggccgaggggcttcataccagctgaagagcgacaagccgctggcagccgcggatctcaccgccgctcaggagatctgttggtaatctgaggatttttattctacgtcgtcttgacagatggaaaacctgaagtaacttcgggctaaccttgtgtttttggaaaattagtagacttggtggtgaagaaactgggaggagtaggatattagctaactttgcatagccacatatagagcgtcgcagctgcattccaccaaagaggaaccaaaaggcctgtggtgttcccagggtacatattcatgccagaagtgaagtgctttggtgaattcgtttcctgaaagtttatcgcatacttgtactgggttaggtttttagaacttcagccataaaaatgggcagaattttccttgatcatatcggtggtacccgtctgttttcttgtgcaaactgtgatacgatcctgaccaaccgctcagaactcatctccactcgtttcacaggcgccactggcagagcatttctttttaacaaggtagttaacctgcagtacagtgaagttcaagatcgggtcatgctcactggccgccacatggttcgagatgtgagctgcaaaaactgcaatagcaaactgggatggatctatgagtttgccactgaagacagccagcgatataaggaaggccgcgtgatcctggaacgtgctctagttcgagagagtgagggctttgaggagcatgtaccatctgataactcttgaagatacagagagaaatccatcttttcccaggtctccttcactgaaaacaaaaatctacttacatacactgtcaccttagcatcagagtcggattaatgaactgcggaacaagaggttgtgagaatctaagatggaacctttctttctttctttctttttttttaaattttgtattttccatccaacagcagtgtgtagagagaatattatgcagatgccgttaattttttaccctatgtttacatcttgaggcagcagagtctgtctgcagctatgtggtgagctatgtaaggaaaaaaatctgggctgttagagtgaaaaagtgtgttttatgtcaattgtgaaaggaaaatgttaggagtatggtttttaaacttgggcttcattttaaacttttttttttaaacccagttatttcacttgatttgctagcttcagagaagagatccgaatctgtgcccagcgctaaaggctcagtgttagcatggcttgtgctggccggtgtgccatattcttgttggagatgaaccgtagcaccagagcccattcttccttgtcagtcttggcccaaagatgtcaccattcctagttatttgtcaccacataattggtgttgattggaaactttttctgagatgggacagaactgctgggttgtctttttccatgtaacttaagcatagtaatataaataaagtaatagttggatgcttttggtcctgtgttgcttttaaaaacaccttataaaagaggagagtatttgataagcaattttcatagtagtaaagttttttttcatctcttaaactaaattgaccatgcatataatattctttgtttaaatgaaagcatactgttgaaacccgcagtgttgcatttagaaaacagttgaacagaatgtcaatgtgcattcatgcaaaaaaacatttaatctgcatctgttttagaaaagggggaaatgaagcaacttgtctaaaaatactgctttacaaagcatttcagcctttccccctcagttttgcattgattttttgacaagtctgtagagcctaatagtttccatcaaaggcctagatctcttatttagcatttttttcagctcttctctcagaagttcagctgttgaaacgaaaactgtactttgtaccctcacatacaaagggatcaaatttgacctggtgttattttagccccaaatttatgacattacacaatattaaaatgtaaatgtttctttacccaaactacttctagatattctagtatttgcttctggtggaattaaatgacggtaaaattggctaattatttgaatgaatgaatggatggatgttttgcatgctcaatttctaggtcctttgtctagaaaggaaatttgcctcagttgaattagtgaaatatttctgtcgttgatattaaaagtgacttctgagtacagttaagttcctcctatttgccactgggctgttggttagaagcataggtaactgattaagtaggtatgatactgcatttgaaataagtggacacaaactatcctttctccaccatggactcaatctgagaacaacagcattcatttccattcatttccatactggcttttgattatatgcagattcctagtagcatgccttacctacagcactatgtgcatttgctgtcacaataaagtatattttgtcttgc

SEQ ID NO: 3422 - protein, 121 aa, Homo sapiens; identical to SEQ ID NO: 263

SEQ ID NO: 3423 - DNA, 2587 bp, Homo sapiens
gaggcggggccaaggccagggcctgactaaacctggagactcgggtggccgaggggcttcataccagctgaagagcgacaagccgctggcagccgcggatctcaccgccgctcaggccttatgccagcctggaccatcttggaggcagtgtaggatcatggaagaactttgaattaggtttttagaacttcagccataaaaatgggcagaattttccttgatcatatcggtggtacccgtctgttttcttgtgcaaactgtgatacgatcctgaccaaccgctcagaactcatctccactcgtttcacaggcgccactggcagagcatttctttttaacaaggtagttaacctgcagtacagtgaagttcaagatcgggtcatgctcactggccgccacatggttcgagatgtgagctgcaaaaactgcaatagcaaactgggatggatctatgagtttgccactgaagacagccagcgatataaggaaggccgcgtgatcctggaacgtgctctagttcgagagagtgagggctttgaggagcatgtaccatctgataactcttgaagatacagagagaaatccatcttttcccaggtctccttcactgaaaacaaaaatctacttacatacactgtcaccttagcatcagagtcggattaatgaactgcggaacaagaggttgtgagaatctaagatggaacctttctttctttctttctttttttttaaattttgtattttccatccaacagcagtgtgtagagagaatattatgcagatgccgttaattttttaccctatgtttacatcttgaggcagcagagtctgtctgcagctatgtggtgagctatgtaaggaaaaaaatctgggctgttagagtgaaaaagtgtgttttatgtcaattgtgaaaggaaaatgttaggagtatggtttttaaacttgggcttcattttaaacttttttttttaaacccagttatttcacttgatttgctagcttcagagaagagatccgaatctgtgcccagcgctaaaggctcagtgttagcatggcttgtgctggccggtgtgccatattcttgttggagatgaaccgtagcaccagagcccattcttccttgtcagtcttggcccaaagatgtcaccattcctagttatttgtcaccacataattggtgttgattggaaactttttctgagatgggacagaactgctgggttgtctttttccatgtaacttaagcatagtaatataaataaagtaatagttggatgcttttggtcctgtgttgcttttaaaaacaccttataaaagaggagagtatttgataagcaattttcatagtagtaaagttttttttcatctcttaaactaaattgaccatgcatataatattctttgtttaaatgaaagcatactgttgaaacccgcagtgttgcatttagaaaacagttgaacagaatgtcaatgtgcattcatgcaaaaaaacatttaatctgcatctgttttagaaaagggggaaatgaagcaacttgtctaaaaatactgctttacaaagcatttcagcctttccccctcagttttgcattgattttttgacaagtctgtagagcctaatagtttccatcaaaggcctagatctcttatttagcatttttttcagctcttctctcagaagttcagctgttgaaacgaaaactgtactttgtaccctcacatacaaagggatcaaatttgacctggtgttattttagccccaaatttatgacattacacaatattaaaatgtaaatgtttctttacccaaactacttctagatattctagtatttgcttctggtggaattaaatgacggtaaaattggctaattatttgaatgaatgaatggatggatgttttgcatgctcaatttctaggtcctttgtctagaaaggaaatttgcctcagttgaattagtgaaatatttctgtcgttgatattaaaagtgacttctgagtacagttaagttcctcctatttgccactgggctgttggttagaagcataggtaactgattaagtaggtatgatactgcatttgaaataagtggacacaaactatcctttctccaccatggactcaatctgagaacaacagcattcatttccattcatttccatactggcttttgattatatgcagattcctagtagcatgccttacctacagcactatgtgcatttgctgtcacaataaagtatattttgtcttgcattgatgcagtactgctgcttattttccactgatcttgtctagtgatcatcttaatttttatctctgaacacatacttggtatctttgagtacctgtagctttcttcatttggcaatgatagtgatgtctgacttgattaactgcctaattcacacatgaagacattgactttgccagtattaacttctctgagatcattttgccttagatactgataactatagttcagtatatataaacaaaaaaatttcatattactaggttaacttttaggtaactggcaggtaccagcagcaagctcctctgtgccttttaaaaacttccatttgc

SEQ ID NO: 3424 - protein, 121 aa, Homo sapiens; identical to SEQ ID NO: 263

SEQ ID NO: 3425 - DNA, 2823 bp, Homo sapiens
gaggcggggccaaggccagggcctgactaaacctggagactcgggtggccgaggggcttcataccagctgaagagcgacaagccgctggcagccgcggatctcaccgccgctcaggagatctgttggtaatctgaggatttttattctacgtcgtcttgacagatggaaaacctgaagtaacttcgggctaaccttgtgtttttggaaaattagtagacttggtggtgaagaaactgggaggagtaggatattagctaactttgcatagccacatatagagcgtcgcagctgcattccaccaaagaggaaccaaaaggcctgtggtgttcccagggtacatattcatgccagaagtgaagtgctttggtgaattcgtttcctgaaagtttatcgcatacttgtactgggttaggtttttagaacttcagccataaaaatgggcagaattttccttgatcatatcggtggtacccgtctgttttcttgtgcaaactgtgatacgatcctgaccaaccgctcagaactcatctccactcgtttcacaggcgccactggcagagcatttctttttaacaaggtagttaacctgcagtacagtgaagttcaagatcgggtcatgctcactggccgccacatggttcgagatgtgagctgcaaaaactgcaatagcaaactgggatggatctatgagtttgccactgaagacagccagcgatataaggaaggccgcgtgatcctggaacgtgctctagttcgagagagtgagggctttgaggagcatgtaccatctgataactcttgaagatacagagagaaatccatcttttcccaggtctccttcactgaaaacaaaaatctacttacatacactgtcaccttagcatcagagtcggattaatgaactgcggaacaagaggttgtgagaatctaagatggaacctttctttctttctttctttttttttaaattttgtattttccatccaacagcagtgtgtagagagaatattatgcagatgccgttaattttttaccctatgtttacatcttgaggcagcagagtctgtctgcagctatgtggtgagctatgtaaggaaaaaaatctgggctgttagagtgaaaaagtgtgttttatgtcaattgtgaaaggaaaatgttaggagtatggtttttaaacttgggcttcattttaaacttttttttttaaacccagttatttcacttgatttgctagcttcagagaagagatccgaatctgtgcccagcgctaaaggctcagtgttagcatggcttgtgctggccggtgtgccatattcttgttggagatgaaccgtagcaccagagcccattcttccttgtcagtcttggcccaaagatgtcaccattcctagttatttgtcaccacataattggtgttgattggaaactttttctgagatgggacagaactgctgggttgtctttttccatgtaacttaagcatagtaatataaataaagtaatagttggatgcttttggtcctgtgttgcttttaaaaacaccttataaaagaggagagtatttgataagcaattttcatagtagtaaagttttttttcatctcttaaactaaattgaccatgcatataatattctttgtttaaatgaaagcatactgttgaaacccgcagtgttgcatttagaaaacagttgaacagaatgtcaatgtgcattcatgcaaaaaaacatttaatctgcatctgttttagaaaagggggaaatgaagcaacttgtctaaaaatactgctttacaaagcatttcagcctttccccctcagttttgcattgattttttgacaagtctgtagagcctaatagtttccatcaaaggcctagatctcttatttagcatttttttcagctcttctctcagaagttcagctgttgaaacgaaaactgtactttgtaccctcacatacaaagggatcaaatttgacctggtgttattttagccccaaatttatgacattacacaatattaaaatgtaaatgtttctttacccaaactacttctagatattctagtatttgcttctggtggaattaaatgacggtaaaattggctaattatttgaatgaatgaatggatggatgttttgcatgctcaatttctaggtcctttgtctagaaaggaaatttgcctcagttgaattagtgaaatatttctgtcgttgatattaaaagtgacttctgagtacagttaagttcctcctatttgccactgggctgttggttagaagcataggtaactgattaagtaggtatgatactgcatttgaaataagtggacacaaactatcctttctccaccatggactcaatctgagaacaacagcattcatttccattcatttccatactggcttttgattatatgcagattcctagtagcatgccttacctacagcactatgtgcatttgctgtcacaataaagtatattttgtcttgcattgatgcagtactgctgcttattttccactgatcttgtctagtgatcatcttaatttttatctctgaacacatacttggtatctttgagtacctgtagctttcttcatttggcaatgatagtgatgtctgacttgattaactgcctaattcacacatgaagacattgactttgccagtattaacttctctgagatcattttgccttagatactgataactatagttcagtatatataaacaaaaaaatttcatattactaggttaacttttaggtaactggcaggtaccagcagcaagctcctctgtgccttttaaaaacttccatttgc

SEQ ID NO: 3426 - protein, 121 aa, Homo sapiens; identical to SEQ ID NO: 263

SEQ ID NO: 3427 - DNA, 1234 bp, Homo sapiens
ggggcttcataccagctgaagagcgacaagccgctggcagccgcggatctcaccgccgctcaggagatctgttggtaatctgaggatttttattctacgtcgtcttgacagatggaaaacctgaagtttttagaacttcagccataaaaatgggcagaattttccttgatcatatcggtggtacccgtctgttttcttgtgcaaactgtgatacgatcctgaccaaccgctcagaactcatctccactcgtttcacaggcgccactggcagagcatttctttttaacaaggtagttaacctgcagtacagtgaagttcaagatcgggtcatgctcactggccgccacatggttcgagatgtgagctgcaaaaactgcaatagcaaactgggatggatctatgagtttgccactgaagacagccagcgatataaggaaggccgcgtgatcctggaacgtgctctagttcgagagagtgagggctttgaggagcatgtaccatctgataactcttgaagatacagagagaaatccatcttttcccaggtctccttcactgaaaacaaaaatctacttacatacactgtcaccttagcatcagagtcggattaatgaactgcggaacaagaggttgtgagaatctaagatggaacctttctttctttctttctttttttttaaattttgtattttccatccaacagcagtgtgtagagagaatattatgcagatgccgttaattttttaccctatgtttacatcttgaggcagcagagtctgtctgcagctatgtggtgagctatgtaaggaaaaaaatctgggctgttagagtgaaaaagtgtgttttatgtcaattgtgaaaggaaaatgttaggagtatggtttttaaacttgggcttcattttaaacttttttttttaaacccagttatttcacttgatttgctagcttcagagaagagatccgaatctgtgcccagcgctaaaggctcagtgttagcatggcttgtgctggccggtgtgccatattcttgttggagatgaaccgtagcaccagagcccattcttccttgtcagtcttggcccaaagatgtcaccattcctagttatttgtcaccacataattggtgttgattggaaactttttctgagatgggacagaactgctgggttgtctttttccatgtaacttaagcatagtaatataaataaagtaatagttggatgcttttggtc

SEQ ID NO: 3428 - protein, 121 aa, Homo sapiens; identical to SEQ ID NO: 263

SEQ ID NO: 3429 - DNA, 2204 bp, Homo sapiens
ggggcttcataccagctgaagagcgacaagccgctggcagccgcggatctcaccgccgctcaggagatctgttggtaatctgaggatttttattctacgtcgtcttgacagatggaaaacctgaagtttttagaacttcagccataaaaatgggcagaattttccttgatcatatcggtggtacccgtctgttttcttgtgcaaactgtgatacgatcctgaccaaccgctcagaactcatctccactcgtttcacaggcgccactggcagagcatttctttttaacaaggtagttaacctgcagtacagtgaagttcaagatcgggtcatgctcactggccgccacatggttcgagatgtgagctgcaaaaactgcaatagcaaactgggatggatctatgagtttgccactgaagacagccagcgatataaggaaggccgcgtgatcctggaacgtgctctagttcgagagagtgagggctttgaggagcatgtaccatctgataactcttgaagatacagagagaaatccatcttttcccaggtctccttcactgaaaacaaaaatctacttacatacactgtcaccttagcatcagagtcggattaatgaactgcggaacaagaggttgtgagaatctaagatggaacctttctttctttctttctttttttttaaattttgtattttccatccaacagcagtgtgtagagagaatattatgcagatgccgttaattttttaccctatgtttacatcttgaggcagcagagtctgtctgcagctatgtggtgagctatgtaaggaaaaaaatctgggctgttagagtgaaaaagtgtgttttatgtcaattgtgaaaggaaaatgttaggagtatggtttttaaacttgggcttcattttaaacttttttttttaaacccagttatttcacttgatttgctagcttcagagaagagatccgaatctgtgcccagcgctaaaggctcagtgttagcatggcttgtgctggccggtgtgccatattcttgttggagatgaaccgtagcaccagagcccattcttccttgtcagtcttggcccaaagatgtcaccattcctagttatttgtcaccacataattggtgttgattggaaactttttctgagatgggacagaactgctgggttgtctttttccatgtaacttaagcatagtaatataaataaagtaatagttggatgcttttggtcctgtgttgcttttaaaaacaccttataaaagaggagagtatttgataagcaattttcatagtagtaaagttttttttcatctcttaaactaaattgaccatgcatataatattctttgtttaaatgaaagcatactgttgaaacccgcagtgttgcatttagaaaacagttgaacagaatgtcaatgtgcattcatgcaaaaaaacatttaatctgcatctgttttagaaaagggggaaatgaagcaacttgtctaaaaatactgctttacaaagcatttcagcctttccccctcagttttgcattgattttttgacaagtctgtagagcctaatagtttccatcaaaggcctagatctcttatttagcatttttttcagctcttctctcagaagttcagctgttgaaacgaaaactgtactttgtaccctcacatacaaagggatcaaatttgacctggtgttattttagccccaaatttatgacattacacaatattaaaatgtaaatgtttctttacccaaactacttctagatattctagtatttgcttctggtggaattaaatgacggtaaaattggctaattatttgaatgaatgaatggatggatgttttgcatgctcaatttctaggtcctttgtctagaaaggaaatttgcctcagttgaattagtgaaatatttctgtcgttgatattaaaagtgacttctgagtacagttaagttcctcctatttgccactgggctgttggttagaagcataggtaactgattaagtaggtatgatactgcatttgaaataagtggacacaaactatcctttctccaccatggactcaatctgagaacaacagcattcatttccattcatttccatactggcttttgattatatgcagattcctagtagcatgccttacctacagcactatgtgcatttgctgtcacaataaagtatattttgtcttgc

SEQ ID NO: 3430 - protein, 121 aa, Homo sapiens; identical to SEQ ID NO: 263

SEQ ID NO: 3431 - DNA, 2535 bp, Homo sapiens
ggggcttcataccagctgaagagcgacaagccgctggcagccgcggatctcaccgccgctcaggagatctgttggtaatctgaggatttttattctacgtcgtcttgacagatggaaaacctgaagtttttagaacttcagccataaaaatgggcagaattttccttgatcatatcggtggtacccgtctgttttcttgtgcaaactgtgatacgatcctgaccaaccgctcagaactcatctccactcgtttcacaggcgccactggcagagcatttctttttaacaaggtagttaacctgcagtacagtgaagttcaagatcgggtcatgctcactggccgccacatggttcgagatgtgagctgcaaaaactgcaatagcaaactgggatggatctatgagtttgccactgaagacagccagcgatataaggaaggccgcgtgatcctggaacgtgctctagttcgagagagtgagggctttgaggagcatgtaccatctgataactcttgaagatacagagagaaatccatcttttcccaggtctccttcactgaaaacaaaaatctacttacatacactgtcaccttagcatcagagtcggattaatgaactgcggaacaagaggttgtgagaatctaagatggaacctttctttctttctttctttttttttaaattttgtattttccatccaacagcagtgtgtagagagaatattatgcagatgccgttaattttttaccctatgtttacatcttgaggcagcagagtctgtctgcagctatgtggtgagctatgtaaggaaaaaaatctgggctgttagagtgaaaaagtgtgttttatgtcaattgtgaaaggaaaatgttaggagtatggtttttaaacttgggcttcattttaaacttttttttttaaacccagttatttcacttgatttgctagcttcagagaagagatccgaatctgtgcccagcgctaaaggctcagtgttagcatggcttgtgctggccggtgtgccatattcttgttggagatgaaccgtagcaccagagcccattcttccttgtcagtcttggcccaaagatgtcaccattcctagttatttgtcaccacataattggtgttgattggaaactttttctgagatgggacagaactgctgggttgtctttttccatgtaacttaagcatagtaatataaataaagtaatagttggatgcttttggtcctgtgttgcttttaaaaacaccttataaaagaggagagtatttgataagcaattttcatagtagtaaagttttttttcatctcttaaactaaattgaccatgcatataatattctttgtttaaatgaaagcatactgttgaaacccgcagtgttgcatttagaaaacagttgaacagaatgtcaatgtgcattcatgcaaaaaaacatttaatctgcatctgttttagaaaagggggaaatgaagcaacttgtctaaaaatactgctttacaaagcatttcagcctttccccctcagttttgcattgattttttgacaagtctgtagagcctaatagtttccatcaaaggcctagatctcttatttagcatttttttcagctcttctctcagaagttcagctgttgaaacgaaaactgtactttgtaccctcacatacaaagggatcaaatttgacctggtgttattttagccccaaatttatgacattacacaatattaaaatgtaaatgtttctttacccaaactacttctagatattctagtatttgcttctggtggaattaaatgacggtaaaattggctaattatttgaatgaatgaatggatggatgttttgcatgctcaatttctaggtcctttgtctagaaaggaaatttgcctcagttgaattagtgaaatatttctgtcgttgatattaaaagtgacttctgagtacagttaagttcctcctatttgccactgggctgttggttagaagcataggtaactgattaagtaggtatgatactgcatttgaaataagtggacacaaactatcctttctccaccatggactcaatctgagaacaacagcattcatttccattcatttccatactggcttttgattatatgcagattcctagtagcatgccttacctacagcactatgtgcatttgctgtcacaataaagtatattttgtcttgcattgatgcagtactgctgcttattttccactgatcttgtctagtgatcatcttaatttttatctctgaacacatacttggtatctttgagtacctgtagctttcttcatttggcaatgatagtgatgtctgacttgattaactgcctaattcacacatgaagacattgactttgccagtattaacttctctgagatcattttgccttagatactgataactatagttcagtatatataaacaaaaaaatttcatattactaggttaacttttaggtaactggcaggtaccagcagcaagctcctctgtgccttttaaaaacttccatttgc

SEQ ID NO: 3432 - protein, 121 aa, Homo sapiens; identical to SEQ ID NO: 263

SEQ ID NO: 3433 - DNA, 1249 bp, Homo sapiens
actgcggctgccgggtgagcccacccgggggtcgcccgggccggcccagctccgccagcttcgggctgcggccttccctccgcttgcagtcgggagggtgggcgtgcccttgcaacccctttcctgtaccttctctgcaggtttttagaacttcagccataaaaatgggcagaattttccttgatcatatcggtggtacccgtctgttttcttgtgcaaactgtgatacgatcctgaccaaccgctcagaactcatctccactcgtttcacaggcgccactggcagagcatttctttttaacaaggtagttaacctgcagtacagtgaagttcaagatcgggtcatgctcactggccgccacatggttcgagatgtgagctgcaaaaactgcaatagcaaactgggatggatctatgagtttgccactgaagacagccagcgatataaggaaggccgcgtgatcctggaacgtgctctagttcgagagagtgagggctttgaggagcatgtaccatctgataactcttgaagatacagagagaaatccatcttttcccaggtctccttcactgaaaacaaaaatctacttacatacactgtcaccttagcatcagagtcggattaatgaactgcggaacaagaggttgtgagaatctaagatggaacctttctttctttctttctttttttttaaattttgtattttccatccaacagcagtgtgtagagagaatattatgcagatgccgttaattttttaccctatgtttacatcttgaggcagcagagtctgtctgcagctatgtggtgagctatgtaaggaaaaaaatctgggctgttagagtgaaaaagtgtgttttatgtcaattgtgaaaggaaaatgttaggagtatggtttttaaacttgggcttcattttaaacttttttttttaaacccagttatttcacttgatttgctagcttcagagaagagatccgaatctgtgcccagcgctaaaggctcagtgttagcatggcttgtgctggccggtgtgccatattcttgttggagatgaaccgtagcaccagagcccattcttccttgtcagtcttggcccaaagatgtcaccattcctagttatttgtcaccacataattggtgttgattggaaactttttctgagatgggacagaactgctgggttgtctttttccatgtaacttaagcatagtaatataaataaagtaatagttggatgcttttggtc

SEQ ID NO: 3434 - protein, 121 aa, Homo sapiens; identical to SEQ ID NO: 263

SEQ ID NO: 3435 - DNA, 2219 bp, Homo sapiens
actgcggctgccgggtgagcccacccgggggtcgcccgggccggcccagctccgccagcttcgggctgcggccttccctccgcttgcagtcgggagggtgggcgtgcccttgcaacccctttcctgtaccttctctgcaggtttttagaacttcagccataaaaatgggcagaattttccttgatcatatcggtggtacccgtctgttttcttgtgcaaactgtgatacgatcctgaccaaccgctcagaactcatctccactcgtttcacaggcgccactggcagagcatttctttttaacaaggtagttaacctgcagtacagtgaagttcaagatcgggtcatgctcactggccgccacatggttcgagatgtgagctgcaaaaactgcaatagcaaactgggatggatctatgagtttgccactgaagacagccagcgatataaggaaggccgcgtgatcctggaacgtgctctagttcgagagagtgagggctttgaggagcatgtaccatctgataactcttgaagatacagagagaaatccatcttttcccaggtctccttcactgaaaacaaaaatctacttacatacactgtcaccttagcatcagagtcggattaatgaactgcggaacaagaggttgtgagaatctaagatggaacctttctttctttctttctttttttttaaattttgtattttccatccaacagcagtgtgtagagagaatattatgcagatgccgttaattttttaccctatgtttacatcttgaggcagcagagtctgtctgcagctatgtggtgagctatgtaaggaaaaaaatctgggctgttagagtgaaaaagtgtgttttatgtcaattgtgaaaggaaaatgttaggagtatggtttttaaacttgggcttcattttaaacttttttttttaaacccagttatttcacttgatttgctagcttcagagaagagatccgaatctgtgcccagcgctaaaggctcagtgttagcatggcttgtgctggccggtgtgccatattcttgttggagatgaaccgtagcaccagagcccattcttccttgtcagtcttggcccaaagatgtcaccattcctagttatttgtcaccacataattggtgttgattggaaactttttctgagatgggacagaactgctgggttgtctttttccatgtaacttaagcatagtaatataaataaagtaatagttggatgcttttggtcctgtgttgcttttaaaaacaccttataaaagaggagagtatttgataagcaattttcatagtagtaaagttttttttcatctcttaaactaaattgaccatgcatataatattctttgtttaaatgaaagcatactgttgaaacccgcagtgttgcatttagaaaacagttgaacagaatgtcaatgtgcattcatgcaaaaaaacatttaatctgcatctgttttagaaaagggggaaatgaagcaacttgtctaaaaatactgctttacaaagcatttcagcctttccccctcagttttgcattgattttttgacaagtctgtagagcctaatagtttccatcaaaggcctagatctcttatttagcatttttttcagctcttctctcagaagttcagctgttgaaacgaaaactgtactttgtaccctcacatacaaagggatcaaatttgacctggtgttattttagccccaaatttatgacattacacaatattaaaatgtaaatgtttctttacccaaactacttctagatattctagtatttgcttctggtggaattaaatgacggtaaaattggctaattatttgaatgaatgaatggatggatgttttgcatgctcaatttctaggtcctttgtctagaaaggaaatttgcctcagttgaattagtgaaatatttctgtcgttgatattaaaagtgacttctgagtacagttaagttcctcctatttgccactgggctgttggttagaagcataggtaactgattaagtaggtatgatactgcatttgaaataagtggacacaaactatcctttctccaccatggactcaatctgagaacaacagcattcatttccattcatttccatactggcttttgattatatgcagattcctagtagcatgccttacctacagcactatgtgcatttgctgtcacaataaagtatattttgtcttgc

SEQ ID NO: 3436 - protein, 121 aa, Homo sapiens; identical to SEQ ID NO: 263

SEQ ID NO: 3437 - DNA, 2550 bp, Homo sapiens
actgcggctgccgggtgagcccacccgggggtcgcccgggccggcccagctccgccagcttcgggctgcggccttccctccgcttgcagtcgggagggtgggcgtgcccttgcaacccctttcctgtaccttctctgcaggtttttagaacttcagccataaaaatgggcagaattttccttgatcatatcggtggtacccgtctgttttcttgtgcaaactgtgatacgatcctgaccaaccgctcagaactcatctccactcgtttcacaggcgccactggcagagcatttctttttaacaaggtagttaacctgcagtacagtgaagttcaagatcgggtcatgctcactggccgccacatggttcgagatgtgagctgcaaaaactgcaatagcaaactgggatggatctatgagtttgccactgaagacagccagcgatataaggaaggccgcgtgatcctggaacgtgctctagttcgagagagtgagggctttgaggagcatgtaccatctgataactcttgaagatacagagagaaatccatcttttcccaggtctccttcactgaaaacaaaaatctacttacatacactgtcaccttagcatcagagtcggattaatgaactgcggaacaagaggttgtgagaatctaagatggaacctttctttctttctttctttttttttaaattttgtattttccatccaacagcagtgtgtagagagaatattatgcagatgccgttaattttttaccctatgtttacatcttgaggcagcagagtctgtctgcagctatgtggtgagctatgtaaggaaaaaaatctgggctgttagagtgaaaaagtgtgttttatgtcaattgtgaaaggaaaatgttaggagtatggtttttaaacttgggcttcattttaaacttttttttttaaacccagttatttcacttgatttgctagcttcagagaagagatccgaatctgtgcccagcgctaaaggctcagtgttagcatggcttgtgctggccggtgtgccatattcttgttggagatgaaccgtagcaccagagcccattcttccttgtcagtcttggcccaaagatgtcaccattcctagttatttgtcaccacataattggtgttgattggaaactttttctgagatgggacagaactgctgggttgtctttttccatgtaacttaagcatagtaatataaataaagtaatagttggatgcttttggtcctgtgttgcttttaaaaacaccttataaaagaggagagtatttgataagcaattttcatagtagtaaagttttttttcatctcttaaactaaattgaccatgcatataatattctttgtttaaatgaaagcatactgttgaaacccgcagtgttgcatttagaaaacagttgaacagaatgtcaatgtgcattcatgcaaaaaaacatttaatctgcatctgttttagaaaagggggaaatgaagcaacttgtctaaaaatactgctttacaaagcatttcagcctttccccctcagttttgcattgattttttgacaagtctgtagagcctaatagtttccatcaaaggcctagatctcttatttagcatttttttcagctcttctctcagaagttcagctgttgaaacgaaaactgtactttgtaccctcacatacaaagggatcaaatttgacctggtgttattttagccccaaatttatgacattacacaatattaaaatgtaaatgtttctttacccaaactacttctagatattctagtatttgcttctggtggaattaaatgacggtaaaattggctaattatttgaatgaatgaatggatggatgttttgcatgctcaatttctaggtcctttgtctagaaaggaaatttgcctcagttgaattagtgaaatatttctgtcgttgatattaaaagtgacttctgagtacagttaagttcctcctatttgccactgggctgttggttagaagcataggtaactgattaagtaggtatgatactgcatttgaaataagtggacacaaactatcctttctccaccatggactcaatctgagaacaacagcattcatttccattcatttccatactggcttttgattatatgcagattcctagtagcatgccttacctacagcactatgtgcatttgctgtcacaataaagtatattttgtcttgcattgatgcagtactgctgcttattttccactgatcttgtctagtgatcatcttaatttttatctctgaacacatacttggtatctttgagtacctgtagctttcttcatttggcaatgatagtgatgtctgacttgattaactgcctaattcacacatgaagacattgactttgccagtattaacttctctgagatcattttgccttagatactgataactatagttcagtatatataaacaaaaaaatttcatattactaggttaacttttaggtaactggcaggtaccagcagcaagctcctctgtgccttttaaaaacttccatttgc

SEQ ID NO: 3438 - protein, 121 aa, Homo sapiens; identical to SEQ ID NO: 263

SEQ ID NO: 3439 - DNA, 1602 bp, Homo sapiens
ggctgccgggtgagcccacccgggggtcgcccgggccggcccagctccgccagcttcgggctgcggccttccctccgcttgcagtcgggagggtgggcgtgcccttgcaacccctttcctgtaccttctctgcagagatctgttggtaatctgaggatttttattctacgtcgtcttgacagatggaaaacctgaagtaacttcgggctaaccttgtgtttttggaaaattagtagacttggtggtgaagaaactgggaggagtaggatattagctaactttgcatagccacatatagagcgtcgcagctgcattccaccaaagaggaaccaaaaggcctgtggtgttcccagggtacatattcatgccagaagtgaagtgctttggtgaattcgtttcctgaaagtttatcgcatacttgtactgggttagccttatgccagcctggaccatcttggaggcagtgtaggatcatggaagaactttgaattaggtttttagaacttcagccataaaaatgggcagaattttccttgatcatatcggtggtacccgtctgttttcttgtgcaaactgtgatacgatcctgaccaaccgctcagaactcatctccactcgtttcacaggcgccactggcagagcatttctttttaacaaggtagttaacctgcagtacagtgaagttcaagatcgggtcatgctcactggccgccacatggttcgagatgtgagctgcaaaaactgcaatagcaaactgggatggatctatgagtttgccactgaagacagccagcgatataaggaaggccgcgtgatcctggaacgtgctctagttcgagagagtgagggctttgaggagcatgtaccatctgataactcttgaagatacagagagaaatccatcttttcccaggtctccttcactgaaaacaaaaatctacttacatacactgtcaccttagcatcagagtcggattaatgaactgcggaacaagaggttgtgagaatctaagatggaacctttctttctttctttctttttttttaaattttgtattttccatccaacagcagtgtgtagagagaatattatgcagatgccgttaattttttaccctatgtttacatcttgaggcagcagagtctgtctgcagctatgtggtgagctatgtaaggaaaaaaatctgggctgttagagtgaaaaagtgtgttttatgtcaattgtgaaaggaaaatgttaggagtatggtttttaaacttgggcttcattttaaacttttttttttaaacccagttatttcacttgatttgctagcttcagagaagagatccgaatctgtgcccagcgctaaaggctcagtgttagcatggcttgtgctggccggtgtgccatattcttgttggagatgaaccgtagcaccagagcccattcttccttgtcagtcttggcccaaagatgtcaccattcctagttatttgtcaccacataattggtgttgattggaaactttttctgagatgggacagaactgctgggttgtctttttccatgtaacttaagcatagtaatataaataaagtaatagttggatgcttttggtc

SEQ ID NO: 3440 - protein, 121 aa, Homo sapiens; identical to SEQ ID NO: 263

SEQ ID NO: 3441 - DNA, 2572 bp, Homo sapiens
ggctgccgggtgagcccacccgggggtcgcccgggccggcccagctccgccagcttcgggctgcggccttccctccgcttgcagtcgggagggtgggcgtgcccttgcaacccctttcctgtaccttctctgcagagatctgttggtaatctgaggatttttattctacgtcgtcttgacagatggaaaacctgaagtaacttcgggctaaccttgtgtttttggaaaattagtagacttggtggtgaagaaactgggaggagtaggatattagctaactttgcatagccacatatagagcgtcgcagctgcattccaccaaagaggaaccaaaaggcctgtggtgttcccagggtacatattcatgccagaagtgaagtgctttggtgaattcgtttcctgaaagtttatcgcatacttgtactgggttagccttatgccagcctggaccatcttggaggcagtgtaggatcatggaagaactttgaattaggtttttagaacttcagccataaaaatgggcagaattttccttgatcatatcggtggtacccgtctgttttcttgtgcaaactgtgatacgatcctgaccaaccgctcagaactcatctccactcgtttcacaggcgccactggcagagcatttctttttaacaaggtagttaacctgcagtacagtgaagttcaagatcgggtcatgctcactggccgccacatggttcgagatgtgagctgcaaaaactgcaatagcaaactgggatggatctatgagtttgccactgaagacagccagcgatataaggaaggccgcgtgatcctggaacgtgctctagttcgagagagtgagggctttgaggagcatgtaccatctgataactcttgaagatacagagagaaatccatcttttcccaggtctccttcactgaaaacaaaaatctacttacatacactgtcaccttagcatcagagtcggattaatgaactgcggaacaagaggttgtgagaatctaagatggaacctttctttctttctttctttttttttaaattttgtattttccatccaacagcagtgtgtagagagaatattatgcagatgccgttaattttttaccctatgtttacatcttgaggcagcagagtctgtctgcagctatgtggtgagctatgtaaggaaaaaaatctgggctgttagagtgaaaaagtgtgttttatgtcaattgtgaaaggaaaatgttaggagtatggtttttaaacttgggcttcattttaaacttttttttttaaacccagttatttcacttgatttgctagcttcagagaagagatccgaatctgtgcccagcgctaaaggctcagtgttagcatggcttgtgctggccggtgtgccatattcttgttggagatgaaccgtagcaccagagcccattcttccttgtcagtcttggcccaaagatgtcaccattcctagttatttgtcaccacataattggtgttgattggaaactttttctgagatgggacagaactgctgggttgtctttttccatgtaacttaagcatagtaatataaataaagtaatagttggatgcttttggtcctgtgttgcttttaaaaacaccttataaaagaggagagtatttgataagcaattttcatagtagtaaagttttttttcatctcttaaactaaattgaccatgcatataatattctttgtttaaatgaaagcatactgttgaaacccgcagtgttgcatttagaaaacagttgaacagaatgtcaatgtgcattcatgcaaaaaaacatttaatctgcatctgttttagaaaagggggaaatgaagcaacttgtctaaaaatactgctttacaaagcatttcagcctttccccctcagttttgcattgattttttgacaagtctgtagagcctaatagtttccatcaaaggcctagatctcttatttagcatttttttcagctcttctctcagaagttcagctgttgaaacgaaaactgtactttgtaccctcacatacaaagggatcaaatttgacctggtgttattttagccccaaatttatgacattacacaatattaaaatgtaaatgtttctttacccaaactacttctagatattctagtatttgcttctggtggaattaaatgacggtaaaattggctaattatttgaatgaatgaatggatggatgttttgcatgctcaatttctaggtcctttgtctagaaaggaaatttgcctcagttgaattagtgaaatatttctgtcgttgatattaaaagtgacttctgagtacagttaagttcctcctatttgccactgggctgttggttagaagcataggtaactgattaagtaggtatgatactgcatttgaaataagtggacacaaactatcctttctccaccatggactcaatctgagaacaacagcattcatttccattcatttccatactggcttttgattatatgcagattcctagtagcatgccttacctacagcactatgtgcatttgctgtcacaataaagtatattttgtcttgc

SEQ ID NO: 3442 - protein, 121 aa, Homo sapiens; identical to SEQ ID NO: 263

SEQ ID NO: 3443 - DNA, 2903 bp, Homo sapiens
ggctgccgggtgagcccacccgggggtcgcccgggccggcccagctccgccagcttcgggctgcggccttccctccgcttgcagtcgggagggtgggcgtgcccttgcaacccctttcctgtaccttctctgcagagatctgttggtaatctgaggatttttattctacgtcgtcttgacagatggaaaacctgaagtaacttcgggctaaccttgtgtttttggaaaattagtagacttggtggtgaagaaactgggaggagtaggatattagctaactttgcatagccacatatagagcgtcgcagctgcattccaccaaagaggaaccaaaaggcctgtggtgttcccagggtacatattcatgccagaagtgaagtgctttggtgaattcgtttcctgaaagtttatcgcatacttgtactgggttagccttatgccagcctggaccatcttggaggcagtgtaggatcatggaagaactttgaattaggtttttagaacttcagccataaaaatgggcagaattttccttgatcatatcggtggtacccgtctgttttcttgtgcaaactgtgatacgatcctgaccaaccgctcagaactcatctccactcgtttcacaggcgccactggcagagcatttctttttaacaaggtagttaacctgcagtacagtgaagttcaagatcgggtcatgctcactggccgccacatggttcgagatgtgagctgcaaaaactgcaatagcaaactgggatggatctatgagtttgccactgaagacagccagcgatataaggaaggccgcgtgatcctggaacgtgctctagttcgagagagtgagggctttgaggagcatgtaccatctgataactcttgaagatacagagagaaatccatcttttcccaggtctccttcactgaaaacaaaaatctacttacatacactgtcaccttagcatcagagtcggattaatgaactgcggaacaagaggttgtgagaatctaagatggaacctttctttctttctttctttttttttaaattttgtattttccatccaacagcagtgtgtagagagaatattatgcagatgccgttaattttttaccctatgtttacatcttgaggcagcagagtctgtctgcagctatgtggtgagctatgtaaggaaaaaaatctgggctgttagagtgaaaaagtgtgttttatgtcaattgtgaaaggaaaatgttaggagtatggtttttaaacttgggcttcattttaaacttttttttttaaacccagttatttcacttgatttgctagcttcagagaagagatccgaatctgtgcccagcgctaaaggctcagtgttagcatggcttgtgctggccggtgtgccatattcttgttggagatgaaccgtagcaccagagcccattcttccttgtcagtcttggcccaaagatgtcaccattcctagttatttgtcaccacataattggtgttgattggaaactttttctgagatgggacagaactgctgggttgtctttttccatgtaacttaagcatagtaatataaataaagtaatagttggatgcttttggtcctgtgttgcttttaaaaacaccttataaaagaggagagtatttgataagcaattttcatagtagtaaagttttttttcatctcttaaactaaattgaccatgcatataatattctttgtttaaatgaaagcatactgttgaaacccgcagtgttgcatttagaaaacagttgaacagaatgtcaatgtgcattcatgcaaaaaaacatttaatctgcatctgttttagaaaagggggaaatgaagcaacttgtctaaaaatactgctttacaaagcatttcagcctttccccctcagttttgcattgattttttgacaagtctgtagagcctaatagtttccatcaaaggcctagatctcttatttagcatttttttcagctcttctctcagaagttcagctgttgaaacgaaaactgtactttgtaccctcacatacaaagggatcaaatttgacctggtgttattttagccccaaatttatgacattacacaatattaaaatgtaaatgtttctttacccaaactacttctagatattctagtatttgcttctggtggaattaaatgacggtaaaattggctaattatttgaatgaatgaatggatggatgttttgcatgctcaatttctaggtcctttgtctagaaaggaaatttgcctcagttgaattagtgaaatatttctgtcgttgatattaaaagtgacttctgagtacagttaagttcctcctatttgccactgggctgttggttagaagcataggtaactgattaagtaggtatgatactgcatttgaaataagtggacacaaactatcctttctccaccatggactcaatctgagaacaacagcattcatttccattcatttccatactggcttttgattatatgcagattcctagtagcatgccttacctacagcactatgtgcatttgctgtcacaataaagtatattttgtcttgcattgatgcagtactgctgcttattttccactgatcttgtctagtgatcatcttaatttttatctctgaacacatacttggtatctttgagtacctgtagctttcttcatttggcaatgatagtgatgtctgacttgattaactgcctaattcacacatgaagacattgactttgccagtattaacttctctgagatcattttgccttagatactgataactatagttcagtatatataaacaaaaaaatttcatattactaggttaacttttaggtaactggcaggtaccagcagcaagctcctctgtgccttttaaaaacttccatttgc

SEQ ID NO: 3444 - protein, 121 aa, Homo sapiens; identical to SEQ ID NO: 263

SEQ ID NO: 3445 - DNA, 1856 bp, Homo sapiens
gtgtaggatcatggaagaactttgaattaggtgaattgcattctgtacttttctgtagttaacagctttgtaacctttgaccagttaataacctttttagccttgacttggatgatctgtgaagtgatggtaacaacctcacagagctgtgacaattttgaaataagtacctagtaacagtgctccctagacattgacttaaagttagtcatcacctctatagttgtagatgcacctggtgatcacagacctactcactctgtgttctcaaaccagactactctcttcttgttttctaattgcccctttatctacttgtatcccactgaaacctcacaattcttttctgaaattatacatgctcagaacgtatacttaacatttatgctaaaccttttttctcacctctctgccagtgctttacatcattcattttctgaaattccactttccattttctttttccacaccagccataagagaagtgacactattctttggccttggctaataggtttacttccttggctcactgctttaaaatcttcttagcttaggcatgcctgtttatttgttcagtgtgtgaactttggatctttttgttcaggatcagctatttcacacatcgagtactacaaagcagagattacataaatacgtatacaaattgttctctatgacaccccccaagtaggtgctaacatgattattataatgcatttgttatccttttctatttgctcctaggtttttagaacttcagccataaaaatgggcagaattttccttgatcatatcggtggtacccgtctgttttcttgtgcaaactgtgatacgatcctgaccaaccgctcagaactcatctccactcgtttcacaggcgccactggcagagcatttctttttaacaaggtagttaacctgcagtacagtgaagttcaagatcgggtcatgctcactggccgccacatggttcgagatgtgagctgcaaaaactgcaatagcaaactgggatggatctatgagtttgccactgaagacagccagcgatataaggaaggccgcgtgatcctggaacgtgctctagttcgagagagtgagggctttgaggagcatgtaccatctgataactcttgaagatacagagagaaatccatcttttcccaggtctccttcactgaaaacaaaaatctacttacatacactgtcaccttagcatcagagtcggattaatgaactgcggaacaagaggttgtgagaatctaagatggaacctttctttctttctttctttttttttaaattttgtattttccatccaacagcagtgtgtagagagaatattatgcagatgccgttaattttttaccctatgtttacatcttgaggcagcagagtctgtctgcagctatgtggtgagctatgtaaggaaaaaaatctgggctgttagagtgaaaaagtgtgttttatgtcaattgtgaaaggaaaatgttaggagtatggtttttaaacttgggcttcattttaaacttttttttttaaacccagttatttcacttgatttgctagcttcagagaagagatccgaatctgtgcccagcgctaaaggctcagtgttagcatggcttgtgctggccggtgtgccatattcttgttggagatgaaccgtagcaccagagcccattcttccttgtcagtcttggcccaaagatgtcaccattcctagttatttgtcaccacataattggtgttgattggaaactttttctgagatgggacagaactgctgggttgtctttttccatgtaacttaagcatagtaatataaataaagtaatagttggatgcttttggtc

SEQ ID NO: 3446 - protein, 121 aa, Homo sapiens; identical to SEQ ID NO: 263

SEQ ID NO: 3447 - DNA, 2826 bp, Homo sapiens
gtgtaggatcatggaagaactttgaattaggtgaattgcattctgtacttttctgtagttaacagctttgtaacctttgaccagttaataacctttttagccttgacttggatgatctgtgaagtgatggtaacaacctcacagagctgtgacaattttgaaataagtacctagtaacagtgctccctagacattgacttaaagttagtcatcacctctatagttgtagatgcacctggtgatcacagacctactcactctgtgttctcaaaccagactactctcttcttgttttctaattgcccctttatctacttgtatcccactgaaacctcacaattcttttctgaaattatacatgctcagaacgtatacttaacatttatgctaaaccttttttctcacctctctgccagtgctttacatcattcattttctgaaattccactttccattttctttttccacaccagccataagagaagtgacactattctttggccttggctaataggtttacttccttggctcactgctttaaaatcttcttagcttaggcatgcctgtttatttgttcagtgtgtgaactttggatctttttgttcaggatcagctatttcacacatcgagtactacaaagcagagattacataaatacgtatacaaattgttctctatgacaccccccaagtaggtgctaacatgattattataatgcatttgttatccttttctatttgctcctaggtttttagaacttcagccataaaaatgggcagaattttccttgatcatatcggtggtacccgtctgttttcttgtgcaaactgtgatacgatcctgaccaaccgctcagaactcatctccactcgtttcacaggcgccactggcagagcatttctttttaacaaggtagttaacctgcagtacagtgaagttcaagatcgggtcatgctcactggccgccacatggttcgagatgtgagctgcaaaaactgcaatagcaaactgggatggatctatgagtttgccactgaagacagccagcgatataaggaaggccgcgtgatcctggaacgtgctctagttcgagagagtgagggctttgaggagcatgtaccatctgataactcttgaagatacagagagaaatccatcttttcccaggtctccttcactgaaaacaaaaatctacttacatacactgtcaccttagcatcagagtcggattaatgaactgcggaacaagaggttgtgagaatctaagatggaacctttctttctttctttctttttttttaaattttgtattttccatccaacagcagtgtgtagagagaatattatgcagatgccgttaattttttaccctatgtttacatcttgaggcagcagagtctgtctgcagctatgtggtgagctatgtaaggaaaaaaatctgggctgttagagtgaaaaagtgtgttttatgtcaattgtgaaaggaaaatgttaggagtatggtttttaaacttgggcttcattttaaacttttttttttaaacccagttatttcacttgatttgctagcttcagagaagagatccgaatctgtgcccagcgctaaaggctcagtgttagcatggcttgtgctggccggtgtgccatattcttgttggagatgaaccgtagcaccagagcccattcttccttgtcagtcttggcccaaagatgtcaccattcctagttatttgtcaccacataattggtgttgattggaaactttttctgagatgggacagaactgctgggttgtctttttccatgtaacttaagcatagtaatataaataaagtaatagttggatgcttttggtcctgtgttgcttttaaaaacaccttataaaagaggagagtatttgataagcaattttcatagtagtaaagttttttttcatctcttaaactaaattgaccatgcatataatattctttgtttaaatgaaagcatactgttgaaacccgcagtgttgcatttagaaaacagttgaacagaatgtcaatgtgcattcatgcaaaaaaacatttaatctgcatctgttttagaaaagggggaaatgaagcaacttgtctaaaaatactgctttacaaagcatttcagcctttccccctcagttttgcattgattttttgacaagtctgtagagcctaatagtttccatcaaaggcctagatctcttatttagcatttttttcagctcttctctcagaagttcagctgttgaaacgaaaactgtactttgtaccctcacatacaaagggatcaaatttgacctggtgttattttagccccaaatttatgacattacacaatattaaaatgtaaatgtttctttacccaaactacttctagatattctagtatttgcttctggtggaattaaatgacggtaaaattggctaattatttgaatgaatgaatggatggatgttttgcatgctcaatttctaggtcctttgtctagaaaggaaatttgcctcagttgaattagtgaaatatttctgtcgttgatattaaaagtgacttctgagtacagttaagttcctcctatttgccactgggctgttggttagaagcataggtaactgattaagtaggtatgatactgcatttgaaataagtggacacaaactatcctttctccaccatggactcaatctgagaacaacagcattcatttccattcatttccatactggcttttgattatatgcagattcctagtagcatgccttacctacagcactatgtgcatttgctgtcacaataaagtatattttgtcttgc

SEQ ID NO: 3448 - protein, 121 aa, Homo sapiens; identical to SEQ ID NO: 263

SEQ ID NO: 3449 - DNA, 3157 bp, Homo sapiens
gtgtaggatcatggaagaactttgaattaggtgaattgcattctgtacttttctgtagttaacagctttgtaacctttgaccagttaataacctttttagccttgacttggatgatctgtgaagtgatggtaacaacctcacagagctgtgacaattttgaaataagtacctagtaacagtgctccctagacattgacttaaagttagtcatcacctctatagttgtagatgcacctggtgatcacagacctactcactctgtgttctcaaaccagactactctcttcttgttttctaattgcccctttatctacttgtatcccactgaaacctcacaattcttttctgaaattatacatgctcagaacgtatacttaacatttatgctaaaccttttttctcacctctctgccagtgctttacatcattcattttctgaaattccactttccattttctttttccacaccagccataagagaagtgacactattctttggccttggctaataggtttacttccttggctcactgctttaaaatcttcttagcttaggcatgcctgtttatttgttcagtgtgtgaactttggatctttttgttcaggatcagctatttcacacatcgagtactacaaagcagagattacataaatacgtatacaaattgttctctatgacaccccccaagtaggtgctaacatgattattataatgcatttgttatccttttctatttgctcctaggtttttagaacttcagccataaaaatgggcagaattttccttgatcatatcggtggtacccgtctgttttcttgtgcaaactgtgatacgatcctgaccaaccgctcagaactcatctccactcgtttcacaggcgccactggcagagcatttctttttaacaaggtagttaacctgcagtacagtgaagttcaagatcgggtcatgctcactggccgccacatggttcgagatgtgagctgcaaaaactgcaatagcaaactgggatggatctatgagtttgccactgaagacagccagcgatataaggaaggccgcgtgatcctggaacgtgctctagttcgagagagtgagggctttgaggagcatgtaccatctgataactcttgaagatacagagagaaatccatcttttcccaggtctccttcactgaaaacaaaaatctacttacatacactgtcaccttagcatcagagtcggattaatgaactgcggaacaagaggttgtgagaatctaagatggaacctttctttctttctttctttttttttaaattttgtattttccatccaacagcagtgtgtagagagaatattatgcagatgccgttaattttttaccctatgtttacatcttgaggcagcagagtctgtctgcagctatgtggtgagctatgtaaggaaaaaaatctgggctgttagagtgaaaaagtgtgttttatgtcaattgtgaaaggaaaatgttaggagtatggtttttaaacttgggcttcattttaaacttttttttttaaacccagttatttcacttgatttgctagcttcagagaagagatccgaatctgtgcccagcgctaaaggctcagtgttagcatggcttgtgctggccggtgtgccatattcttgttggagatgaaccgtagcaccagagcccattcttccttgtcagtcttggcccaaagatgtcaccattcctagttatttgtcaccacataattggtgttgattggaaactttttctgagatgggacagaactgctgggttgtctttttccatgtaacttaagcatagtaatataaataaagtaatagttggatgcttttggtcctgtgttgcttttaaaaacaccttataaaagaggagagtatttgataagcaattttcatagtagtaaagttttttttcatctcttaaactaaattgaccatgcatataatattctttgtttaaatgaaagcatactgttgaaacccgcagtgttgcatttagaaaacagttgaacagaatgtcaatgtgcattcatgcaaaaaaacatttaatctgcatctgttttagaaaagggggaaatgaagcaacttgtctaaaaatactgctttacaaagcatttcagcctttccccctcagttttgcattgattttttgacaagtctgtagagcctaatagtttccatcaaaggcctagatctcttatttagcatttttttcagctcttctctcagaagttcagctgttgaaacgaaaactgtactttgtaccctcacatacaaagggatcaaatttgacctggtgttattttagccccaaatttatgacattacacaatattaaaatgtaaatgtttctttacccaaactacttctagatattctagtatttgcttctggtggaattaaatgacggtaaaattggctaattatttgaatgaatgaatggatggatgttttgcatgctcaatttctaggtcctttgtctagaaaggaaatttgcctcagttgaattagtgaaatatttctgtcgttgatattaaaagtgacttctgagtacagttaagttcctcctatttgccactgggctgttggttagaagcataggtaactgattaagtaggtatgatactgcatttgaaataagtggacacaaactatcctttctccaccatggactcaatctgagaacaacagcattcatttccattcatttccatactggcttttgattatatgcagattcctagtagcatgccttacctacagcactatgtgcatttgctgtcacaataaagtatattttgtcttgcattgatgcagtactgctgcttattttccactgatcttgtctagtgatcatcttaatttttatctctgaacacatacttggtatctttgagtacctgtagctttcttcatttggcaatgatagtgatgtctgacttgattaactgcctaattcacacatgaagacattgactttgccagtattaacttctctgagatcattttgccttagatactgataactatagttcagtatatataaacaaaaaaatttcatattactaggttaacttttaggtaactggcaggtaccagcagcaagctcctctgtgccttttaaaaacttccatttgc

SEQ ID NO: 3450 - protein, 121 aa, Homo sapiens; identical to SEQ ID NO: 263

SEQ ID NO: 3451 - DNA, 792 bp, Homo sapiens
aggtagttaacctgcagtacagtgaagttcaagatcgggtcatgctcactggccgccacatggttcgagatgtgagctgcaaaaactgcaatagcaaactgggatggatctatgagtttgccactgaagacagccagcgatataaggaaggccgcgtgatcctggaacgtgctctagttcgagagagtgagggctttgaggagcatgtaccatctgataactcttgaagatacagagagaaatccatcttttcccaggtctccttcactgaaaacaaaaatctacttacatacactgtcaccttagcatcagagtcggattaatgaactgcggaacaagaggttgtgagaatctaagatggaacctttctttctttctttctttttttttaaattttgtattttccatccaacagcagtgtgtagagagaatattatgcagatgccgttaattttttaccctatgtttacatcttgaggcagcagagtctgtctgcagctatgtggtgagctatgtaaggaaaaaaatctgggctgttagattaagttcctcctatttgccactgggctgttggttagaagcataggtaactgattaagtaggtatgatactgcatttgaaataagtggacacaaactatcctttctccaccatggactcaatctgagaacaacagcattcatttccattcatttccatactggcttttgattatatgcagattcctagtagcatgccttacctacagcactatgtgcatttgctgtcacaataaagtatattttgtcttgc

SEQ ID NO: 3452 - protein, 61 aa, Homo sapiens
MLTGRHMVRDVSCKNCNSKLGWIYEFATEDSQRYKEGRVILERALVRESEGFEEHVPSDNS

SEQ ID NO: 3453 - DNA, 1123 bp, Homo sapiens
aggtagttaacctgcagtacagtgaagttcaagatcgggtcatgctcactggccgccacatggttcgagatgtgagctgcaaaaactgcaatagcaaactgggatggatctatgagtttgccactgaagacagccagcgatataaggaaggccgcgtgatcctggaacgtgctctagttcgagagagtgagggctttgaggagcatgtaccatctgataactcttgaagatacagagagaaatccatcttttcccaggtctccttcactgaaaacaaaaatctacttacatacactgtcaccttagcatcagagtcggattaatgaactgcggaacaagaggttgtgagaatctaagatggaacctttctttctttctttctttttttttaaattttgtattttccatccaacagcagtgtgtagagagaatattatgcagatgccgttaattttttaccctatgtttacatcttgaggcagcagagtctgtctgcagctatgtggtgagctatgtaaggaaaaaaatctgggctgttagattaagttcctcctatttgccactgggctgttggttagaagcataggtaactgattaagtaggtatgatactgcatttgaaataagtggacacaaactatcctttctccaccatggactcaatctgagaacaacagcattcatttccattcatttccatactggcttttgattatatgcagattcctagtagcatgccttacctacagcactatgtgcatttgctgtcacaataaagtatattttgtcttgcattgatgcagtactgctgcttattttccactgatcttgtctagtgatcatcttaatttttatctctgaacacatacttggtatctttgagtacctgtagctttcttcatttggcaatgatagtgatgtctgacttgattaactgcctaattcacacatgaagacattgactttgccagtattaacttctctgagatcattttgccttagatactgataactatagttcagtatatataaacaaaaaaatttcatattactaggttaacttttaggtaactggcaggtaccagcagcaagctcctctgtgccttttaaaaacttccatttgc

SEQ ID NO: 3454 - protein, 61 aa, Homo sapiens; identical to SEQ ID NO: 3452

SEQ ID NO: 3455 - DNA, 4568 bp, Homo sapiens
ttgagctcaaagcttagcagcttcaatgttgttgttaggcataaacagcttgcaaatttcaattttttttctctcctcacttttgaactagatttgggcaatggaggtgatgacagcattttagaagacagaacaggaattctaggtgtttaggcacgttgaagagaaacttgctagaggtgatgaagtggaaagaaaaagacaattcactatagggatcaacattattgcagttctgcaaaggatattttcttttaaaacatccatatctcttctttgccatggaaactacacccaatctacctgaacctgcggcacccctctgatgacccatttggattctctgatttcactgccaagattctcagttctccaaaatacttatcattcaggttgaataaaccagttctacagactgcttcttccatgcatttcccaatgatgctagctgcccttaaaattctttcagatttggaactgtatctgtatggaaacaacagagttttcttgaagtacaactaaggacaggtcaccactaggcactaacatcgctgacttgcatgattatggagatggtctatctgatgctgaaaatgtctctagttttttgacaacggctaaataaccatgggatcaagtggccttgggaaagcagcaacattagatgaactgctgtgcacttgcattgagatgtttgatgacaatggagagctggataatagttatttgccaagaatagttctactgatgcaccgatggtatttatcttccactgaattggcagaaaaacttctctgcatgtatcgaaatgccactggagaaagctgcaatgaatttcgattaaagatctgctacttcatgaggtactggattctgaagtttcctgcagagtttaatttggatcttggtttgattcgtatgactgaggaatttcgggaagtagctagtcaactaggatatgaaaaacacgtcagcctcatcgacatatccagcattccttcctatgactggatgagaagagtcacacagaggaaaaaagtatccaagaagggaaaagcctgtctgctgtttgaccatctggagcccattgaattggctgagcacctcacttttctggagcataaatcttttagaaggatctcattcactgattaccaaagctatgtcatccatggctgcctggagaataatccaaccttggaaagatcgattgctttatttaatggaatctctaagtgggtccagttgatggttcttagcaaaccaaccccccagcaaagggcagaagtcatcacaaagtttatcaatgttgcaaagaagctccttcagctcaaaaattttaacaccctgatggcagtggtgggaggcctcagtcatagttccatttcacgcctcaaagagacccattctcatctttcttcagaagttacaaagaactggaatgaaatgacagagttggtctcctccaacggcaattactgcaattaccgcaaggcctttgccgactgcgatggcttcaaaatccccatccttggagtacacttgaaagacttgatagctgtccatgtcattttcccagactggacagaggagaacaaagtgaacattgtgaaaatgcaccagctctccgttaccctgagtgaactagtctccctgcagaatgcctctcaccacttagaacccaacatggatttgatcaacctgctcacgctttccctggacctctatcacactgaagatgatatttacaaactgtcactggtgctggagcctagaaattctaaatcgcagcctacctcccctacgacgcccaacaagcctgtggtacccctggagtgggcattaggggtgatgccaaagccagaccccacggtcatcaacaagcacataaggaaattagtggagtctgtatttagaaactatgatcacgaccatgatgggtacatttcccaagaggactttgaaagtatagctgccaattttcccttcttggattccttctgtgttctggacaaagatcaggatggcctaattagtaaagatgaaatgatggcttacttcctgagagctaaatcccaactacactgtaaaatgggaccaggatttatccataattttcaggagatgacctatctcaagccaaccttctgcgaacactgtgcgggatttctctggggcataatcaagcaaggatacaaatgcaaagactgtggagccaattgtcacaaacagtgcaaagacctcctggttctggcctgcaggagatttgcccgggcgccctccttgagcagtggtcatgggtcactgcctggaagcccctcgctgcccccagcgcaggatgaggtgtttgagttccctggagtcactgctggacacagggatttagacagcagagccatcacactggttacaggctcttctcgcaagatctctgtgaggctacagagggccaccaccagccaggccacccagactgaacctgtctggtcagaggctggctggggggactcggggtcccacaccttccctaaaatgaaatccaagttccatgacaaagcagcaaaggacaaaggctttgccaaatgggaaaatgagaagcccagggtgcatgctggtgtggatgttgtagaccggggcacggagtttgaacttgaccaggatgaaggagaagagaccagacaggatggtgaggatggctgacttcaggctgcggaaactgaaggcaataatgttggcttttggaaggggcaagacgagaaactctgaagaaagctctgactctcaggaagttatctggaaagatacctggatgtttactgccttgggacactgtgggatctccatgtttggactatgggacagagaattgaccctaactaactaactatgaactatttatttcctcctcccctacccctagttaagtgccacaaagactgtgttatgtagtcagtacttttttctcatgtatctttctctagaccatttatatacgggtgaaatgaaagcttttttgcatgtacttgatactcagtctgtaaactcagacttcgctttttttgtgagactatcctttcaatatttttataaacttttgtgtgtgctgtggcagggaacagttaacaaggagtttatttagaggggtttttttcattttttgtttttcttgttttgttttgttttgttttgttcttcttggtgtgctttttggatgggaccagaacttaacattttcctgaggactaggaagctcatcagacactggaatgcagtgattcttctaatgatggtcaactgcaaggagaaactgtttacatccttcccactacacagttgctatgatatgtaacaagtcacacatgtatatatcacacaagtcttaccaattctgcgtcactaggaagctatagcatggtcgtgaaagctctcctaatacttacttaaatagccatggaagaaaattatgcttgtcccttctgactgggttaagccatctttcttaagattcctgaagtagaaatagcaattaagaaattaattcaagttttgacggttaacatttagcagaaaaacaaaccattgaataagctactaggtgaaatgcaaaacaaccatcaatttttttaaactcaataattttgtgaaaaaaaaaaccaccaccaaacttttggttgtaaaagagaacccttgttcccttcctaagaaactgccttccacaattaaagaatactcatagaaagaaaataatcataaatcatatttgattaacatttcatttaagcttttaaaatatcaattttttaaatagctcccatttacccaaaataactagttatgggtctatttcttccatgattagaggagagagaacttgattcaagatactgaaaaatagagctgggactgagcctgtgaatgacaggaatgatctattaccaggtgactagtcggaaactacacagacgtgcactggtctgcatttgggggctaaagtgtatatattccatttaaaatggaatttgtttgtatttggggcagtcttcagtaaagcctttctcctttcttttctccattgaggacagttctgctcagcaaaattgttgagtacctgttctgggcaggtcccacgctatatgcacaaagttaagaaaaacttggtcttagcccttgggagctgacagcccatgggcattaaggcaaagtagttccagtgatttaaaatacggttccaaatacgctaaaaccaacttgtgccaaccagatttacagattggaaatactgcagatgatgtgaagttatcagttggaggagctgtgattaagctggataataagagaacgtgccatctgtaaagcactcagaaggcagccatccctagatgttggtttcatgtatattacactatctactactatccataaatgcaataatatgcatgttaacaacattaaaaacagcaaacagcaatctaagtacagaaaagctttttgtgtgtttaaaaaaattgaagaaaattcaggaagaaacgtgttaataaacattgtactgttcttttgcttctcaaagg

SEQ ID NO: 3456 - protein, 690 aa, Homo sapiens; identical to SEQ ID NO: 267

SEQ ID NO: 3457 - DNA, 874 bp, Homo sapiens
cataaacagcttgcaaatttcaattttttttctctcctcacttttgaactagatttgggcaatggaggtgatgacagcattttagaagacagaacaggaattctaggtgtttaggcacgttgaagagaaacttgctagaggtgatgaagtggaaagaaaaagacaattcactatagggatcaacattattgcagttctgcaaaggatattttcttttaaaacatccatatctcttctttgccatggaaactacacccaatctacctgaacctgcggcacccctctgatgacccatttggattctctgatttcactgccaagattctcagttctccaaaatacttatcattcaggttgaataaaccagttctacagactgcttcttccatgcatttcccaatgatgctagctgcccttaaaattctttcagatttggaactgtatctgtatggaaacaacagagttttcttgaagtacaactaaggacaggtcaccactaggcactaacatcgctgacttgcatgattatggagatggtctatctgatgctgaaaatgtctctagttttttgacaacggctaaataaccatgggatcaagtggccttgggaaagcagcaacattagatgaactgctgtgcacttgcattgagatgtttgatgacaatggagagctggataatagttatttgccaagaatagttctactgatgcaccgatggtatttatcttccactgaattggcagaaaaacttctctgcatatatcttttcaactactgtgtaatttttacaatcataaatcaagctctgtatttagatagagtgtctatccaaagccagtaaattaagatgaataaatagtctttggttatcc

SEQ ID NO: 3458 - protein, 84 aa, Homo sapiens
MGSSGLGKAATLDELLCTCIEMFDDNGELDNSYLPRIVLLMHRWYLSSTELAEKLLCIYLFNYCVIFTIINQALYLDRVSIQSQ

SEQ ID NO: 3459 - DNA, 924 bp, Homo sapiens
gtctccccctctgcgcacacacacacgcaaacacatttaactttccacttgcagtgacctgcccttcagtgtgacttatcagctgtttggcttttgtcactaaaggaaaacaaattgtggaatatcccgctctgcatgctcatgagatggctgagccaactcaggggttatgaggtggtttgcgagtgaggagaagaatgatcttcagtttctgacctcctggcacggtggcgggcggtatttatcaggaggtacatgtgactggttaagactcagagccccagcttgaaggaaacagctgctctcggcgtgctccggcacttggcagctggacaggcagagtgctgatgtgaaaaataccacgacaaaaccaccctagttctccaaaatacttatcattcaggttgaataaaccagttctacagactgcttcttccatgcatttcccaatgatgctagctgcccttaaaattctttcagatttggaactgtatctgtatggaaacaacagagttttcttgaagtacaactaaggacaggtcaccactaggcactaacatcgctgacttgcatgattatggagatggtctatctgatgctgaaaatgtctctagttttttgacaacggctaaataaccatgggatcaagtggccttgggaaagcagcaacattagatgaactgctgtgcacttgcattgagatgtttgatgacaatggagagctggataatagttatttgccaagaatagttctactgatgcaccgatggtatttatcttccactgaattggcagaaaaacttctctgcatatatcttttcaactactgtgtaatttttacaatcataaatcaagctctgtatttagatagagtgtctatccaaagccagtaaattaagatgaataaatagtctttggttatcc

SEQ ID NO: 3460 - protein, 84 aa, Homo sapiens; identical to SEQ ID NO: 3458

SEQ ID NO: 3461 - DNA, 4723 bp, Homo sapiens
gtctccccctctgcgcacacacacacgcaaacacatttaactttccacttgcagtgacctgcccttcagtgtgacttatcagctgtttggcttttgtcactaaaggaaaacaaattgtggaatatcccgctctgcatgctcatgagatggctgagccaactcaggggttatgaggtggtttgcgagtgaggagaagaatgatcttcagtttctgacctcctggcacggtggcgggcggtatttatcaggaggtacatgtgactggttaagactcagagccccagcttgaaggaaacagctgctctcggcgtgctccggcacttggcagctggacaggcagagtgctgatgtgaaaaataccacgacaaaaccaccctagttctccaaaatacttatcattcaggttgaataaaccagttctacagactgcttcttccatgcatttcccaatgatgctagctgcccttaaaattctttcagatttggaactgtatctgtatggaaacaacagagttttcttgaagtacaactaaggacaggtcaccactaggcactaacatcgctgacttgcatgattatggagatggtctatctgatgctgaaaatgtctctagttttttgacaacggctaaataaccatgggatcaagtggccttgggaaagcagcaacattagatgaactgctgtgcacttgcattgagatgtttgatgacaatggagagctggataatagttatttgccaagaatagttctactgatgcaccgatggtatttatcttccactgaattggcagaaaaacttctctgcatgtatcgaaatgccactggagaaagctgcaatgaatttcgattaaagatctgctacttcatgaggtactggattctgaagtttcctgcagagtttaatttggatcttggtttgattcgtatgactgaggaatttcgggaagtagctagtcaactaggatatgaaaaacacgtcagcctcatcgacatatccagcattccttcctatgactggatgagaagagtcacacagaggaaaaaagtatccaagaagggaaaagcctgtctgctgtttgaccatctggagcccattgaattggctgagcacctcacttttctggagcataaatcttttagaaggatctcattcactgattaccaaagctatgtcatccatggctgcctggagaataatccaaccttggaaagatcgattgctttatttaatggaatctctaagtgggtccagttgatggttcttagcaaaccaaccccccagcaaagggcagaagtcatcacaaagtttatcaatgttgcaaagaagctccttcagctcaaaaattttaacaccctgatggcagtggtgggaggcctcagtcatagttccatttcacgcctcaaagagacccattctcatctttcttcagaagttacaaagaactggaatgaaatgacagagttggtctcctccaacggcaattactgcaattaccgcaaggcctttgccgactgcgatggcttcaaaatccccatccttggagtacacttgaaagacttgatagctgtccatgtcattttcccagactggacagaggagaacaaagtgaacattgtgaaaatgcaccagctctccgttaccctgagtgaactagtctccctgcagaatgcctctcaccacttagaacccaacatggatttgatcaacctgctcacgctttccctggacctctatcacactgaagatgatatttacaaactgtcactggtgctggagcctagaaattctaaatcgcagcctacctcccctacgacgcccaacaagcctgtggtacccctggagtgggcattaggggtgatgccaaagccagaccccacggtcatcaacaagcacataaggaaattagtggagtctgtatttagaaactatgatcacgaccatgatgggtacatttcccaagaggactttgaaagtatagctgccaattttcccttcttggattccttctgtgttctggacaaagatcaggatggcctaattagtaaagatgaaatgatggcttacttcctgagagctaaatcccaactacactgtaaaatgggaccaggatttatccataattttcaggagatgacctatctcaagccaaccttctgcgaacactgtgcgggatttctctggggcataatcaagcaaggatacaaatgcaaagactgtggagccaattgtcacaaacagtgcaaagacctcctggttctggcctgcaggagatttgcccgggcgccctccttgagcagtggtcatgggtcactgcctggaagcccctcgctgcccccagcgcaggatgaggtgtttgagttccctggagtcactgctggacacagggatttagacagcagagccatcacactggttacaggctcttctcgcaagatctctgtgaggctacagagggccaccaccagccaggccacccagactgaacctgtctggtcagaggctggctggggggactcggggtcccacaccttccctaaaatgaaatccaagttccatgacaaagcagcaaaggacaaaggctttgccaaatgggaaaatgagaagcccagggtgcatgctggtgtggatgttgtagaccggggcacggagtttgaacttgaccaggatgaaggagaagagaccagacaggatggtgaggatggctgacttcaggctgcggaaactgaaggcaataatgttggcttttggaaggggcaagacgagaaactctgaagaaagctctgactctcaggaagttatctggaaagatacctggatgtttactgccttgggacactgtgggatctccatgtttggactatgggacagagaattgaccctaactaactaactatgaactatttatttcctcctcccctacccctagttaagtgccacaaagactgtgttatgtagtcagtacttttttctcatgtatctttctctagaccatttatatacgggtgaaatgaaagcttttttgcatgtacttgatactcagtctgtaaactcagacttcgctttttttgtgagactatcctttcaatatttttataaacttttgtgtgtgctgtggcagggaacagttaacaaggagtttatttagaggggtttttttcattttttgtttttcttgttttgttttgttttgttttgttcttcttggtgtgctttttggatgggaccagaacttaacattttcctgaggactaggaagctcatcagacactggaatgcagtgattcttctaatgatggtcaactgcaaggagaaactgtttacatccttcccactacacagttgctatgatatgtaacaagtcacacatgtatatatcacacaagtcttaccaattctgcgtcactaggaagctatagcatggtcgtgaaagctctcctaatacttacttaaatagccatggaagaaaattatgcttgtcccttctgactgggttaagccatctttcttaagattcctgaagtagaaatagcaattaagaaattaattcaagttttgacggttaacatttagcagaaaaacaaaccattgaataagctactaggtgaaatgcaaaacaaccatcaatttttttaaactcaataattttgtgaaaaaaaaaaccaccaccaaacttttggttgtaaaagagaacccttgttcccttcctaagaaactgccttccacaattaaagaatactcatagaaagaaaataatcataaatcatatttgattaacatttcatttaagcttttaaaatatcaattttttaaatagctcccatttacccaaaataactagttatgggtctatttcttccatgattagaggagagagaacttgattcaagatactgaaaaatagagctgggactgagcctgtgaatgacaggaatgatctattaccaggtgactagtcggaaactacacagacgtgcactggtctgcatttgggggctaaagtgtatatattccatttaaaatggaatttgtttgtatttggggcagtcttcagtaaagcctttctcctttcttttctccattgaggacagttctgctcagcaaaattgttgagtacctgttctgggcaggtcccacgctatatgcacaaagttaagaaaaacttggtcttagcccttgggagctgacagcccatgggcattaaggcaaagtagttccagtgatttaaaatacggttccaaatacgctaaaaccaacttgtgccaaccagatttacagattggaaatactgcagatgatgtgaagttatcagttggaggagctgtgattaagctggataataagagaacgtgccatctgtaaagcactcagaaggcagccatccctagatgttggtttcatgtatattacactatctactactatccataaatgcaataatatgcatgttaacaacattaaaaacagcaaacagcaatctaagtacagaaaagctttttgtgtgtttaaaaaaattgaagaaaattcaggaagaaacgtgttaataaacattgtactgttcttttgcttctcaaaggaattattcacttgccactttggttatttttgagttttcgtacataggaagttttatattgccagccttcctgtgataaagatattaaatgtaacttgagtaaaaaataaaaaagaataactatgtatatacatatataaattac

SEQ ID NO: 3462 - protein, 690 aa, Homo sapiens; identical to SEQ ID NO: 267

SEQ ID NO: 3463 - DNA, 4213 bp, Homo sapiens
gataccctttacactagattagcaggcaaaactatgatggtttgtgatatccatgcttgtagaagtaataagaagaaagggaacacagaagctttattttatagtggagtcctgactctaggccttaataattgcatggttttggagttttcttgaagtacaactaaggacaggtcaccactaggcactaacatcgctgacttgcatgattatggagatggtctatctgatgctgaaaatgtctctagttttttgacaacggctaaataaccatgggatcaagtggccttgggaaagcagcaacattagatgaactgctgtgcacttgcattgagatgtttgatgacaatggagagctggataatagttatttgccaagaatagttctactgatgcaccgatggtatttatcttccactgaattggcagaaaaacttctctgcatgtatcgaaatgccactggagaaagctgcaatgaatttcgattaaagatctgctacttcatgaggtactggattctgaagtttcctgcagagtttaatttggatcttggtttgattcgtatgactgaggaatttcgggaagtagctagtcaactaggatatgaaaaacacgtcagcctcatcgacatatccagcattccttcctatgactggatgagaagagtcacacagaggaaaaaagtatccaagaagggaaaagcctgtctgctgtttgaccatctggagcccattgaattggctgagcacctcacttttctggagcataaatcttttagaaggatctcattcactgattaccaaagctatgtcatccatggctgcctggagaataatccaaccttggaaagatcgattgctttatttaatggaatctctaagtgggtccagttgatggttcttagcaaaccaaccccccagcaaagggcagaagtcatcacaaagtttatcaatgttgcaaagaagctccttcagctcaaaaattttaacaccctgatggcagtggtgggaggcctcagtcatagttccatttcacgcctcaaagagacccattctcatctttcttcagaagttacaaagaactggaatgaaatgacagagttggtctcctccaacggcaattactgcaattaccgcaaggcctttgccgactgcgatggcttcaaaatccccatccttggagtacacttgaaagacttgatagctgtccatgtcattttcccagactggacagaggagaacaaagtgaacattgtgaaaatgcaccagctctccgttaccctgagtgaactagtctccctgcagaatgcctctcaccacttagaacccaacatggatttgatcaacctgctcacgctttccctggacctctatcacactgaagatgatatttacaaactgtcactggtgctggagcctagaaattctaaatcgcagcctacctcccctacgacgcccaacaagcctgtggtacccctggagtgggcattaggggtgatgccaaagccagaccccacggtcatcaacaagcacataaggaaattagtggagtctgtatttagaaactatgatcacgaccatgatgggtacatttcccaagaggactttgaaagtatagctgccaattttcccttcttggattccttctgtgttctggacaaagatcaggatggcctaattagtaaagatgaaatgatggcttacttcctgagagctaaatcccaactacactgtaaaatgggaccaggatttatccataattttcaggagatgacctatctcaagccaaccttctgcgaacactgtgcgggatttctctggggcataatcaagcaaggatacaaatgcaaagactgtggagccaattgtcacaaacagtgcaaagacctcctggttctggcctgcaggagatttgcccgggcgccctccttgagcagtggtcatgggtcactgcctggaagcccctcgctgcccccagcgcaggatgaggtgtttgagttccctggagtcactgctggacacagggatttagacagcagagccatcacactggttacaggctcttctcgcaagatctctgtgaggctacagagggccaccaccagccaggccacccagactgaacctgtctggtcagaggctggctggggggactcggggtcccacaccttccctaaaatgaaatccaagttccatgacaaagcagcaaaggacaaaggctttgccaaatgggaaaatgagaagcccagggtgcatgctggtgtggatgttgtagaccggggcacggagtttgaacttgaccaggatgaaggagaagagaccagacaggatggtgaggatggctgacttcaggctgcggaaactgaaggcaataatgttggcttttggaaggggcaagacgagaaactctgaagaaagctctgactctcaggaagttatctggaaagatacctggatgtttactgccttgggacactgtgggatctccatgtttggactatgggacagagaattgaccctaactaactaactatgaactatttatttcctcctcccctacccctagttaagtgccacaaagactgtgttatgtagtcagtacttttttctcatgtatctttctctagaccatttatatacgggtgaaatgaaagcttttttgcatgtacttgatactcagtctgtaaactcagacttcgctttttttgtgagactatcctttcaatatttttataaacttttgtgtgtgctgtggcagggaacagttaacaaggagtttatttagaggggtttttttcattttttgtttttcttgttttgttttgttttgttttgttcttcttggtgtgctttttggatgggaccagaacttaacattttcctgaggactaggaagctcatcagacactggaatgcagtgattcttctaatgatggtcaactgcaaggagaaactgtttacatccttcccactacacagttgctatgatatgtaacaagtcacacatgtatatatcacacaagtcttaccaattctgcgtcactaggaagctatagcatggtcgtgaaagctctcctaatacttacttaaatagccatggaagaaaattatgcttgtcccttctgactgggttaagccatctttcttaagattcctgaagtagaaatagcaattaagaaattaattcaagttttgacggttaacatttagcagaaaaacaaaccattgaataagctactaggtgaaatgcaaaacaaccatcaatttttttaaactcaataattttgtgaaaaaaaaaaccaccaccaaacttttggttgtaaaagagaacccttgttcccttcctaagaaactgccttccacaattaaagaatactcatagaaagaaaataatcataaatcatatttgattaacatttcatttaagcttttaaaatatcaattttttaaatagctcccatttacccaaaataactagttatgggtctatttcttccatgattagaggagagagaacttgattcaagatactgaaaaatagagctgggactgagcctgtgaatgacaggaatgatctattaccaggtgactagtcggaaactacacagacgtgcactggtctgcatttgggggctaaagtgtatatattccatttaaaatggaatttgtttgtatttggggcagtcttcagtaaagcctttctcctttcttttctccattgaggacagttctgctcagcaaaattgttgagtacctgttctgggcaggtcccacgctatatgcacaaagttaagaaaaacttggtcttagcccttgggagctgacagcccatgggcattaaggcaaagtagttccagtgatttaaaatacggttccaaatacgctaaaaccaacttgtgccaaccagatttacagattggaaatactgcagatgatgtgaagttatcagttggaggagctgtgattaagctggataataagagaacgtgccatctgtaaagcactcagaaggcagccatccctagatgttggtttcatgtatattacactatctactactatccataaatgcaataatatgcatgttaacaacattaaaaacagcaaacagcaatctaagtacagaaaagctttttgtgtgtttaaaaaaattgaagaaaattcaggaagaaacgtgttaataaacattgtactgttcttttgcttctcaaagg

SEQ ID NO: 3464 - protein, 690 aa, Homo sapiens; identical to SEQ ID NO: 267

SEQ ID NO: 3465 - DNA, 4357 bp, Homo sapiens
gataccctttacactagattagcaggcaaaactatgatggtttgtgatatccatgcttgtagaagtaataagaagaaagggaacacagaagctttattttatagtggagtcctgactctaggccttaataattgcatggttttggagttttcttgaagtacaactaaggacaggtcaccactaggcactaacatcgctgacttgcatgattatggagatggtctatctgatgctgaaaatgtctctagttttttgacaacggctaaataaccatgggatcaagtggccttgggaaagcagcaacattagatgaactgctgtgcacttgcattgagatgtttgatgacaatggagagctggataatagttatttgccaagaatagttctactgatgcaccgatggtatttatcttccactgaattggcagaaaaacttctctgcatgtatcgaaatgccactggagaaagctgcaatgaatttcgattaaagatctgctacttcatgaggtactggattctgaagtttcctgcagagtttaatttggatcttggtttgattcgtatgactgaggaatttcgggaagtagctagtcaactaggatatgaaaaacacgtcagcctcatcgacatatccagcattccttcctatgactggatgagaagagtcacacagaggaaaaaagtatccaagaagggaaaagcctgtctgctgtttgaccatctggagcccattgaattggctgagcacctcacttttctggagcataaatcttttagaaggatctcattcactgattaccaaagctatgtcatccatggctgcctggagaataatccaaccttggaaagatcgattgctttatttaatggaatctctaagtgggtccagttgatggttcttagcaaaccaaccccccagcaaagggcagaagtcatcacaaagtttatcaatgttgcaaagaagctccttcagctcaaaaattttaacaccctgatggcagtggtgggaggcctcagtcatagttccatttcacgcctcaaagagacccattctcatctttcttcagaagttacaaagaactggaatgaaatgacagagttggtctcctccaacggcaattactgcaattaccgcaaggcctttgccgactgcgatggcttcaaaatccccatccttggagtacacttgaaagacttgatagctgtccatgtcattttcccagactggacagaggagaacaaagtgaacattgtgaaaatgcaccagctctccgttaccctgagtgaactagtctccctgcagaatgcctctcaccacttagaacccaacatggatttgatcaacctgctcacgctttccctggacctctatcacactgaagatgatatttacaaactgtcactggtgctggagcctagaaattctaaatcgcagcctacctcccctacgacgcccaacaagcctgtggtacccctggagtgggcattaggggtgatgccaaagccagaccccacggtcatcaacaagcacataaggaaattagtggagtctgtatttagaaactatgatcacgaccatgatgggtacatttcccaagaggactttgaaagtatagctgccaattttcccttcttggattccttctgtgttctggacaaagatcaggatggcctaattagtaaagatgaaatgatggcttacttcctgagagctaaatcccaactacactgtaaaatgggaccaggatttatccataattttcaggagatgacctatctcaagccaaccttctgcgaacactgtgcgggatttctctggggcataatcaagcaaggatacaaatgcaaagactgtggagccaattgtcacaaacagtgcaaagacctcctggttctggcctgcaggagatttgcccgggcgccctccttgagcagtggtcatgggtcactgcctggaagcccctcgctgcccccagcgcaggatgaggtgtttgagttccctggagtcactgctggacacagggatttagacagcagagccatcacactggttacaggctcttctcgcaagatctctgtgaggctacagagggccaccaccagccaggccacccagactgaacctgtctggtcagaggctggctggggggactcggggtcccacaccttccctaaaatgaaatccaagttccatgacaaagcagcaaaggacaaaggctttgccaaatgggaaaatgagaagcccagggtgcatgctggtgtggatgttgtagaccggggcacggagtttgaacttgaccaggatgaaggagaagagaccagacaggatggtgaggatggctgacttcaggctgcggaaactgaaggcaataatgttggcttttggaaggggcaagacgagaaactctgaagaaagctctgactctcaggaagttatctggaaagatacctggatgtttactgccttgggacactgtgggatctccatgtttggactatgggacagagaattgaccctaactaactaactatgaactatttatttcctcctcccctacccctagttaagtgccacaaagactgtgttatgtagtcagtacttttttctcatgtatctttctctagaccatttatatacgggtgaaatgaaagcttttttgcatgtacttgatactcagtctgtaaactcagacttcgctttttttgtgagactatcctttcaatatttttataaacttttgtgtgtgctgtggcagggaacagttaacaaggagtttatttagaggggtttttttcattttttgtttttcttgttttgttttgttttgttttgttcttcttggtgtgctttttggatgggaccagaacttaacattttcctgaggactaggaagctcatcagacactggaatgcagtgattcttctaatgatggtcaactgcaaggagaaactgtttacatccttcccactacacagttgctatgatatgtaacaagtcacacatgtatatatcacacaagtcttaccaattctgcgtcactaggaagctatagcatggtcgtgaaagctctcctaatacttacttaaatagccatggaagaaaattatgcttgtcccttctgactgggttaagccatctttcttaagattcctgaagtagaaatagcaattaagaaattaattcaagttttgacggttaacatttagcagaaaaacaaaccattgaataagctactaggtgaaatgcaaaacaaccatcaatttttttaaactcaataattttgtgaaaaaaaaaaccaccaccaaacttttggttgtaaaagagaacccttgttcccttcctaagaaactgccttccacaattaaagaatactcatagaaagaaaataatcataaatcatatttgattaacatttcatttaagcttttaaaatatcaattttttaaatagctcccatttacccaaaataactagttatgggtctatttcttccatgattagaggagagagaacttgattcaagatactgaaaaatagagctgggactgagcctgtgaatgacaggaatgatctattaccaggtgactagtcggaaactacacagacgtgcactggtctgcatttgggggctaaagtgtatatattccatttaaaatggaatttgtttgtatttggggcagtcttcagtaaagcctttctcctttcttttctccattgaggacagttctgctcagcaaaattgttgagtacctgttctgggcaggtcccacgctatatgcacaaagttaagaaaaacttggtcttagcccttgggagctgacagcccatgggcattaaggcaaagtagttccagtgatttaaaatacggttccaaatacgctaaaaccaacttgtgccaaccagatttacagattggaaatactgcagatgatgtgaagttatcagttggaggagctgtgattaagctggataataagagaacgtgccatctgtaaagcactcagaaggcagccatccctagatgttggtttcatgtatattacactatctactactatccataaatgcaataatatgcatgttaacaacattaaaaacagcaaacagcaatctaagtacagaaaagctttttgtgtgtttaaaaaaattgaagaaaattcaggaagaaacgtgttaataaacattgtactgttcttttgcttctcaaaggaattattcacttgccactttggttatttttgagttttcgtacataggaagttttatattgccagccttcctgtgataaagatattaaatgtaacttgagtaaaaaataaaaaagaataactatgtatatacatatataaattac

SEQ ID NO: 3466 - protein, 690 aa, Homo sapiens; identical to SEQ ID NO: 267

SEQ ID NO: 3467 - DNA, 4816 bp, Homo sapiens
gataccctttacactagattagcaggcaaaactatgatggtttgtgatatccatgcttgtagaagtaataagaagaaagggaacacagaagctttattttatagtggagtcctgactctaggccttaataattgcatggttttggagttttcttgaagtacaactaaggacaggtcaccactaggcactaacatcgctgacttgcatgattatggagatggtctatctgatgctgaaaatgtctctagttttttgacaacggctaaataaccatgggatcaagtggccttgggaaagcagcaacattagatgaactgctgtgcacttgcattgagatgtttgatgacaatggagagctggataatagttatttgccaagaatagttctactgatgcaccgatggtatttatcttccactgaattggcagaaaaacttctctgcatgtatcgaaatgccactggagaaagctgcaatgaatttcgattaaagatctgctacttcatgaggtactggattctgaagtttcctgcagagtttaatttggatcttggtttgattcgtatgactgaggaatttcgggaagtagctagtcaactaggatatgaaaaacacgtcagcctcatcgacatatccagcattccttcctatgactggatgagaagagtcacacagaggaaaaaagtatccaagaagggaaaagcctgtctgctgtttgaccatctggagcccattgaattggctgagcacctcacttttctggagcataaatcttttagaaggatctcattcactgattaccaaagctatgtcatccatggctgcctggagaataatccaaccttggaaagatcgattgctttatttaatggaatctctaagtgggtccagttgatggttcttagcaaaccaaccccccagcaaagggcagaagtcatcacaaagtttatcaatgttgcaaagaagctccttcagctcaaaaattttaacaccctgatggcagtggtgggaggcctcagtcatagttccatttcacgcctcaaagagacccattctcatctttcttcagaagttacaaagaactggaatgaaatgacagagttggtctcctccaacggcaattactgcaattaccgcaaggcctttgccgactgcgatggcttcaaaatccccatccttggagtacacttgaaagacttgatagctgtccatgtcattttcccagactggacagaggagaacaaagtgaacattgtgaaaatgcaccagctctccgttaccctgagtgaactagtctccctgcagaatgcctctcaccacttagaacccaacatggatttgatcaacctgctcacgctttccctggacctctatcacactgaagatgatatttacaaactgtcactggtgctggagcctagaaattctaaatcgcagcctacctcccctacgacgcccaacaagcctgtggtacccctggagtgggcattaggggtgatgccaaagccagaccccacggtcatcaacaagcacataaggaaattagtggagtctgtatttagaaactatgatcacgaccatgatgggtacatttcccaagaggactttgaaagtatagctgccaattttcccttcttggattccttctgtgttctggacaaagatcaggatggcctaattagtaaagatgaaatgatggcttacttcctgagagctaaatcccaactacactgtaaaatgggaccaggatttatccataattttcaggagatgacctatctcaagccaaccttctgcgaacactgtgcgggatttctctggggcataatcaagcaaggatacaaatgcaaagactgtggagccaattgtcacaaacagtgcaaagacctcctggttctggcctgcaggagatttgcccgggcgccctccttgagcagtggtcatgggtcactgcctggaagcccctcgctgcccccagcgcaggatgaggtgtttgagttccctggagtcactgctggacacagggatttagacagcagagccatcacactggttacaggctcttctcgcaagatctctgtgaggctacagagggccaccaccagccaggccacccagactgaacctgtctggtcagaggctggctggggggactcggggtcccacaccttccctaaaatgaaatccaagttccatgacaaagcagcaaaggacaaaggctttgccaaatgggaaaatgagaagcccagggtgcatgctggtgtggatgttgtagaccggggcacggagtttgaacttgaccaggatgaaggagaagagaccagacaggatggtgaggatggctgacttcaggctgcggaaactgaaggcaataatgttggcttttggaaggggcaagacgagaaactctgaagaaagctctgactctcaggaagttatctggaaagatacctggatgtttactgccttgggacactgtgggatctccatgtttggactatgggacagagaattgaccctaactaactaactatgaactatttatttcctcctcccctacccctagttaagtgccacaaagactgtgttatgtagtcagtacttttttctcatgtatctttctctagaccatttatatacgggtgaaatgaaagcttttttgcatgtacttgatactcagtctgtaaactcagacttcgctttttttgtgagactatcctttcaatatttttataaacttttgtgtgtgctgtggcagggaacagttaacaaggagtttatttagaggggtttttttcattttttgtttttcttgttttgttttgttttgttttgttcttcttggtgtgctttttggatgggaccagaacttaacattttcctgaggactaggaagctcatcagacactggaatgcagtgattcttctaatgatggtcaactgcaaggagaaactgtttacatccttcccactacacagttgctatgatatgtaacaagtcacacatgtatatatcacacaagtcttaccaattctgcgtcactaggaagctatagcatggtcgtgaaagctctcctaatacttacttaaatagccatggaagaaaattatgcttgtcccttctgactgggttaagccatctttcttaagattcctgaagtagaaatagcaattaagaaattaattcaagttttgacggttaacatttagcagaaaaacaaaccattgaataagctactaggtgaaatgcaaaacaaccatcaatttttttaaactcaataattttgtgaaaaaaaaaaccaccaccaaacttttggttgtaaaagagaacccttgttcccttcctaagaaactgccttccacaattaaagaatactcatagaaagaaaataatcataaatcatatttgattaacatttcatttaagcttttaaaatatcaattttttaaatagctcccatttacccaaaataactagttatgggtctatttcttccatgattagaggagagagaacttgattcaagatactgaaaaatagagctgggactgagcctgtgaatgacaggaatgatctattaccaggtgactagtcggaaactacacagacgtgcactggtctgcatttgggggctaaagtgtatatattccatttaaaatggaatttgtttgtatttggggcagtcttcagtaaagcctttctcctttcttttctccattgaggacagttctgctcagcaaaattgttgagtacctgttctgggcaggtcccacgctatatgcacaaagttaagaaaaacttggtcttagcccttgggagctgacagcccatgggcattaaggcaaagtagttccagtgatttaaaatacggttccaaatacgctaaaaccaacttgtgccaaccagatttacagattggaaatactgcagatgatgtgaagttatcagttggaggagctgtgattaagctggataataagagaacgtgccatctgtaaagcactcagaaggcagccatccctagatgttggtttcatgtatattacactatctactactatccataaatgcaataatatgcatgttaacaacattaaaaacagcaaacagcaatctaagtacagaaaagctttttgtgtgtttaaaaaaattgaagaaaattcaggaagaaacgtgttaataaacattgtactgttcttttgcttctcaaaggaattattcacttgccactttggttatttttgagttttcgtacataggaagttttatattgccagccttcctgtgataaagatattaaatgtaacttgagtaaaaaataaaaaagaataactatgtatatacatatataaattacatatgggcctgtatattgtgtgtgtatatacacagtaagtcctcatttgtccatagattcttggaaactgctactttaacaacttgaagttggtcttgaaacaactataacaagaccaactttttttctcatcaacgttgtaatgaaaggaaattgaatgaaattaccttgtggaggaccagtttgaacacttcatttgacttaaagttgctatttccaagaatctacagaccatgttaagtgaggacttacttactgtatacacacacacacacacacacacacacgcacacccccctattattactttgctgaagactaatttaagtctataacaaaactgccttataattatgattatatcatttactgacaaccagtgactctgatgtttccaatctatcaatttcccatcatcagtaaaataaaataggcaaatccacgatggggcaaaaagaa

SEQ ID NO: 3468 - protein, 690 aa, Homo sapiens; identical to SEQ ID NO: 267

SEQ ID NO: 3469 - DNA, 3764 bp, Homo sapiens
ccatcgctgagccagttatccatttgacacatggaaatacccaagggtgttctggttctcttgagagagcatctccttgccttactgtgtggcttatttggattcttggttggctgtggtagtgcttctgtcatctcatctccagcagatgctggtgccagtcatcacaggacttggaagctgagtcaggaggaagggaacatgctcctccaagtctgcactaactcctgataacagggaattcagaaggaaggagtcacttggttttctctctttatttatgtaaccttcacagtgcgaggcttcaagctgggactcagggtacagaggtgcaaaagacagatgtgctgcccactttcatgaggcttagagcctggcacagttgtctgttgtgggaattacaaaatagtaggcaactgcccacggctgatgtattttatttggcccatacggaatcctaaacttttgtcgttgttagttcccagtgtttgaaaattgggatagtttatctaaaactccagatttctggcttctcttaacaaatcagaagacttggcaactcaaggtccaacgttaggctgacagcaatttgtcatcactgagcagtgatgttcatcacaaaccgcacctctccctgtgacttccctaacagagagtggtgtcaggtcccacttatcatcacacatttttttttattgtggcgctaaggggaaagatccctaaataaattacatctgcaaagactctgttttccaaataagacgtttctatcaaaatgtaccttttacgcatcctacttggctcttttatataatggtatggctcccaaaggcatttgtttgtgacatgcggatgtttcctttcctgtaaaaaggcagagcctgggaggtgggagtgattactgttcaggggaaggtgaatacgatgtctcttctttgtaagcaggattgtcatgatcttgaaatgatactggggagattttacagttaagtcggttttattttgtttagaaaaaaaactttgtgacaaagtgcaggtaaaagaaacgtgacctgattatgaagtccttaatttaaatgttatattcaagcagctgctagaacagtgactagaacaatccctgacacatagtagattactgataaatatttgttgaatgaatgatttgaaaatgaaattttatgacaccaacttcatttttaaaggaagtagaacaggaaaaggaatctttgaaaacatcttcgcctctgagttttctctggcttcctccttctttcttttcccccacactccacctcatacacatgttagataaaatatgttaaagaaaacttttcattcctacatggtcaaagaagggagcccgcactggttatgttcatggccagggaagtgatgtgattcattgagtgtcctagctttaaaggactaggtgagaatggttcaggtttattttaagcctcatgacttctgttttaggtgagtggaaacatgcactgtaaggctttacagagtttatccatgttctccagcctggatctgtgttgttgtccttgcctacaatgatcttcctctctcttttgtccaaattaagtcccaatcctcctggttaagtcccaattcacaaggacctccatgaatccatcctgatcatttctgtctccggggcccctatgcatagtaataatataactaataacaaatgcgataataacagtaacattaacactataaaataacacttcttgagattttattgtgtaccaggtcctgtgtgaaatactttacatgcattatttcatttggtcctgacacaaatccaactcagtagggacttttatgatcatttccattttccagatgcagaaactgagtgtcagagaggaaattacttgctaaaggttacagagctagccagtggcaggctgcatgcttgaacccagccctgcctgaccacacagcctctgccctcgtgtatttactatgctgcctccctgatttctgaccggttcctggagcacttaaagtggagcaactacttcacactcagcatgtgctgttttattgctacgaacacatctttttaggttcaggccctgtttattcaaataaattatcagggccttgagggcaagaaatgattttatatcagcttgcctcactaggacttagcacaatgctctcaaataataggagcctagttaactgctcctttatttcaacagttctttaatcaaacttcaaaggcagcatttattacatttacaagtcttattgtttgcatctgtccccacttccagcctggaaacatcacatatccctcatccgtgactcagcactgagcacctgggagctgctcagtaaatattgctgaggaattgagttgatggttctcgtcaatactgatgattaaccaggattaacgttttctcttttaaatttcattttccatctctgcgtgccgtctttttattgttctgcatttactcaaattattagacagtgaacttaaaacattcaacttgaaaaaaaattcagcaacgtaaataaataaataaatgtaatccgacatttttatcccttctaattttgttgtagctttccctggacctctatcacactgaagatgatatttacaaactgtcactggtgctggagcctagaaattctaaatcgcagcctacctcccctacgacgcccaacaagcctgtggtacccctggagtgggcattaggggtgatgccaaagccagaccccacggtcatcaacaagcacataaggaaattagtggaggtaagtggttgagggagaataaagagagggcactagaagaccctttctctttccagaatgttctgcgattgtccaggaatctgatggaacccctgaaaacaaccctctggcaggtaggaacaatttagcaggcacttagtcctaccaggcattgggtcctggggagagtcgatcagaaaggcccttttccctttgttgtctctcttgcccagatactctcagctacttccagctcctctctttcacaggcatttgccacctctgtcattgtcaacagctcaagggattggggattagaatcactcatgaaaaacccacataggtcccactaagatgcccaataaattgattacccaagggcaggaaagaaatcctgtaagttggatagtttctccttttgtatagttttggaattttatgacacagcagcccgatgttactgagattagaaaaatcacctaatgtaggacaaggctctgtcagagttttccgtgtagaaaaaagagtagggccgggcgcggtggctcacgcctgtaatcccagcacttgggaggccgaggcgggcggatcacgaggtcaggagatcgagaccacggtgaaaccctgtccctactaaaaatacaaaaaattagccgggcgcgatggcgggcgcctgcagtctcagctactcaggaggcagaggcaggagaatggagtgaacccgggaagcagagcttgcagtgaggtgagatcgcgccactgcactccagcctgggagacagagtgagactccgtctgaaaaaaaaaaaaagaaaagaaaagaaaagaaaaaagagtagaagtgccgatgggggaacacggaaacatctcgggtacaggaaactgcgatcctgaattaaatgtctactttaatggattggtaggtacatctgctggtgcaacagaattgagtctttgggatagaatgtgctttttgctgggagaagatattt

SEQ ID NO: 3470 - protein, 35 aa, Homo sapiens
MIFTNCHWCWSLEILNRSLPPLRRPTSLWYPWSGH

SEQ ID NO: 3471 - DNA, 338 bp, Homo sapiens
aggaatcttaagaaagatggcttaacccagtcagaagggacaagcataattttcttccatggctatttaaagccaactgggagccgggatgggaaactactaaagtttgatgcaccagactttggcctgatgcgctctcagcaaaatgtacagaggagatggccacttggtctttgggagcccctggctctctctttttaatgacactagctgctcttagcgcccactacaggaaatgaagcaatggaagaagcgcacctcatgtgaaagcatttggattttgctaggctattttctgagtagtatttgtcccgtggaaaaatacagaagaggaaatg

SEQ ID NO: 3472 - protein, 33 aa, Homo sapiens
MKQWKKRTSCESIWILLGYFLSSICPVEKYRRG

SEQ ID NO: 3473 - DNA, 343 bp, Homo sapiens
gttcaaggctgcagcgagctatgattgtaccactgcactccagcctgggcaacagagcgacacactgtctggattaaaaaaaaaaaaaaaagaaaaggaaagtaaagcaggaacttcccacagattttgaataaaagctcaaaattaaaacagaggtaaaaccaaaaccaaggggatatgagaagaaaaaaaaaaaggacagttaaacagatgtcagaaaactcaccagaaaacaaaattgctacagagcatatgaaaattgtttttccaagaattaaagctacttaatgaattcctgactcacagaaatcatggtaataataaatgtttattgttttatgtt

SEQ ID NO: 3474 - protein, 36 aa, Homo sapiens [sequence omitted]

SEQ ID NO: 3475 - DNA, 3550 bp, Homo sapiens
cacaactacatacctttgctgttacagcatgaaagcagccatagacaatatataaatgagtgagtgtggcagtgtcctaatgaaaccttatgtacaaaaacagtggttgttgtcttaacagtggggttttactgttttgacgttttaactcataaatacagtttgctgtatggaacatgttaagattttacagtgtcaaatccatttagaatgacctttccagaaacttagctgtatttattgttttagaacaggagttggcagcctttcagaaatgatttgccaaaattatggcctctgtccttctagcattacattttgggtataggaaatttgatacacaagttgacttttttctacttctaataggacctgagggccttgaaaatatcttttcccaaaactggttttgttatattgtcagaagaatctcactttgtcacataaccagaaatcctaagattcaaatgattcttaatcatcttttataaaaattgaaatgtccttgggaatgttaaaggaatgagattgaatatttataccttcaactgaattacctgaaacagattgcagcccccattataccaggctgaaatcagcacacaaggggatgatactgacacaaagggaaccatgccaaaaagtgctttgaaggttttatggttgttttgaagggaatggggtgaggaaagtagggggaagggagtcctgagaagaatatagatgaaagagggctctctttgattagccagagggcaacataagatttggagaccatgggaaaggagctctggggtgccttcctgcttctcctgtgagttaagctttgacttcttataaatgttgtttcacacctcttctggacaggctcctaattaatgggagacaagagagcaaggtagttgtgtcattgatgctcacaagtagtgagaagttaaaaaaaaaaaattaattgtcattaaaaattggtcacctgccttcttttgcaaaatttttaacagatgccaacccctgttctggaggttccttaataccagaattcaagattccaaatttttagatgttacttacctcgatccttcggtttcaaagagaatcgcttattttaaaattaacatttaaacattatatatcgcttaaataactgaattacataaccagtttatttcttatttcatttgcaggtaaaagtagtttttctttcttgtttttatccattcttgcagctttaacagttacatatcaataggtctatatagttgtgactccagacttatgactataactatagctgtatctcattttgaaatcttattttgtttacttcagcatacctcatctcagaactagaagctgccagaatgctctgtgtgaatgctcctccaaaaaaagctcaagaaggaggcggtagtgaggtctttcaagagttgaaaggcatatgtattgctctaggaatgtccaaacctccagccaatataactatgttccaattcttcagcgggattgaaaaaaaattaaaggaaacattagcaaaagttccacctaatcatgtgggaaagcctttactgaagaagccaatgggaccagcccactggagccagacagaaaaattagccaaggtttaccagccgaaacgttcagtcttatcccctaaaactactatttctgttgcccatcttttggctgcaaggcaggacttgtcaaagattttaaggacaagcagcggctctataagagaaaagactgcctgtgccatcaataaggtgttgatgggcagggtgcctgacagaggtggtagacccaatgaaatcgaacctccacccccagagatgccaccgtggcagaagaggcaagatggcccccagcagcaaacaggaggccgaggaggagggagaggtggctatgaacattcctcatacggaggacgaggaggtcatgaacaaggaggcgggagaggtggacgtggtggctatgaccatggtggccgagggggaggaagaggaaataagcatcaaggaggctggacagatggagggagtggtggaggaggtggctaccaagatggtggttatcgagattcaggtttccagccaggtggctatcatggtggccacagcagtggtggctatcaaggcggaggttatggtggcttccaaacatcttcttcatatacaggaagtggataccagggtggtggctaccagcaggacaatagataccaagatggcgggcaccatggtgatcgtggtggtggtcgtggtgggcgaggtggtcgtggaggccgaggtggtcgtgcaggccagggaggaggctggggaggaagagggagccagaattatcaccaagggggtcaatttgaacagcatttccagcatggaggttatcagtataatcattctggatttggacagggaagacattacactagttgaggctaccgaaccttacattttgctagagctcaagtaatagaaacttagtttcagaatcctgaattcagcacctattttgaattaatgtgagaccacaggtggcaggcagattcctgcttggcataagcatttgtaggtcttcattcaattctgttagatttttttattggacttacataatgccgtttatttgagaaacacataacatctctcctttctatgaaaaattttttaaaaggtggttaaaattgcctttaattgcccagtagactaattccacagtcagaacatgcaaacttttttgaagaaattacttgaataagtagttttcatgttttcaatatgcagttttgaaaatgaggattcacctagacttttttagatttactactaggaaaccttcctcatatgaataaccatttatatgtgttttgcttaaagtattccaatgcctattttccaagcacagttctgccccccggttgacttttatgccacgtgtgcttcatgatggaacttttaggtcagttcctattaaatgagctcttttgcagatagcacattcagtagccttattttgttgatggaatactgtatcatatgctcaactctgaaaaccttgaacacggccaaaatccataaagattataaaagcaaactaagttgtgaagctatagtacatgtaggcatttagttaagtatagcaattcaaactgacctgcatccatccaaaacaaattcctccttcaaccttatttttacttgaaatttgctagaagaaatagcaaaccgaaatttgttttatgcatgagttaataccactggctcagcaaatacaagttagtttgctttaagcaggtaactttttttgtaatggaagaaatgcactacaaagttaagacagatttttgctaagtgcaggaggccctttattattgctgcagaaaacaaaagcctggctgagttgatgttttacattctcccttactgaaatctacatgacatgatgcttcttgctgggtttttgtacatgtaaacattgtcaagctgtgaaagaaaatggctggaggtgtgctttgtgtgaaaggtgagcaataaagtatctgttaagttctctc

SEQ ID NO: 3476 - protein, 356 aa, Homo sapiens
MLCVNAPPKKAQEGGGSEVFQELKGICIALGMSKPPANITMFQFFSGIEKKLKETLAKVPPNHVGKPLLKKPMGPAHWSQTEKLAKVYQPKRSVLSPKTTISVAHLLAARQDLSKILRTSSGSIREKTACAINKVLMGRVPDRGGRPNEIEPPPPEMPPWQKRQDGPQQQTGGRGGGRGGYEHSSYGGRGGHEQGGGRGGRGGYDHGGRGGGRGNKHQGGWTDGGSGGGGGYQDGGYRDSGFQPGGYHGGHSSGGYQGGGYGGFQTSSSYTGSGYQGGGYQQDNRYQDGGHHGDRGGGRGGRGGRGGRGGRAGQGGGWGGRGSQNYHQGGQFEQHFQHGGYQYNHSGFGQGRHYTS

SEQ ID NO: 3477 - DNA, 2805 bp, Homo sapiens
atgcgcagtgcgggagctgaggcgccagctgtggatttggaagttccggggaagtcgcgcatgcgcgagtgtacgcgttgccggcgaagaggggagcctgacgactcggaaatttgaataccacagtagcatggagtgtgacctcatggagactgacatcttggagtcgttggaagatctaggttacaagggcccattgttggaagatggagcgctctctcaggcagtctctgctggagccagttcccccgagtttaccaaactctgtgcttggctggtgtctgaattaagagtgctctgtaaactagaggaaaacgtgcaagcaactaacagtccgagtgaagctgaagaattccagcttgaggtgagtgggctactaggggagatgaactgcccgtatctttcactgacatctggggatgtgaccaagcgccttctcattcagaagaactgcctcctcttgctcacatacctcatctcagaactagaagctgccagaatgctctgtgtgaatgctcctccaaaaaaagctcaagaaggaggcggtagtgaggtctttcaagagttgaaaggcatatgtattgctctaggaatgtccaaacctccagccaatataactatgttccaattcttcagcgggattgaaaaaaaattaaaggaaacattagcaaaagttccacctaatcatgtgggaaagcctttactgaagaagccaatgggaccagcccactgggaaaagatagaagcaattaaccaagccatagccaatgaatatgaagtccggagaaagctgctaataaaacgtttggatgtcactgtacaatcctttggctggtctgacagagctaagagccagacagaaaaattagccaaggtttaccagccgaaacgttcagtcttatcccctaaaactactatttctgttgcccatcttttggctgcaaggcaggacttgtcaaagattttaaggacaagcagcggctctataagagaaaagactgcctgtgccatcaataaggtgttgatgggcagggtgcctgacagaggtggtagacccaatgaaatcgaacctccacccccagagatgccaccgtggcagaagaggcaagatggcccccagcagcaaacaggaggccgaggaggagggagaggtggctatgaacattcctcatacggaggacgaggaggtcatgaacaaggaggcgggagaggtggacgtggtggctatgaccatggtggccgagggggaggaagaggaaataagcatcaaggaggctggacagatggagggagtggtggaggaggtggctaccaagatggtggttatcgagattcaggtttccagccaggtggctatcatggtggccacagcagtggtggctatcaaggcggaggttatggtggcttccaaacatcttcttcatatacaggaagtggataccagggtggtggctaccagcaggacaatagataccaagatggcgggcaccatggtgatcgtggtggtggtcgtggtgggcgaggtggtcgtggaggccgaggtggtcgtgcaggccagggaggaggctggggaggaagagggagccagaattatcaccaagggggtcaatttgaacagcatttccagcatggaggttatcagtataatcattctggatttggacagggaagacattacactagttgaggctaccgaaccttacattttgctagagctcaagtaatagaaacttagtttcagaatcctgaattcagcacctattttgaattaatgtgagaccacaggtggcaggcagattcctgcttggcataagcatttgtaggtcttcattcaattctgttagatttttttattggacttacataatgccgtttatttgagaaacacataacatctctcctttctatgaaaaattttttaaaaggtggttaaaattgcctttaattgcccagtagactaattccacagtcagaacatgcaaacttttttgaagaaattacttgaataagtagttttcatgttttcaatatgcagttttgaaaatgaggattcacctagacttttttagatttactactaggaaaccttcctcatatgaataaccatttatatgtgttttgcttaaagtattccaatgcctattttccaagcacagttctgccccccggttgacttttatgccacgtgtgcttcatgatggaacttttaggtcagttcctattaaatgagctcttttgcagatagcacattcagtagccttattttgttgatggaatactgtatcatatgctcaactctgaaaaccttgaacacggccaaaatccataaagattataaaagcaaactaagttgtgaagctatagtacatgtaggcatttagttaagtatagcaattcaaactgacctgcatccatccaaaacaaattcctccttcaaccttatttttacttgaaatttgctagaagaaatagcaaaccgaaatttgttttatgcatgagttaataccactggctcagcaaatacaagttagtttgctttaagcaggtaactttttttgtaatggaagaaatgcactacaaagttaagacagatttttgctaagtgcaggaggccctttattattgctgcagaaaacaaaagcctggctgagttgatgttttacattctcccttactgaaatctacatgacatgatgcttcttgctgggtttttgtacatgtaaacattgtcaagctgtgaaagaaaatggctggaggtgtgctttgtgtgaaaggtgagcaataaagtatctgttaagttctctc

SEQ ID NO: 3478 - protein, 518 aa, Homo sapiens; identical to SEQ ID NO: 269

SEQ ID NO: 3479 - DNA, 472 bp, Homo sapiens
gcgaagaggggagcctgacgactcggaaatttgaataccacagtagcatggagtgtgacctcatggagactgacatcttggagtcgttggaagatctaggttacaagggcccattgttggaagatggagcgctctctcaggcagtctctgctggagccagttcccccgagtttaccaaactctgtgcttggctggtgtctgaattaagagtgctctgtaaactagaggaaaacgtgcaagcaactaacagtccgagtgaagctgaagaattccagcttgaggtgagtgggctactaggggagatgaactgcccgtatctttcactgacatctggggatgtgaccaagcgccttctcattcagaagaactgcctcctcttgctcagtaagttcatggctactagaatatagctattactttctgtttatgttttccatgactaataaactgaccatggttttttgtttgttta

SEQ ID NO: 3480 - protein, 120 aa, Homo sapiens
MECDLMETDILESLEDLGYKGPLLEDGALSQAVSAGASSPEFTKLCAWLVSELRVLCKLEENVQATNSPSEAEEFQLEVSGLLGEMNCPYLSLTSGDVTKRLLIQKNCLLLLSKFMATRI

SEQ ID NO: 3481 - DNA, 756 bp, Homo sapiens
atgcctagccccaggccgcgaggcagcccgccacccgctccctcgggctctcgggtccgacctccgcgctctggccgctctccggcgcccaggtcccctactggcccgaacacgccccgcgctcccggacgcttcgagtcccctttctcggtcgaggccatcctggcgaggcccgacccctgcgcgccggcggcctcccagccgtcgggctccgcctgcgtccacccggccttctggaccgctgcttccctgtgcgccaccgggggtctgccctgggcttgcccgacatcgtggctgcccgcctacctgagcgtaggtttttaccctgtgccagggccgcgcgtggctcccgtctgcggcctgctgggcttcggcgtcacagggttggagctggctcactgctcaggactctgggccttcccagactgggccccaacggaggacctacaggacactgagagacagcaaaagagagtccgaactatgtttaacttggagcagctggaagagttggagaaagtgtttgcaaaacagcacaatctggtggggaagaagagagcccagctggcagctcggctcaaacttacagagaaccaggtgagagtctggttccagaaccgcagggtcaagtatcagaagcagcaaaagctgagggcagcagttacatctgccgaggctgcctccctggatgagccttccagcagctccatcgccagtatccagagtgatgatgccgagtcaggagtggacggctga

SEQ ID NO: 3482 - protein, 251 aa, Homo sapiens
MPSPRPRGSPPPAPSGSRVRPPRSGRSPAPRSPTGPNTPRAPGRFESPFSVEAILARPDPCAPAASQPSGSACVHPAFWTAASLCATGGLPWACPTSWLPAYLSVGFYPVPGPRVAPVCGLLGFGVTGLELAHCSGLWAFPDWAPTEDLQDTERQQKRVRTMFNLEQLEELEKVFAKQHNLVGKKRAQLAARLKLTENQVRVWFQNRRVKYQKQQKLRAAVTSAEAASLDEPSSSSIASIQSDDAESGVDG

SEQ ID NO: 3483 - DNA, 2575 bp, Homo sapiens
aagggtcataaggcggaggcgcgcccaagatggcggcctccatgtgcgacgtgttctccttctgcgtgggcgtggcgggccgcgcgcgggtctccgtggaagtccgtttcgtgagcagcgccaagggaaaggggctgtttgccacacagctcatccggaagggggagaccatcttcgtagaacggcccctggtggctgcacagtttctctggaatgcactttatcgctaccgagcctgtgaccactgccttagggcactagagaaggcagaggagaatgcccagaggctgaccgggaaaccaggccaggttctgcctcacccagagctgtgcactgtgcgcaaagacctccaccagaactgtccccattgccaagtgatgtactgcagtgcagaatgtcggttggcagccactgagcaataccaccaggtcctgtgcccaggcccctcccaggatgaccccttgcatcctctcaataagcttcaggaggcatggaggagtattcactacccacctgagactgcaagcatcatgttgatggctaggatggtggccacagtgaagcaggcgaaggacaaggaccgttggatcagactcttttcccagttttgtaacaaaacagccaatgaagaggaggaaattgtccataaacttctgggagacaaattcaagggccaactggaacttctgcggagactcttcacagaggccctctatgaggaagcagtcagccagtggttcactccagatggattccggtctctctttgctcttgttgggaccaatggccaaggaatcgggaccagctccctaagccagtgggtccatgcctgtgacactctggagttgaagcctcaggaccgtgagcagcttgacgccttcattgaccagctatacaaggacatcgaggcagcaactggagagtttcttaactgtgaaggatctggcctctttgtgcttcagagctgctgcaaccacagttgtgtgcccaatgcagagacctcctttccagaaaacaacttccttttgcatgtcactgctctggaggatattaagccaggagaggaaatttgtatcagctacttggactgctgtcagcgggagcgcagccgccacagccgccacaagatcctcagggagaactatctatttgtctgttcctgtcccaaatgcctggcagaggctgatgaacccaatgtgacctcagaagaggaagaggaagaggaggaggaggaggaaggagagccagaagatgcagagctgggggatgagatgactgatgtgtgatgttgccctgcccagaaagggccctgccctagaccctgccagaaaagggggctcttcccccagagaagtggcttggagggaacttcccactcccattgcctgctttccccattccagccctctctgctagagggtaggagagagcctggatctctggccccaacccccaccagacctcatgccctggacactgctgctgagttggctcagactctgcactggcactgagcctttcacaactggcctccccttgaggttcctccactctagggtttgaggggctggaatcagggccagggcctaacagtgtttcttcccctcggccccacggcccatactcaccccttcacctgaggcttctcccctctcaacttgctgttgatttcttttgaggggtaaaagaaagaccgagttcattgaagcagagatgggaggtggtgaggcgtcctcacctccccccaccacagctgtggctggtaaggcaactgcttgaccactggcccagcaagcagaggcgggcaggaggatctgggcatcctgagccccttccctgaggctgtctcctgggaatgctggaccagggggattacttcccccacccacacccccatttggacatctggggaagtggagattaacccctcccccagactcgtgccttgcctctcaggacctggcacagtggctggccttatggagtatggaaaaggcctctgccttcctcaggagggacacatagtgggtcatcaccctttctcacacctgcttcccaatgagcactcagcagcatggctgagacctggggcttgacaggcctgcgctccttagattaggatgctctggtattcctggggccagttaaaatgggtcagtgaggggctctcctggcctcaatctccatctttagggtctccacagactaacattgaagtcttccagaaacctcgaggagctgggctagatacttcgagagtagccctgtcttgtcccctcctacccccagattagcaccacccctctcactcttgggttggatgctatgggaattacaacccatcactcccaatgcctccctttcctggaggagcctgctgcattctcctgctgagggatcccagagagggcaggtgcccaccccacaggccctttcctggaccatggagccaggtgaaacctgtctggccccttacccattgggttcttactccttcacaacggtcagcactcctctcccagcccccctgcccactgttctcaataaaatgtgagtggtgagaggcctctgcagg

SEQ ID NO: 3484 - protein, 418 aa, Homo sapiens
MAASMCDVFSFCVGVAGRARVSVEVRFVSSAKGKGLFATQLIRKGETIFVERPLVAAQFLWNALYRYRACDHCLRALEKAEENAQRLTGKPGQVLPHPELCTVRKDLHQNCPHCQVMYCSAECRLAATEQYHQVLCPGPSQDDPLHPLNKLQEAWRSIHYPPETASIMLMARMVATVKQAKDKDRWIRLFSQFCNKTANEEEEIVHKLLGDKFKGQLELLRRLFTEALYEEAVSQWFTPDGFRSLFALVGTNGQGIGTSSLSQWVHACDTLELKPQDREQLDAFIDQLYKDIEAATGEFLNCEGSGLFVLQSCCNHSCVPNAETSFPENNFLLHVTALEDIKPGEEICISYLDCCQRERSRHSRHKILRENYLFVCSCPKCLAEADEPNVTSEEEEEEEEEEEGEPEDAELGDEMTDV

SEQ ID NO: 3485 - DNA, 404 bp, Homo sapiens
ggcggggctagggggctttgctgctgtatccctggaacggtgggcggggatgtgccgggcagagagaactgaggtgtaaaagagggagtcctcacgaacttcatgtgtgagatttgggtgaggggatgaggagagaggccaagatccttcacgagggtccttggagtgctgaggaatttggaccagagttcccaatgcctccctttcctggaggagcctgctgcattctcctgctgagggatcccagagagggcaggtgcccaccccacaggccctttcctggaccatggagccaggtgaaacctgtctggccccttacccattgggttcttactccttcacaacggtcagcactcctctcccagcccccctgcccactgttctcaataaaatgtgagtggtga

SEQ ID NO: 3486 - protein, 92 aa, Homo sapiens
MRREAKILHEGPWSAEEFGPEFPMPPFPGGACCILLLRDPREGRCPPHRPFPGPWSQVKPVWPLTHWVLTPSQRSALLSQPPCPLFSIKCEW

SEQ ID NO: 3487 - DNA, 664 bp, Homo sapiens
gacactgctgctgagttggctcagactctgcactggcactgagcctttcacaactggcctccccttgaggttcctccactctagggtttgaggggctggaatcagggccagggcctaacagtgtttcttcccctcggccccacggcccatactcaccccttcacctgaggcttctcccctctcaacttgctgttgatttcttttgaggggtaaaagaaagaccgagttcattgaagcagagatgggaggtggtgaggcgtcctcacctccccccaccacagctgtggctgggtctccacagactaacattgaagtcttccagaaacctcgaggagctgggctagatacttcgagagtagccctgtcttgtcccctcctacccccagattagcaccacccctctcactcttgggttggatgctatgggaattacaacccatcactcccaatgcctccctttcctggaggagcctgctgcattctcctgctgagggatcccagagagggcaggtgcccaccccacaggccctttcctggaccatggagccaggtgaaacctgtctggccccttacccattgggttcttactccttcacaacggtcagcactcctctcccagcccccctgcccactgttctcaataaaatgtgagtggtgagaggcc

SEQ ID NO: 3488 - protein, 49 aa, Homo sapiens
MGGGEASSPPPTTAVAGSPQTNIEVFQKPRGAGLDTSRVALSCPLLPPD

SEQ ID NO: 3489 - DNA, 343 bp, Homo sapiens
ggcttccgtatccatgattatttgtactttcaagtgctgagtcctggggacattcgatacatcttcacagccacacctgccaagggtgtctcatgctacaagaagaggcaagagacaggccccagggcttctggctagaacccgaaacaaaaggagctgaaggcaggtggcctgagagccatctgtgacctgtcacactcacctggctccagcctcccctacccagggtctctgcacagtgaccttcacagcagttgttggagtggtttaaagagctggtgtttggggactcaataaaccctcactgactttttagcaataaagcttctcatcagggttgcaa

SEQ ID NO: 3490 - protein, 31 aa, Homo sapiens
MLQEEARDRPQGFWLEPETKGAEGRWPESHL

SEQ ID NO: 3491 - DNA, 1238 bp, Homo sapiens
ctcgaccaataggaagtaggctaaggcgcagaggcggaaagtgtggctacatgagcaggcgtcagagccaatcagccttgagcctcgttcccgtcgtccagcccgcggcgagagcgggtatgtgggcgggaggccggagcagctgtcaggctgaagtcctgcgagcgacgcgcggcggggcggcgagaggaaacgcggcgccgggccgggcccggccctggagatggtccccggcgccgcgggctggtgttgtctcgtgctctggctccccgcgtgcgtcgcggcccacggcttccgtatccatgattatttgtactttcaagtgctgagtcctggggacattcgatacatcttcacagccacacctgccaaggactttggtggtatctttcacacaaggtatgagcagattcaccttgtccccgctgaacctccagaggcctgcggggaactcagcaacggtttcttcatccaggaccagattgctctggtggagagggggggctgctccttcctctccaagactcgggtggtccaggagcacggcgggcgggcggtgatcatctctgacaacgcagttgacaatgacagcttctacgtggagatgatccaggacagtacccagcgcacagctgacatccccgccctcttcctgctcggccgagacggctacatgatccgccgctctctggaacagcatgggctgccatgggccatcatttccatcccagtcaatgtcaccagcatccccacctttgagctgctgcaaccgccctggaccttctggtagaagagtttgtcccacattccagccataagtgactctgagctgggaaggggaaacccaggaattttgctacttggaatttggagatagcatctggggacaagtggagccaggtagaggaaaagggtttgggcgttgctaggctgaaagggaagccacaccactggccttcccttccccagggcccccaagggtgtctcatgctacaagaagaggcaagagacaggccccagggcttctggctagaacccgaaacaaaaggagctgaaggcaggtggcctgagagccatctgtgacctgtcacactcacctggctccagcctcccctacccagggtctctgcacagtgaccttcacagcagttgttggagtggtttaaagagctggtgtttggggactcaataaaccctcactgactttttagcaataaagcttctcatcagggttgcaa

SEQ ID NO: 3492 - protein, 188 aa, Homo sapiens; identical to SEQ ID NO: 277

SEQ ID NO: 3493 - DNA, 975 bp, Homo sapiens
tcccggcccaagcttctgggtatttctattgcgcgaggcattgtgggttgctgggcggcccggtctcggagaagaggggagagtggcgggccgctgaataagcttccaaaatgatgcccacaccagttatcctattgaaagaggggactgatagctcccaaggcatcccccagcttgtgagtaacatcagtgcctgccaggtgattgctgaggctgtaagaactaccctgggtccccgtggcatggacaagcttattgtagatggcagaggcaaagcaacaatttctaatgatggggccacaattctgaaacttcttgatgttgtccatcctgcagcaaagactttggtagacattgccaaatcccaagatgctgaggtgggtgatggcaccacctcagtgaccttgctggctgcagagtttctgaagcaggtgaaaccctatgtggaggaaggtttacacccccagatcatcattcgagctttccgcacagccacccagctggcagttaacaagatcaaagagattgctgtgaccgtgaagaaggcagataaagtgtaagtctgtagtgggtttttttttttttttttaaagagacggagccttgctgtattgcccaggctagtcttgaactactggctcaagtgatctcccacctgcgactcccaaagtgctgggattacaggtgtgagtcaccgtgtcaggcctttgtcagaaccttgactgacttcctgtggccaaattggatgcagaagcatgctgcaatccctctatgtgcctggggctgtttggctcctgccagacccttggctgtgtcccagcccacagagcacaaaagaagctgtcgactgtagtttaaaagctgccacatatgagatctttgactgcagtcaccatctgtcactgataatctgccctaaagatacaaaaggtgaagttggagagggctgagtttagagactggaagggaactacc

SEQ ID NO: 3494 - protein, 149 aa, Homo sapiens
MMPTPVILLKEGTDSSQGIPQLVSNISACQVIAEAVRTTLGPRGMDKLIVDGRGKATISNDGATILKLLDVVHPAAKTLVDIAKSQDAEVGDGTTSVTLLAAEFLKQVKPYVEEGLHPQIIIRAFRTATQLAVNKIKEIAVTVKKADKV

SEQ ID NO: 3495 - DNA, 950 bp, Homo sapiens
caagcttctgggtatttctattgcgcgaggcattgtgggttgctgggcggcccggtctcggagaagaggggagagtggcgggccgctgaataagcttccaaaatgatgcccacaccagttatcctattgaaagaggggactgatagctcccaaggcatcccccagcttgtgagtaacatcagtgcctgccaggtgattgctgaggctgtaagaactaccctgggtccccgtggcatggacaagcttattgtagatggcagaggcaaagcaacaatttctaatgatggggccacaattctgaaacttcttgatgttgtccatcctgcagcaaagactttggtagacattgccaaatcccaagatgctgaggtgggtgatggcaccacctcagtgaccttgctggctgcagagtttctgaagcaggtgaaaccctatgtggaggaaggtttacacccccagatcatcattcgagctttccgcacagccacccagctggcagttaacaagatcaaagagattgctgtgaccgtgaagaaggcagataaagtggagcagaggaagctgctggaaaagtgtgccatgaccgctctgagctccaagctgatctcccagcagaaagctttctttgctaagatggtggtggatgcagtgatgatgctcgatgatttgctgcagcttaaaatgattggaatcaagaaggtacagggtggagccctcgaggattctcagctggtagctggtgttgcattcaagaagactttctcttacgctgggtttgaaatgcaacccaaaaagtaccacaatcccaagattgcccttttgaatgtcgagctcgagttgaaagctgagaaagacaatgctgagataagaatccatcattctggagccaaagttgtcttgtccaaactccccattggggatgtggccacccagtactttgctgacaggga

SEQ ID NO: 3496 - protein, 281 aa, Homo sapiens
MMPTPVILLKEGTDSSQGIPQLVSNISACQVIAEAVRTTLGPRGMDKLIVDGRGKATISNDGATILKLLDVVHPAAKTLVDIAKSQDAEVGDGTTSVTLLAAEFLKQVKPYVEEGLHPQIIIRAFRTATQLAVNKIKEIAVTVKKADKVEQRKLLEKCAMTALSSKLISQQKAFFAKMVVDAVMMLDDLLQLKMIGIKKVQGGALEDSQLVAGVAFKKTFSYAGFEMQPKKYHNPKIALLNVELELKAEKDNAEIRIHHSGAKVVLSKLPIGDVATQYFAD

SEQ ID NO: 3497 - DNA, 1894 bp, Homo sapiens
caagcttctgggtatttctattgcgcgaggcattgtgggttgctgggcggcccggtctcggagaagaggggagagtggcgggccgctgaataagcttccaaaatgatgcccacaccagttatcctattgaaagaggggactgatagctcccaaggcatcccccagcttgtgagtaacatcagtgcctgccaggtgattgctgaggctgtaagaactaccctgggtccccgtggcatggacaagcttattgtagatggcagaggcaaagcaacaatttctaatgatggggccacaattctgaaacttcttgatgttgtccatcctgcagcaaagactttggtagacattgccaaatcccaagatgctgaggtgggtgatggcaccacctcagtgaccttgctggctgcagagtttctgaagcaggtgaaaccctatgtggaggaaggtttacacccccagatcatcattcgagctttccgcacagccacccagctggcagttaacaagatcaaagagattgctgtgaccgtgaagaaggcagataaagtggagcagaggaagctgctggaaaagtgtgccatgaccgctctgagctccaagctgatctcccagcagaaagctttctttgctaagatggtggtggatgcagtgatgatgctcgatgatttgctgcagcttaaaatgattggaatcaagaaggtacagggtggagccctcgaggattctcagctggtagctggtgttgcattcaagaagactttctcttacgctgggtttgaaatgcaacccaaaaagtaccacaatcccaagattgcccttttgaatgtcgagctcgagttgaaagctgagaaagacaatgctgagataagagtccacacagttgaggattatcaggcaattgttgatgctgagtggaacattctctatgacaagttagagaagatccatcattctggagccaaagttgtcttgtccaaactccccattggggatgtggccacccagtactttgctgacagggacatgttctgtgctggccgagtacctgaggaggatctgaagaggacaatgatggcctgtggaggctcaatccagaccagtgtgaatgctctgtcagcagatgtgctgggtcgatgccaggtgtttgaagagacccagattggaggcgagaggtacaatttttttactggctgccccaaggccaagacatgcaccttcattctccgtggcggcgccgagcagtttatggaggagacagagcggtccctgcatgatgccatcatgatcgtcaggagggccatcaagaatgattcagtggtggctggtggcggggccattgagatggaactctccaagtacctgcgggattactcaaggactattccaggaaaacagcagctgttgattggggcatatgccaaggccttggagattatcccacgccagctgtgtgacaatgctggctttgatgccacaaacattctcaacaagctgcgggctcggcatgcccaggggggtacatggtatggagtagacatcaacaacgaggacattgctgacaactttgaagctttcgtgtgggagccagctatggtgcggatcaatgcgctgacagcagcctctgaggctgcgtgcctgatcgtgtctgtagatgaaaccatcaagaacccccgctcgactgtggatgctcccacagcagcaggccggggccgtggtcgtggccgcccccactgagaggcaccccacccatcacatggctggctggctgctgggtgcacttaccctccttggcttggttacttcattttacaaggaaggggtagtaattggcccactctcttcttactggaggctatttaaataaaatgtaagacttcagataactttgtaaatt

SEQ ID NO: 3498 - protein, 543 aa, Homo sapiens; identical to SEQ ID NO: 281

SEQ ID NO: 3499 - DNA, 933 bp, Homo sapiens
ttgtgggttgctgggcggcccggtctcggagaagaggggagagtggcgggccgctgaataagcttccaaaatgatgcattgctcattcttgaagtcgtcttcatcttctgtgcagaggcagcatagtacagcagttgagagtaaggcctctggagctacactgaatgcctagcccacaccagttatcctattgaaagaggggactgatagctcccaaggcatcccccagcttgtgagtaacatcagtgcctgccaggtgattgctgaggctgtaagaactaccctgggtccccgtggcatggacaagcttattgtagatggcagaggcaaagcaacaatttctaatgatggggccacaattctgaaacttcttgatgttgtccatcctgcagcaaagactttggtagacattgccaaatcccaagatgctgaggtgggtgatggcaccacctcagtgaccttgctggctgcagagtttctgaagcaggtgaaaccctatgtggaggaaggtttacacccccagatcatcattcgagctttccgcacagccacccagctggcagttaacaagatcaaagagattgctgtgaccgtgaagaaggcagataaagtggagcagaggaagctgctggaaaagtgtgccatgaccgctctgagctccaagctgatctcccagcagaaagctttctttgctaagatggtggtggatgcagtgatgatgctcgatgatttgctgcagcttaaaatgattggaatcaagaaggtacagggtggagccctcgaggattctcagctggtagctggtgttgcattcaagaagactttctcttacgctgggtttgaaatgcaacccaaaaagtaccacaatcccaagattgcccttttgaatgtcgagctcgagttgaaagctgagaaagacaatgctgagataag

SEQ ID NO: 3500 - protein, 210 aa, Homo sapiens
MDKLIVDGRGKATISNDGATILKLLDVVHPAAKTLVDIAKSQDAEVGDGTTSVTLLAAEFLKQVKPYVEEGLHPQIIIRAFRTATQLAVNKIKEIAVTVKKADKVEQRKLLEKCAMTALSSKLISQQKAFFAKMVVDAVMMLDDLLQLKMIGIKKVQGGALEDSQLVAGVAFKKTFSYAGFEMQPKKYHNPKIALLNVELELKAEKDNAE

SEQ ID NO: 3501 - DNA, 512 bp, Homo sapiens
ggccgctgaataagcttccaaaatgatggtgggtgatggcaccacctcagtgaccttgctggctgcagagtttctgaagcaggtgaaaccctatgtggaggaaggtttacacccccagatcatcattcgagctttccgcacagccacccagctggcagttaacaagatcaaagagattgctgtgaccgtgaagaaggcagataaagtggagcagaggaagctgctggaaaagtgtgccatgaccgctctgagctccaagctgatctcccagcagaaagctttctttgctaagatggtggtggatgcagtgatgatgctcgatgatttgctgcagcttaaaatgattggaatcaagaaggtacagggtggagccctcgaggattctcagctggtagctggtgttgcattcaagaagactttctcttacgctgggtttgaaatgcaacccaaaaagtaccacaatcccaagattgcccttttgaatgtcgagctcgagttgaaagctgagaaag

SEQ ID NO: 3502 - protein, 162 aa, Homo sapiens
MMVGDGTTSVTLLAAEFLKQVKPYVEEGLHPQIIIRAFRTATQLAVNKIKEIAVTVKKADKVEQRKLLEKCAMTALSSKLISQQKAFFAKMVVDAVMMLDDLLQLKMIGIKKVQGGALEDSQLVAGVAFKKTFSYAGFEMQPKKYHNPKIALLNVELELKAE

SEQ ID NO: 3503 - DNA, 873 bp, Homo sapiens
ggagcagaggaagctgctggaaaagtgtgccatgaccgctctgagctccaagctgatctcccagcagaaagctttctttgctaagatggtggtggatgcagtgatgatgctcgatgatttgctgcagcttaaaatgattggaatcaagaaggtacaatttttttactggctgccccaaggccaagacatgcaccttcattctccgtggcggcgccgagcagtttatggaggagacagagcggtccctgcatgatgccatcatgatcgtcaggagggccatcaagaatgattcagtggtggctggtggcggggccattgagatggaactctccaagtacctgcgggattactcaaggactattccaggaaaacagcagctgttgattggggcatatgccaaggccttggagattatcccacgccagctgtgtgacaatgctggctttgatgccacaaacattctcaacaagctgcgggctcggcatgcccaggggggtacatggtatggagtagacatcaacaacgaggacattgctgacaactttgaagctttcgtgtgggagccagctatggtgcggatcaatgcgctgacagcagcctctgaggctgcgtgcctgatcgtgtctgtagatgaaaccatcaagaacccccgctcgactgtggatgctcccacagcagcaggccggggccgtggtcgtggccgcccccactgagaggcaccccacccatcacatggctggctggctgctgggtgcacttaccctccttggcttggttacttcattttacaaggaaggggtagtaattggcccactctcttcttactggaggctatttaaataaaatgtaagacttcagataactttgtaaatt

SEQ ID NO: 3504 - protein, 162 aa, Homo sapiens [sequence omitted]

SEQ ID NO: 3505 - DNA, 388 bp, Homo sapiens
tcagtggtggctggtggcggggccattgagatggaactctccaagtacctgcgggattactcaaggactattccaggaaaacagcagctgttgattggggcatatgccaaggccttggagattatcccacgccagctgtgtgacaatgctggctttgatgccacaaacattctcaacaagctgcgggtgtggatgctcccacagcagcaggccggggccgtggtcgtggccgcccccactgagaggcaccccacccatcacatggctggctggctgctgggtgcacttaccctccttggcttggttacttcattttacaaggaaggggtagtaattggcccactctcttcttactggaggctatttaaataaaatgtaagacttcaga

SEQ ID NO: 3506 - protein, 113 aa, Homo sapiens
MELSKYLRDYSRTIPGKQQLLIGAYAKALEIIPRQLCDNAGFDATNILNKLRVWMLPQQQAGAVVVAAPTERHPTHHMAGWLLGALTLLGLVTSFYKEGVVIGPLSSYWRLFK

SEQ ID NO: 3507 - DNA, 6776 bp, Homo sapiens
gcggccgccgccgccgctgcctcggggttcccgctggctcccgagcccgccgccctgctggccgtgcccggcgcccggcgagaggtcttcgagagcacttccttccagggcaaggagcaggcggccgggccgtcgcccgcggcgccgcacctgctgcaccaccaccatcaccacgctcccctcgcccacttccccggcgacctggtgcccgctagcctgccctgtgaggagttggccgagccgggccttgtgcccgccgcagcagcgcgctatgcgctgcgcgagatcgagatcccgctgggggagctgttcgcccgcaagtccgtggcgtcctcggcgtgctcgacgccgccgcctggccccggccccggcccttgccccgggcctgcctccgcttcgcccgcgtccccctcacccgctgatgtggcctacgaagagggcctggcgcgcctcaagatccgcgcgctggagaagctggaggtggaccggcggctggagcggctgagcgaggaggtggagcagaagatcgcgggccaggtgggccggctgcaggccgagctggagcgcaaggcggccgaactggagactgcgcggcaggagagtgcgaggctcgggcgcgagaaggaggagctggaggagcgcgcgtctgagctctcccgccaggtggacgtgagcgtagagctgctggcctcactcaagcaggacctggtgcacaaggaacaggagctgagccgcaagcagcaggaggtggtgcagatcgaccagttcctgaaggagacggcggcgcgggaggccagcgccaagctgcggctgcagcagttcattgaggagctccttgagcgggctgaccgtgccgagcggcagctgcaggtcatcagcagcagctgtggcagcacgcccagcgccagcctgggccgtggaggtgggggcggtggtgctggacccaatgcccggggcccaggcagaatgcgagaacaccacgtgggcccggccgtgcctaacacatatgcagtgtcacggcatggctcctctccgagcacaggggcctccagccgtgtgccagccgcatcccagagctcaggctgctatgacagtgacagtctggagctgcccaggccagaggagggggcccctgaggacagtggccctgggggcttgggcacacgggcccaggctgccaacgggggctcagagcggtcccagccccctcgcagctcaggcctgcggcgccaggccatccagaactggcagcgcagaccccgccgacacagcactgagggggaagagggtgatgtctccgacgttggctcccgaaccactgagtcagaggctgagggcccgttggatgcgccccgccccgggcctgctatggctgggccattgagcagctgccggctctcagcccgccccgagggaggcagtgggcggggtcggcgagcagagagggtcagcccctcacgctccaatgaggtcatcagcccagagatcctgaagatgcgagctgccctcttctgcatcttcacctacctggacacgcgcacactgctgcatgctgccgaggtctgccgggactggcgcttcgtggcccgccaccccgcagtctggacaagggtgctgcttgagaatgcccgtgtctgctccaagttcctggcaatgctggctcagtggtgcacccaggcccactctctgacgctgcagaacttgaagccccggcagcggggaaagaaggagagcaaggaggagtatgcccggagcacccggggctgcctggaagctgggctggagtccctgctgaaggcagctggggggaacctgctgatcctgcgcatctcccactgtccaaacatcctcaccgaccgctcgctctggctggccagctgctactgccgtgccctgcaggctgtcacgtacaggagtgccacagaccccgtgggccatgaggtcatttgggccctgggcgcaggctgcagagagatcgtctccctccaagtggcaccacttcacccctgccagcagcccacacgcttcagtaaccgctgcctgcagatgattggtcgctgttggccccacctgcgggccctgggggtcgggggtgccggctgtggggtgcagggcctggcatcactcgcgagaaactgcatgcggctgcaggtcctggagcttgaccacgtgtcagagatcacccaggaggtggcagcagaggtctgccgggaaggcctgaagggactggagatgctggtgctcacggcgactcccgtcacccctaaggccctactgcacttcaacagcatctgccggaacctcaagtccattgtggtccagattgggattgcggattatttcaaagagcccagcagccctgaggcccagaagctgtttgaggacatggtgacaaaactccaggctctgcgacggaggcccggcttctctaagattctgcacatcaaggtggaaggcggctgctaacccgggtagggggcggcagggcccctgccagccccacaccagggcactctctttggacctcagagggaccctggtttggactagacctttggaggccgagtgttatccctggcttctggagggggactgtcaagtctcctgtcctcctcctggagcagcagagcaacaggcctgacccagggcactgcctccccagtacaggggcttggacagaagctgccctccgacccccaccctaccccggctggagtagcctctggcacagccagtgaggagctgtcaccaccagcgcctggtgtcatcacctggaggatctgcaataaccacccagtggctcctcagctgttctggctggcctctccttcctgaggcccagcctcctggtcaggagcatctggggccccaagccaatgggggctccacaaggcagctcagacttggcaaggagggctcttctcctcaaccttgctgcagccttctgggggcaccccttcagacagcctgcccaggctgtggatccacatttcctgggggtaccacagccagacctaggggcctgggcacgtggtcagccaaaagctgggggcagcagtacagtggggtagtgggggtgggtttggaaaggaaacagtcacccagaacttctccccaggatgagaccacccttccaaggtgggggattgccagggggagaaaacttatttattgctgtaagacaggacccctcctcccaacctcataccccaccgcacaccagagctaaattcaaagctgaaaggcgcacgtttctatacctacattcattcctgagggaccctccagagggtcaaggtcccagccccaggcagccctgtcacagtgagaagtagttcctgtccttaaggaatttccttctaatccaggtgcttgggcaggaacccgatggccttcgggtcaccaaggctgtctgggagggaggcacagggccgccctctgtgctgaggccgtggaggaagccaggaggagggtggcttgctttgcttccttgtctaattagcttgcttgaagatgtggccttggcagggagccagacccatggggccaaggaagaggaagagcatcctcaatagactcactcccccttccttggtctccacgggccccgtggactgagggctgcattggggtcttctgcctaggggaagtgctggacctgagctggagccacttggcttagaagccacaggattcacttttcactggcctttgcagtccccaaaggatcaggtctcagaaccaaggctccaaaggctgaggtctccccagttcctcctctcagaactcccacagtagctcagaggccgggggtcctgccaactttcatttggaaagttctttcgaacatctaaactagatctatcttagggtttctttctctcctagataggatcagctcccagccctagccattaggctgctggtcctggcgggggatggggtcccctcgttacccagtccttcccagggacccaacttcctaacacaacctggcttggacatgaagaccctcccccaggttaccttgtaaagagtcctccagagctgggatcccatgggcgcagcagcacacccagctcccatggcgtcactccctagctctgtcccagcttttgctatcattgctgacttttcctcctgtggctcattctgtccctgccctttgaaaacctaaaataccaagggtgtcatgctggcaactccctgcccagtcctgcacaaagccttggctgtgtgtggcaccccttgcctcctaccccagagcagctggctccattggcttctccctgcaccagccctgtcctcaggggtcaggaaaaagcagcacagctttctttcctctcctccagaggcctggaagggaggtggaggtccagtaagggcctggctgccttggatttcttggtcctgccttgccaactgcaccctgtagctcctgctccctgtgaccccagaaccagaggtgctgccttccctgtctcctagacaaagcacaaagggatgccctgcttggcttgagcctgcccaactgaaggattttctctgccccagggaccttccatccctgaatacaaggctctaggcaacttctctctgggtggtacacactagaatgcctggcattagccctagaaaggaggttggggtgtatgggtagtgagctagggtgggagaaaggtggtgctgaaaggacagatgctagttgtagtttcactcactcattcattcattagtgcaacagtactgagcaccacctgcactagaggcagaggggtgaacaagatacccttctgcctggggggacgtccacttcccatgggtttggctatttccaggaaagcccctcagtcctccaccctgttctggctgtgtgtgaaggatgtgtgtgagcaggcccaatcctttgcagcaagaatgagaggtcagagtattccattgcacacgcaccctggggctgacagacttgtgccccctagccttcatgcatgcccaagcactggcagctttgcagcccctgccccaccagccccttgacgctcttcttttgttctctcctcggggatgagctctgctgctgagtagggagcttttgcttgctgggaggctctatgcatggatttttttggtgaccatacagctagggctgaggatgggaacagggacagagggcctggctatccctagaagcacttcatccatctttacccacccaaacgggatcccttcacatctcatacccagtaagatgcaagaaaggaatatctgagagcaagcagccctgctccaggggccccaggtatgtgtagaggcccagtgggggtggccacttggtgtttctaccaccccctgccatccagtctggccccagtacctacctgggaggttggtgtacttggcttaagtacttcatgctttattcaggctgcttccccacagcaccggcaggaaatgaaggtgcacttatatgcatccctgcaggaataaagagtgggtggcctgcccagcccagcaccacagcctttccccagccaggagagaccacctaaggatcaaggcagctcctgttttcttggttctgtgacactcgagtctgagccagcccctcaggaattgcctcaaaagagaaaaacaaaaaaaagtcctccttcccaaggcctgctactccaaggtttggctccatcccttgcctttgggtcctgcctatttccccactcctggtctcttatctttggggccaccagtggggagtcacccgggccccaatccctctaaggcgctaagttgaaggaggccttcccagagtgactattggtgccaaagtcccagttcctgttggacttggggtaaaaacaggagatggtgagtgggtgtaaggcccaaatgcccagagaagttaactcgaacccatgggacctgtcccagcctgtcagtccctgatgagtgtaacttccttcccctgggggcctggcccttctctccaacccagtggccatgctttctcacccagccttgtgcccggcctgcatttctgtatatattgctgtgtattgtgtgtatgtatgtattcctggacaagtgtgttcatctgcagcccttgcctgaggataaggtttaggattgggtaaagatcagaataccagggccagctaaggcaacgactccctccccaaacccttgggacctcagccagtcccaaggctgccctgacaatcaggcaggctccccaccgtgaggccaagcctcctctgccactgccagcatggcccaagggaggcttggccttgggcttgccagcctcagctctgccctgacaagggtcttgtatccagggcagaggcctgaggtgacccaggcttgctttgtggctgatgccagcaggcttggttctagtgggcaccactggtgggcaacctccataactggcccttaggccctaccttcctacacagctaggctataatgggcctgagtgagagggtagcttccccagccccaagcacaggcagaggggtggagagcaatttttggttttatttttgtttctgaagtggtgcctgtacctccagcccccagggggccttccctggccacacttctctgccccacccaggcatcgccatcccagcactttgctccatgtcacccgtaagatgccctttgctgaatgtacctgagtgtatgtatttaaaaggactcacatgggcatcagagaatttatggctctgtatccaataaaaaagatggtgaaactggtctatctgccccagagaggt

SEQ ID NO: 3508 - protein, 499 aa, Homo sapiens
MREHHVGPAVPNTYAVSRHGSSPSTGASSRVPAASQSSGCYDSDSLELPRPEEGAPEDSGPGGLGTRAQAANGGSERSQPPRSSGLRRQAIQNWQRRPRRHSTEGEEGDVSDVGSRTTESEAEGPLDAPRPGPAMAGPLSSCRLSARPEGGSGRGRRAERVSPSRSNEVISPEILKMRAALFCIFTYLDTRTLLHAAEVCRDWRFVARHPAVWTRVLLENARVCSKFLAMLAQWCTQAHSLTLQNLKPRQRGKKESKEEYARSTRGCLEAGLESLLKAAGGNLLILRISHCPNILTDRSLWLASCYCRALQAVTYRSATDPVGHEVIWALGAGCREIVSLQVAPLHPCQQPTRFSNRCLQMIGRCWPHLRALGVGGAGCGVQGLASLARNCMRLQVLELDHVSEITQEVAAEVCREGLKGLEMLVLTATPVTPKALLHFNSICRNLKSIVVQIGIADYFKEPSSPEAQKLFEDMVTKLQALRRRPGFSKILHIKVEGGC

SEQ ID NO: 3509 - DNA, 6713 bp, Homo sapiens
atggcctcgctggacctgccgtaccgctgcccccgctgcggggagcacaagcgcttccggagcctgtcgtcgctgcgcgcgcacctggacctgccctgtgaggagttggccgagccgggccttgtgcccgccgcagcagcgcgctatgcgctgcgcgagatcgagatcccgctgggggagctgttcgcccgcaagtccgtggcgtcctcggcgtgctcgacgccgccgcctggccccggccccggcccttgccccgggcctgcctccgcttcgcccgcgtccccctcacccgctgatgtggcctacgaagagggcctggcgcgcctcaagatccgcgcgctggagaagctggaggtggaccggcggctggagcggctgagcgaggaggtggagcagaagatcgcgggccaggtgggccggctgcaggccgagctggagcgcaaggcggccgaactggagactgcgcggcaggagagtgcgaggctcgggcgcgagaaggaggagctggaggagcgcgcgtctgagctctcccgccaggtggacgtgagcgtagagctgctggcctcactcaagcaggacctggtgcacaaggaacaggagctgagccgcaagcagcaggaggtggtgcagatcgaccagttcctgaaggagacggcggcgcgggaggccagcgccaagctgcggctgcagcagttcattgaggagctccttgagcgggctgaccgtgccgagcggcagctgcaggtcatcagcagcagctgtggcagcacgcccagcgccagcctgggccgtggaggtgggggcggtggtgctggacccaatgcccggggcccaggcagaatgcgagaacaccacgtgggcccggccgtgcctaacacatatgcagtgtcacggcatggctcctctccgagcacaggggcctccagccgtgtgccagccgcatcccagagctcaggctgctatgacagtgacagtctggagctgcccaggccagaggagggggcccctgaggacagtggccctgggggcttgggcacacgggcccaggctgccaacgggggctcagagcggtcccagccccctcgcagctcaggcctgcggcgccaggccatccagaactggcagcgcagaccccgccgacacagcactgagggggaagagggtgatgtctccgacgttggctcccgaaccactgagtcagaggctgagggcccgttggatgcgccccgccccgggcctgctatggctgggccattgagcagctgccggctctcagcccgccccgagggaggcagtgggcggggtcggcgagcagagagggtcagcccctcacgctccaatgaggtcatcagcccagagatcctgaagatgcgagctgccctcttctgcatcttcacctacctggacacgcgcacactgctgcatgctgccgaggtctgccgggactggcgcttcgtggcccgccaccccgcagtctggacaagggtgctgcttgagaatgcccgtgtctgctccaagttcctggcaatgctggctcagtggtgcacccaggcccactctctgacgctgcagaacttgaagccccggcagcggggaaagaaggagagcaaggaggagtatgcccggagcacccggggctgcctggaagctgggctggagtccctgctgaaggcagctggggggaacctgctgatcctgcgcatctcccactgtccaaacatcctcaccgaccgctcgctctggctggccagctgctactgccgtgccctgcaggctgtcacgtacaggagtgccacagaccccgtgggccatgaggtcatttgggccctgggcgcaggctgcagagagatcgtctccctccaagtggcaccacttcacccctgccagcagcccacacgcttcagtaaccgctgcctgcagatgattggtcgctgttggccccacctgcgggccctgggggtcgggggtgccggctgtggggtgcagggcctggcatcactcgcgagaaactgcatgcggctgcaggtcctggagcttgaccacgtgtcagagatcacccaggaggtggcagcagaggtctgccgggaaggcctgaagggactggagatgctggtgctcacggcgactcccgtcacccctaaggccctactgcacttcaacagtgagcactgggggaatgaggggcagggtacgactatcacctgccacggggccctgtcagcaggcatctgccggaacctcaagtccattgtggtccagattgggattgcggattatttcaaagagcccagcagccctgaggcccagaagctgtttgaggacatggtgacaaaactccaggctctgcgacggaggcccggcttctctaagattctgcacatcaaggtggaaggcggctgctaacccgggtagggggcggcagggcccctgccagccccacaccagggcactctctttggacctcagagggaccctggtttggactagacctttggaggccgagtgttatccctggcttctggagggggactgtcaagtctcctgtcctcctcctggagcagcagagcaacaggcctgacccagggcactgcctccccagtacaggggcttggacagaagctgccctccgacccccaccctaccccggctggagtagcctctggcacagccagtgaggagctgtcaccaccagcgcctggtgtcatcacctggaggatctgcaataaccacccagtggctcctcagctgttctggctggcctctccttcctgaggcccagcctcctggtcaggagcatctggggccccaagccaatgggggctccacaaggcagctcagacttggcaaggagggctcttctcctcaaccttgctgcagccttctgggggcaccccttcagacagcctgcccaggctgtggatccacatttcctgggggtaccacagccagacctaggggcctgggcacgtggtcagccaaaagctgggggcagcagtacagtggggtagtgggggtgggtttggaaaggaaacagtcacccagaacttctccccaggatgagaccacccttccaaggtgggggattgccagggggagaaaacttatttattgctgtaagacaggacccctcctcccaacctcataccccaccgcacaccagagctaaattcaaagctgaaaggcgcacgtttctatacctacattcattcctgagggaccctccagagggtcaaggtcccagccccaggcagccctgtcacagtgagaagtagttcctgtccttaaggaatttccttctaatccaggtgcttgggcaggaacccgatggccttcgggtcaccaaggctgtctgggagggaggcacagggccgccctctgtgctgaggccgtggaggaagccaggaggagggtggcttgctttgcttccttgtctaattagcttgcttgaagatgtggccttggcagggagccagacccatggggccaaggaagaggaagagcatcctcaatagactcactcccccttccttggtctccacgggccccgtggactgagggctgcattggggtcttctgcctaggggaagtgctggacctgagctggagccacttggcttagaagccacaggattcacttttcactggcctttgcagtccccaaaggatcaggtctcagaaccaaggctccaaaggctgaggtctccccagttcctcctctcagaactcccacagtagctcagaggccgggggtcctgccaactttcatttggaaagttctttcgaacatctaaactagatctatcttagggtttctttctctcctagataggatcagctcccagccctagccattaggctgctggtcctggcgggggatggggtcccctcgttacccagtccttcccagggacccaacttcctaacacaacctggcttggacatgaagaccctcccccaggttaccttgtaaagagtcctccagagctgggatcccatgggcgcagcagcacacccagctcccatggcgtcactccctagctctgtcccagcttttgctatcattgctgacttttcctcctgtggctcattctgtccctgccctttgaaaacctaaaataccaagggtgtcatgctggcaactccctgcccagtcctgcacaaagccttggctgtgtgtggcaccccttgcctcctaccccagagcagctggctccattggcttctccctgcaccagccctgtcctcaggggtcaggaaaaagcagcacagctttctttcctctcctccagaggcctggaagggaggtggaggtccagtaagggcctggctgccttggatttcttggtcctgccttgccaactgcaccctgtagctcctgctccctgtgaccccagaaccagaggtgctgccttccctgtctcctagacaaagcacaaagggatgccctgcttggcttgagcctgcccaactgaaggattttctctgccccagggaccttccatccctgaatacaaggctctaggcaacttctctctgggtggtacacactagaatgcctggcattagccctagaaaggaggttggggtgtatgggtagtgagctagggtgggagaaaggtggtgctgaaaggacagatgctagttgtagtttcactcactcattcattcattagtgcaacagtactgagcaccacctgcactagaggcagaggggtgaacaagatacccttctgcctggggggacgtccacttcccatgggtttggctatttccaggaaagcccctcagtcctccaccctgttctggctgtgtgtgaaggatgtgtgtgagcaggcccaatcctttgcagcaagaatgagaggtcagagtattccattgcacacgcaccctggggctgacagacttgtgccccctagccttcatgcatgcccaagcactggcagctttgcagcccctgccccaccagccccttgacgctcttcttttgttctctcctcggggatgagctctgctgctgagtagggagcttttgcttgctgggaggctctatgcatggatttttttggtgaccatacagctagggctgaggatgggaacagggacagagggcctggctatccctagaagcacttcatccatctttacccacccaaacgggatcccttcacatctcatacccagtaagatgcaagaaaggaatatctgagagcaagcagccctgctccaggggccccaggtatgtgtagaggcccagtgggggtggccacttggtgtttctaccaccccctgccatccagtctggccccagtacctacctgggaggttggtgtacttggcttaagtacttcatgctttattcaggctgcttccccacagcaccggcaggaaatgaaggtgcacttatatgcatccctgcaggaataaagagtgggtggcctgcccagcccagcaccacagcctttccccagccaggagagaccacctaaggatcaaggcagctcctgttttcttggttctgtgacactcgagtctgagccagcccctcaggaattgcctcaaaagagaaaaacaaaaaaaagtcctccttcccaaggcctgctactccaaggtttggctccatcccttgcctttgggtcctgcctatttccccactcctggtctcttatctttggggccaccagtggggagtcacccgggccccaatccctctaaggcgctaagttgaaggaggccttcccagagtgactattggtgccaaagtcccagttcctgttggacttggggtaaaaacaggagatggtgagtgggtgtaaggcccaaatgcccagagaagttaactcgaacccatgggacctgtcccagcctgtcagtccctgatgagtgtaacttccttcccctgggggcctggcccttctctccaacccagtggccatgctttctcacccagccttgtgcccggcctgcatttctgtatatattgctgtgtattgtgtgtatgtatgtattcctggacaagtgtgttcatctgcagcccttgcctgaggataaggtttaggattgggtaaagatcagaataccagggccagctaaggcaacgactccctccccaaacccttgggacctcagccagtcccaaggctgccctgacaatcaggcaggctccccaccgtgaggccaagcctcctctgccactgccagcatggcccaagggaggcttggccttgggcttgccagcctcagctctgccctgacaagggtcttgtatccagggcagaggcctgaggtgacccaggcttgctttgtggctgatgccagcaggcttggttctagtgggcaccactggtgggcaacctccataactggcccttaggccctaccttcctacacagctaggctataatgggcctgagtgagagggtagcttccccagccccaagcacaggcagaggggtggagagcaatttttggttttatttttgtttctgaagtggtgcctgtacctccagcccccagggggccttccctggccacacttctctgccccacccaggcatcgccatcccagcactttgctccatgtcacccgtaagatgccctttgctgaatgtacctgagtgtatgtatttaaaaggactcacatgggcatcagagaatttatggctctgtatccaataaaaaagatggtgaaactggtctatctgccccagagaggt

SEQ ID NO: 3510 - protein, 800 aa, Homo sapiens
MASLDLPYRCPRCGEHKRFRSLSSLRAHLDLPCEELAEPGLVPAAAARYALREIEIPLGELFARKSVASSACSTPPPGPGPGPCPGPASASPASPSPADVAYEEGLARLKIRALEKLEVDRRLERLSEEVEQKIAGQVGRLQAELERKAAELETARQESARLGREKEELEERASELSRQVDVSVELLASLKQDLVHKEQELSRKQQEVVQIDQFLKETAAREASAKLRLQQFIEELLERADRAERQLQVISSSCGSTPSASLGRGGGGGGAGPNARGPGRMREHHVGPAVPNTYAVSRHGSSPSTGASSRVPAASQSSGCYDSDSLELPRPEEGAPEDSGPGGLGTRAQAANGGSERSQPPRSSGLRRQAIQNWQRRPRRHSTEGEEGDVSDVGSRTTESEAEGPLDAPRPGPAMAGPLSSCRLSARPEGGSGRGRRAERVSPSRSNEVISPEILKMRAALFCIFTYLDTRTLLHAAEVCRDWRFVARHPAVWTRVLLENARVCSKFLAMLAQWCTQAHSLTLQNLKPRQRGKKESKEEYARSTRGCLEAGLESLLKAAGGNLLILRISHCPNILTDRSLWLASCYCRALQAVTYRSATDPVGHEVIWALGAGCREIVSLQVAPLHPCQQPTRFSNRCLQMIGRCWPHLRALGVGGAGCGVQGLASLARNCMRLQVLELDHVSEITQEVAAEVCREGLKGLEMLVLTATPVTPKALLHFNSEHWGNEGQGTTITCHGALSAGICRNLKSIVVQIGIADYFKEPSSPEAQKLFEDMVTKLQALRRRPGFSKILHIKVEGGC

SEQ ID NO: 3511 - DNA, 616 bp, Homo sapiens
gggcacgcgggggctcttctgcgtccccagccctgggccgctgggcctggcctcgccgcggggtggaggaggcccaactacaatgatggagagaaaactgtatagctggaagaagaaaaaccctcctagttgaagaggggggtgaggaaaaaaacctggaccgtggtccacatgcttgactgaatgatgggctcctttcaaccagagtgtgtctcttgcttgttggaccttactgaggccgttggaaagacactcccaacatcctgacatttttctacaaatcccctaatgttccagccatggtgtctcctcccaaaaggagaaaggatggcaccagcagctctggccttctccatcagcttagaaacctgatcccaaagacaatgctttccctcagtcattccagaacagtcctggggctcactggctcaactttggtgctctatgtttaccccacgactgatttgccaggtctatgtcatatccccaagaccatgtggactgagaaagtggggaaggatggttccctatggtcaaagcagggtgctgttaccaggaggaggactggatgctgggctggcaaaaggaacagacatccacccatacatcctgtgga

SEQ ID NO: 3512 - protein, 104 aa, Homo sapiens
MVSPPKRRKDGTSSSGLLHQLRNLIPKTMLSLSHSRTVLGLTGSTLVLYVYPTTDLPGLCHIPKTMWTEKVGKDGSLWSKQGAVTRRRTGCWAGKRNRHPPIHP

SEQ ID NO: 3513 - DNA, 5736 bp, Homo sapiens
ggcagatgcgcccagcagcggctgcgccgggaccccacgttttccgctcaagatgaagacgctaaaattcagagctcaacacatggcatagtcaagacttgaactcaagtcatcaaactccaaagtctatgctcaaccacagtgccctcctgccttctctgctataatacagtccactggaccttcacatgtcaaaatgcagattccccaaatccatctgctcttgcagatggccaaaaatgtccatatattgtcttggtttcacctttgttgtgatgtttctcctcactctgtgcatcctgtgaatgtgtcaaaacaatttgggacatgcatggctatgtatgtgggtgcttttgtgcatgtgtgcatgagtgtgtggatgtgtgtgtgtatgcaggtgtacacttgtgcatatgcaagtgtacataggtgcatgtgtgtatctgtgagcacatgcatgtatgtgtgggtaagagttcatgcatgtgtatttgcacctgtgtgcatgtgtgtgcgcatatgtctgtgaatgtatgcatgtgtatttgtgcgcctgtgtgcccatgctacatttcacagacaacagttcctgcttggttgttatgggaaccacagttctaaaaatgttaaactgaatcccactccatgtgaaccagagaaaccaaaagagagagagagctcagtgacggagacacctctggggtcccagagctgaggcaaagaattgtgggctcagcaagagctggaaagacccagactagccagaggtgtagacccactcatgaggcctatggtgcctatcagggccccttgctgcagactcggtcctcagtcctgctttttcccatctttccctcctgatcctttctcctccctctctctttgccagcttcatgctctccaaccaccttccttccctcctccttcccctttctgtttcccttctccttttgggttttttttgttgttgttgttcaactaattgacacaataattaagcactttcatgttagacttggtgatatggggaccacacatgtggatcaaatgaggtttctgcccttgaaggtgctcaaaggtgggagcatttggataactggtgggggaagggaggtggcagagcaaagcacaaagggagagatgacagaggaggttggaaggtgaatttggatcagatatagagggctttcacagcaagggtgaaaaataggtattgtttttataggagggtggaaaccttggtcagtttgggatgaagctcttgtttgttgtgaatggtgtattaggaaattttcatcattaatgctgggcaatgtggaatgaaagaggcataatggaggcagagggaccacaggacgcagtttggcatagtgtaggcttgtctcaaatagggtacaggagttggggtgaagagggagaaaatagcaaacattctgggttgctttctcaaacttcccccccatatcccacctcatcaagatttgtattactttttcccacctttctggtgtgagaatcaggacttgagtgagcctctgttactgatgtgtgtgtcgaatttctcaggtgccccaggaagtaaaatagttgggaatcactggcccagcatgtagtagcactcagtatctgtggagtgagtggatatttagatatgcactggtcttggaactggaaggcccaggttcaaggcccatttcattctcttattatctgtgtgcccttcagaaaatccccaacatcttgggcttcagtattctcttctatagagtgtgggtttggacaggatgttctttttaaaaaaatacttaaaaaaatagagacagagttttgccatgttgcccaggctggtcttgaactcctggactcaagccacctacccgccttggccttccaaagtactgggattacaggcgtaagccaccattcctggcctggacaggatgttcttacaaactccttccaactgcaacgctattatgtgattctatgaaattgacatagccaaggtatgtgtgtatatggagggagtggcatggactaaggtgctggcaataggcacagagaggataaatgtgggaaatattttaatagaagaattaatatcatctggcttcagttttcaacaacattgttgactagatagcccaaagactctcttgctacaaaatatgtggattgcttcataaaatgtaacagacatctcctgaaatgcttggctgagcttgcaagaaagggaaaaaaatctacatggaccaaaatagggggactgagaccaagaaatataagcatgagatgtgctgtgactaaccccagaaggtatgggaagggaggcatattgcttgtttgtcctgacctggatcctggttagagaagtgggaactgtctctgagaatttataactacttgagttggactttgaactcaaaacatctgcatgttacaagaacctcaaaccaagaaattaacaaaagattggtctccatcaggtgatactcttggagtgtctggtagaagcaaacaggaaactgctcaggagaaacataccatcacccaaggccacagagtattgctgcccaagtaaatccccactgaagttgagctcacaagctaaagattataatacgtaacctggaacaatgtaccgtgaatgagagtagagaagaccctgaagaattacaataagattcaacaagtctaagtgacagcctggatgtgtggggtgggaagaagcaaaagtgaatcccacagagctgtagttacttagatgaatccagggaatcaaataatgttgctattaccagaaatatggaagggtgatttgattttagacagactgtatttggaatggtggtgggacatccatatgggggtattcattagaaccatggggctgtctgacttagaagccatctacgtaggaataatagctgaaggcctggcaatgaatgcactctgtaaggaaagtgttgaaataggaaagaagagagctaagaactggtccaggaaaacactcatgttttgaggaccagttgaaaaagaggagcaaataaggaaaatgagctctttggtctccaattctggttgggtcctgggtttggattttcacattgtttggttttaattctttccatctctagtctaatattctcatccctcacaatccctaggggaagctccaataaatgggagcagtgtcccttgggacatagcaggaacttctcagctaggagttatagagccagactgggctctggtaccaggactactactaagtcacttctttggggttcaattttctcatcagtgatgttaggcctaggtgggtgtgaggataagaataatagagctgatggcacttgctggaatgctgctggagagggcaagataggggtgatcagaggccagccacccactgtctgcgtttcctcctttgttcagcttgtgtgttttgggaccagttgcttgaaatatgggccattatgcttttcttgccctactcttcatgaaaagtgaagtcaggtggcccatgcctaataagtgaaaggtgtggtgacttaaatagtaagacaatgagggtcatgattatcttgtgtctccatgaatctaccacttatcacagtgcctgacagtccacaatttgagcctcttcattgggttaaacattgccctctgcaggctactgttctaaaatgttaattctcctagaagaggtaatattaaatcctttaccacaaattagtttcttagatacaagatacttggccacatgaaagcacttaaaacctagggagagaaaaggatggaattctctgagttgatcattttgtctctggtcagctggactgtggggtggagggtgagcatatcttagagtgaaggagtgaagaaagcagcaagagtatcagaagctggtttgatctggcatcatagggctgtaaggtctcttaattcaagaacagctcagctcagaagagaaaacaatgaagtcctcagacacaggccttctttcttccttatcagagaggggtcattggagcagagagatggagagcacagcggcctttttatgctccaaggtctgcccaaggtggccagaaagagtggaaaagctttgggtggggagttcaaagagtaaaaaggggccaccttcaccattacaaggtcatgctttcctcatcaccctcctagccttcctctgatcccaaagccatgaagagttcacttggaaggacagctggagaaaagtggctgtggcaggcgcatggctgaatggtaagtaggctgatgccacctggagaagatcctttttgtgggaagagcaactaaggtgaccatcagtctctggcaagtgcctgctcccagctatattcaggtgtgctctagctaaatgctgagaccctttgggtcctgacatcatgtgactcttgaacagatgcatagatactgtctggagcctctgtgacactgaacactctgggctttcacaaacagcaccaaaatactgcagccttttgctgttgtcgctactgcctggagctccctctagctgccaaacctgtttctcaccttctggtaggaagcctttccaatcagtgctattaagtttaggtgtctccattctggggttggaaaatgagggttggctttgaagttggacagatttgtttgacctgtctgttcctagcctgggttaactacattgttccagcaagctatctacattgcttccacatctttgaaatgaggtatatgcctgctttatttgggaatgcgaggattaaggagaataatatatacataatgttgaacacctacgccttttaaccactttgaagttccagaaacacctccagcccttaggtgagctgtgattaaattcgttcattaacccaacacacatttactgaatgcctactctgtgccgcagttcctggcaggtgtgcctgacagtgggtgtgtaatatgttcagggtctgtatcccatgagcgtggggatctcctttatcttctggcacatatggtcctgggggagaagctaaggggaagggtcaggagcttacatggcagattcagtaagcttttagcacaataattttaattgcaaaaataaacagttttgtcaactgcttgagagtagcgtctgctttacaaaaattaacaacaacaaaaggaaaaaaaacccaaagcaaaacgttacatccaatggctgctggataagacactgctgtacaaagtcccgcgcgagaccgccttggcgctgccccagcctgtctctgggggttatagaggaaggcgtggggcgtgtgccagttacaaaagactgtcttgaatcccagggtagtgcctattcactgggtggtctcagaagacttcccccaaagcgcggctgacaagggtgacagcgcctggaccgcgggaactgtccgcggagctggtgctgaatagggcgtgtgcggcgggcgcttcaaggaaactggaagcgggaccggaggccggccctcgggcgtgcgaggaggagttggaagaagagcggggaggggaacggcccggaactcgtgcgcgccgaacggcggcgccccaacccataaacccatctcttgctcagagagaagcgaaggagaggcccagcgagtaaaagccgaggcccttgagccgctcctcggcgcgcgccttctgcttgaggtgcaccttgctgtgccgtttcttctcatcgctgcgcgcgaagcggcggccgca

SEQ ID NO: 3514 - protein, 112 aa, Homo sapiens [sequence omitted]

SEQ ID NO: 3515 - DNA, 2457 bp, Homo sapiens
cgcctggggagcgcgcgcgcacgcagcggcgcgagcctggcggcggcggcgacaacaacaacgtcacagctcgagctttccttttcgggagtccccggcacacatcctgtgtccatgtttgggcatttacgtcacggcggcagggccggggcctcccaaaatggcagtggcccggggagtcggaagcccggagccagcgccgccgcagctatataagtgggggggctgtgggctgggggagcccggcagcgctttggagaggcgaggagccgccgcccgaggccggtgcgggcgagcgagggcgccgcggctccccgactcctttcccagaggtgagtgcccgaagccaggagcccgggcgcctaggtctgtgcgctgcggggaacccctaccgccagcctccccgccacccgcgcgcccccaagcccagcgggcgaggccccgggcgccccacagccggcgccgcgccatgctccaccttagcgagttttccgaacccgacgcgctcctcgtcaagtccactgaaggctgttgcgccgaacccagcgctgaattgccccggctgcctgccagggacgctcccgcggccaccggctaccctggagcaggcgacttcttgagctgggctttgaacagctgcggcgcaagtggggacttagccgactcctgcttcctggaggggcctgcgcccacaccccctcccggcctcagctacagcggtagcttcttcattcaggcagtgcccgaacacccgcacgacccggaggcactcttcaacctcatgtcgggcatcttaggcctggcacccttccccggtccagaggcagcagcgtccagatccccgctggatgccccttttcctgcggggtccgatgccttgctgccgggtccgccggacctttactccccggatctgggcgctgcccctttcccagaggcgttctgggaggcctcgccttgcgcgggtgccccctcgcagtgcctgtatgagcctcagctctccccgcccgacgtcaagcccggcctccgggcgcctcccgcctcgccagcgctggacgctgtctctgccttcaagggtccctacgcgccctgggagctgctttctgtgggggccccagggaactgtgggtcacagggagactaccaggccgccccggaggctcgttttcccgtaatagggaccaagattgaggacttgctgtccatcagctgccctgcggaactgccggccgtcccagccaacagactctatcccagcggggcctatgacgctttcccgctggccccgggtgacttaggggagggggctgagggcctccctgggctcctgacccctcctagtggggagggagggagtagcggcgacggcggagagtttctggccagtacgcagcctcagctttccccgctgggccttcgcagcgccgccgcggcggacttccctaaacctctggtggcggacatccctggaagcagtggcgtggctgcaccacccgtgccgccgccgccgcccacccctttcccccaggccaaggcgcgacgcaaggggcgccgcggcggcaaatgcagcacgcgctgcttctgcccgcggccgcacgccaaggccttcgcttgcccggtggagagttgtgtgcggagctttgcgcgctccgacgagctcaatcgccacctgcgcatccacacgggccacaaacccttccagtgccgcatctgcctccgcaacttcagccgcagcgaccacctcaccacgcacgtgcgcacccacaccggcgagaagccttttgcttgcgacgtgtgcggccgccgcttcgcgcgcagcgatgagaagaaacggcacagcaaggtgcacctcaagcagaaggcgcgcgccgaggagcggctcaagggcctcggcttttactcgctgggcctctccttcgcttctctctgagcaagagatgggtttatgggttggggcgccgccgttcggcgcgcacgagttccgggccgttcccctccccgctcttcttccaactcctcctcgcacgcccgagggccggcctccggtcccgcttccagtttccttgaagcgcccgccgcacacgccctattcagcaccagctccgcggacagttcccgcggtccaggcgctgtcacccttgtcagccgcgctttgggggaagtcttctgagaccacccagtgaataggcactaccctgggattcaagacagtcttttgtaactggcacacgccccacgccttcctctataacccccagagacaggctggggcagcgccaaggcggtctcgcgcgggactttgtacagcagtgtcttatccagcagccattggatgtaacgttttgctttgggttttttttccttttgttgttgttaatttttgtaaagcagacgctactctcaagcagttgacaaaactgtttatttttgcaattaaaattattgtgctaaaagctt

SEQ ID NO: 3516 - protein, 589 aa, Homo sapiens
MAVARGVGSPEPAPPQLYKWGGCGLGEPGSALERRGAAARGRCGRARAPRLPDSFPRGECPKPGARAPRSVRCGEPLPPASPPPARPQAQRARPRAPHSRRRAMLHLSEFSEPDALLVKSTEGCCAEPSAELPRLPARDAPAATGYPGAGDFLSWALNSCGASGDLADSCFLEGPAPTPPPGLSYSGSFFIQAVPEHPHDPEALFNLMSGILGLAPFPGPEAAASRSPLDAPFPAGSDALLPGPPDLYSPDLGAAPFPEAFWEASPCAGAPSQCLYEPQLSPPDVKPGLRAPPASPALDAVSAFKGPYAPWELLSVGAPGNCGSQGDYQAAPEARFPVIGTKIEDLLSISCPAELPAVPANRLYPSGAYDAFPLAPGDLGEGAEGLPGLLTPPSGEGGSSGDGGEFLASTQPQLSPLGLRSAAAADFPKPLVADIPGSSGVAAPPVPPPPPTPFPQAKARRKGRRGGKCSTRCFCPRPHAKAFACPVESCVRSFARSDELNRHLRIHTGHKPFQCRICLRNFSRSDHLTTHVRTHTGEKPFACDVCGRRFARSDEKKRHSKVHLKQKARAEERLKGLGFYSLGLSFASL

SEQ ID NO: 3517 - DNA, 1066 bp, Homo sapiens
cacctccagcccagctcctgctcagcgcggagctgctttggagaacttgctgctggcgcccaacagctgggtgaattctgcttacagtgttttccaaagaggcctgtaggacatctgggtcttccatggtggtgggggttttggcctcaacaacaaggctctggtggcagaaatgatagcaacccagtgaaaagagagggacaaaagggtcaaaggagtcagtgcaaaagcactgtctgggaaagcgaatcaacccagattgtcccctcgggaaacatggcatgtgcttggtgtgacagctgattctccccttaatcactgccatgaaaacaaaataaccataagaacaatggcagattagacaagggaaattaaggaacccaaatactgacaggacgcatttttgaagatacagcagactcctgggtccttgtgacaaccttcccacaccaattctcagaccaccttctacccgaacctgcacggtgtcaaaatggcctccacaagaagcaatccaatggggctctgttctctccttgccaagaccacgatgataacgcagttgtgatggccacaggactaggaaggaccatggatataggcagcaaagtctaaggaaattttcttagacagaagtctgaaactagcatggagaataaatggttaaggaaagagagagaaagagagacagcgagagagagcgagagtgagagcgaaagcgagagcgagagagacagatcagagatgggacctccaaagccaggatgtagcaaggttaccagcagcagccctgtaagctctcccttgtaacccagcaactatgttgtgaggaagcccaggtcgcctggaaaagtccacatggacaggaacccaggaactcagctgacagccagcaccagctggcccacctgtatgcatgggccctcttggaagtagaccctccagccttcagtagaacccctccaactgattcaatgtgatacaaagatgaaccttccctgccaagccctgcccaaattgcaggtttgtgggcaaaataaattattgttgttgttgtaatctacta

SEQ ID NO: 3518 - protein, 53 aa, Homo sapiens [sequence omitted]

SEQ ID NO: 3519 - DNA, 1844 bp, Homo sapiens
ctccgctgccgcctaggcgcggggctgacctgcgggggtggggtggggggagggaggtcgaggcccggccccacgtggccgctgctgccgggctcaccccagccccgcccggaggcgccccgcggccccggctagccagggcgggcggccacctctgccctactccttccctccgcgttccgggcctcggagccgccttgaggaggatgagtccctggagctggttcctgctgcagaccctctgcctcctgcccacgggcgcagcttcgcggcgcggggcgcccggcaccgccaactgcgagctcaagccccaacaaagcgagctgaattccttcttgtggaccattaagcgagacccaccatcttacttctttggcacaatccatgtcccgtacacccgagtttgggacttcatccccgacaactctaaggaggctttcctgcagagcagcattgtgtactttgagttggatctcacagacccctataccatctcagctctcaccagctgtcagatgctgccacagggcgagaacctccaagatgtgctccccagggacatctactgccgcctcaagcgccacctggagtatgtcaagctcatgatgcccttgtggatgaccccagaccagcgcggcaaggggctctacgcagactacctcttcaatgctattgccggaaactgggagcgcaagaggcctgtctgggtgatgctcatggtcaactccctgactgaagtggacattaagtcccgtggagtgcctgtcttagacctgttccttgcccaggaggctgagcggctgaggaaacagactggggcagtggaaaaggtggaagagcagtgccatccattgaatgggttgaacttttcacaggttcccaattttattaatgccacgctaccacctcaggagcgcatcactgctcaggagattgacagctacttacgccgggagctgatctacaagcggaatgagagaatagggaagcgggtgaaggcccttttggaggagttccctgacaaaggcttcttctttgcctttggagctggtcatttcatgggcaacaacacagtgctggatgttttgcggcgtgaaggctatgaggtagaacacgcccctgctggacgacccatccacaaagggaagagtaaaaagacctccacacggcccactctgtccaccatctttgctccaaaagtccctaccctggaagtaccggcaccagaagccgtatcctcagggcactcaacgctgcctccccttgtgtcccggcctggaagtgccgacacgcccagtgaggccgaacagaggttccggaagaagcggaggcggtcacagcggaggccgcgactccggcaattcagcgatctgtgggtccgcctggaggagagtgacatagtcccgcaactccaggtccctgtcctggacaggcacatctccactgaactgcggctccctcgccgtgggcattcccaccacagccagatggtggccagcagtgcctgcctgtctctctggactcctgtgttctgggtgctggtgctggctttccaaacagagacacccctcctgtaacgactggaagcaccaggctaagaacctgacccctcggacttgaagaatggccattcctgtactccacattctggtctagccttgttgggcccaatccagaagagactgctcttgaaaaagcggcccagtgttgattcttctctttccaaggaatgtgactttgggttatccaactttgggggcaggtgtacagttttgtaacatagtgagttgtgtgaaaataaattataaatgagttgtatgaaaataaatacctttttttgtata

SEQ ID NO: 3520 - protein, 456 aa, Homo sapiens
MSPWSWFLLQTLCLLPTGAASRRGAPGTANCELKPQQSELNSFLWTIKRDPPSYFFGTIHVPYTRVWDFIPDNSKEAFLQSSIVYFELDLTDPYTISALTSCQMLPQGENLQDVLPRDIYCRLKRHLEYVKLMMPLWMTPDQRGKGLYADYLFNAIAGNWERKRPVWVMLMVNSLTEVDIKSRGVPVLDLFLAQEAERLRKQTGAVEKVEEQCHPLNGLNFSQVPNFINATLPPQERITAQEIDSYLRRELIYKRNERIGKRVKALLEEFPDKGFFFAFGAGHFMGNNTVLDVLRREGYEVEHAPAGRPIHKGKSKKTSTRPTLSTIFAPKVPTLEVPAPEAVSSGHSTLPPLVSRPGSADTPSEAEQRFRKKRRRSQRRPRLRQFSDLWVRLEESDIVPQLQVPVLDRHISTELRLPRRGHSHHSQMVASSACLSLWTPVFWVLVLAFQTETPLL

SEQ ID NO: 3521 - DNA, 2346 bp, Homo sapiens
atgaaaggggaaagagaaaggaccagggaaggttcagaagcaattcagggctctggcaatgggcagccagagatcgtccagttatcagattctcaaaatggacagcgacttaaagcaattaaagaccactgcgacaaatgctcctgcgaacaccactccgaagttaatggcgcagacgtctggactttaaaaggtggtggtaaagtgcgctcaggcatggaggcaccctcccctcacaatcggcagcataagcacagacgtaaacgcaggaaccaatgcgattttaggttgaatttaggacagcgctggaacttcactttacccctcttgcggtcacacgaggtgggcggcggccccggcagggtttgggcgggagaaacgcggttcgggactccgctgccgcctaggcgcggggctgacctgcgggggtggggtggggggagggaggtcgaggcccggccccacgtggccgctgctgccgggctcaccccagccccgcccggaggcgccccgcggccccggctagccagggcgggcggccacctctgccctactccttccctccgcgttccgggcctcggagccgccttgaggaggatgagtccctggagctggttcctgctgcagaccctctgcctcctgcccacgggcgcagcttcgcggcgcggggcgcccggcaccgccaactgcgagctcaagccccaacaaagcgagctgaattccttcttgtggaccattaagcgagacccaccatcttacttctttggcacaatccatgtcccgtacacccgagtttgggacttcatccccgacaactctaaggaggctttcctgcagagcagcattgtgtactttgagttggatctcacagacccctataccatctcagctctcaccagctgtcagatgctgccacagggcgagaacctccaagatgtgctccccagggacatctactgccgcctcaagcgccacctggagtatgtcaagctcatgatgcccttgtggatgaccccagaccagcgcggcaaggggctctacgcagactacctcttcaatgctattgccggaaactgggagcgcaagaggcctgtctgggtgatgctcatggtcaactccctgactgaagtggacattaagtcccgtggagtgcctgtcttagacctgttccttgcccaggaggctgagcggctgaggaaacagactggggcagtggaaaaggtggaagagcagtgccatccattgaatgggttgaacttttcacaggtcatctttgctttgaaccagaccctcctgcagcaggaaagcctgcgagcaggcagtcttcagatcccctacacgacggaggatctcatcaaacactataactgcggggacctcagctccgtcatcctcagccatgacagctcccaggagcgcatcactgctcaggagattgacagctacttacgccgggagctgatctacaagcggaatgagagaatagggaagcgggtgaaggcccttttggaggagttccctgacaaaggcttcttctttgcctttggagctggtcatttcatgggcaacaacacagtgctggatgttttgcggcgtgaaggctatgaggtagaacacgcccctgctggacgacccatccacaaagggaagagtaaaaagacctccacacggcccactctgtccaccatctttgctccaaaagtccctaccctggaagtaccggcaccagaagccgtatcctcagggcactcaacgctgcctccccttgtgtcccggcctggaagtgccgacacgcccagtgaggccgaacagaggttccggaagaagcggaggcggtcacagcggaggccgcgactccggcaattcagcgatctgtgggtccgcctggaggagagtgacatagtcccgcaactccaggtccctgtcctggacaggcacatctccactgaactgcggctccctcgccgtgggcattcccaccacagccagatggtggccagcagtgcctgcctgtctctctggactcctgtgttctgggtgctggtgctggctttccaaacagagacacccctcctgtaacgactggaagcaccaggctaagaacctgacccctcggacttgaagaatggccattcctgtactccacattctggtctagccttgttgggcccaatccagaagagactgctcttgaaaaagcggcccagtgttgattcttctctttccaaggaatgtgactttgggttatccaactttgggggcaggtgtacagttttgtaacatagtgagttgtgtgaaaataaattataaatgagttgtatgaaaataaatacctttttttgtata

SEQ ID NO: 3522 - protein, 692 aa, Homo sapiens
MKGERERTREGSEAIQGSGNGQPEIVQLSDSQNGQRLKAIKDHCDKCSCEHHSEVNGADVWTLKGGGKVRSGMEAPSPHNRQHKHRRKRRNQCDFRLNLGQRWNFTLPLLRSHEVGGGPGRVWAGETRFGTPLPPRRGADLRGWGGGREVEARPHVAAAAGLTPAPPGGAPRPRLARAGGHLCPTPSLRVPGLGAALRRMSPWSWFLLQTLCLLPTGAASRRGAPGTANCELKPQQSELNSFLWTIKRDPPSYFFGTIHVPYTRVWDFIPDNSKEAFLQSSIVYFELDLTDPYTISALTSCQMLPQGENLQDVLPRDIYCRLKRHLEYVKLMMPLWMTPDQRGKGLYADYLFNAIAGNWERKRPVWVMLMVNSLTEVDIKSRGVPVLDLFLAQEAERLRKQTGAVEKVEEQCHPLNGLNFSQVIFALNQTLLQQESLRAGSLQIPYTTEDLIKHYNCGDLSSVILSHDSSQERITAQEIDSYLRRELIYKRNERIGKRVKALLEEFPDKGFFFAFGAGHFMGNNTVLDVLRREGYEVEHAPAGRPIHKGKSKKTSTRPTLSTIFAPKVPTLEVPAPEAVSSGHSTLPPLVSRPGSADTPSEAEQRFRKKRRRSQRRPRLRQFSDLWVRLEESDIVPQLQVPVLDRHISTELRLPRRGHSHHSQMVASSACLSLWTPVFWVLVLAFQTETPLL

SEQ ID NO: 3523 - DNA, 3058 bp, Homo sapiens
gagagaagagaggatggaggggttttacagagagatctgtctcctttggttaaggttgcatcacaggcacaggaaatattagagtaactgagggaggtaaactatgtggaaggagggatgctgtggtttgaatgtgtcccctccaaaattcagatgttgctagtgtgatggtattaaaaggtgaggcctttaggaggtgattaagccatgaaggctcctctttataaggacctttttgggattaagactcctctttataaggcctttatgggattaaggccctaataaaagaggtgtcatgcagccattcagttagcttgcccttctgtcttcttccatgtgaggatgcagcaagaaggccctcaccagaccaaaggccagtgccttgatctcggacttcccagcctccagaatggtcatctttgctttgaaccagaccctcctgcagcaggaaagcctgcgagcaggcagtcttcagatcccctacacgacggaggatctcatcaaacactataactgcggggacctcagctccgtcatcctcagccatgacagctcccaggttcccaattttattaatgccacgctaccacctcaggagcgcatcactgctcaggagattgacagctacttacgccgggagctgatctacaagcggaatgagagaatagggaagcgggtgaaggcccttttggaggagttccctgacaaaggcttcttctttgcctttggagctgcttcacagtagccttgaaaatcaggagccttgaactacagtagctgtgaaaactgtttgcctaatggttactggaggggacagaatgggttcaaagttcctccaaagctccatccttaaagaatcatcactatttgacatgtccaatagttccctgaaatttccattcccaagcttgtcttcatttgacctgactcagagcttgctctgtgtgaatagccctattcttagggtgtgtgttgaaaacaatcagtagcagctgtttaacatcatagttgctggaaatagcaatattaattgaagcttacaaggggctgcccaaaaaacttaaaagcaaaatcccatagggggtatagaaaagctctaaaatattcctagagagtcacatgcatgagaagagctgtgcacatgcccaggaaagacctgagaaggtcctaatctctcacctctggctgatcttgaggctctgtgtaagcagagtgtgaaagctaaggcaaagtcataaattgcctgttgaagcatcaaatacatgcccccaaactcacacagcccctctgcaaaggttgggaaacttgcaaggaatttaaggaaatctctgttcagtcattagccagccactaaactaactgagcagatccttcagtgatcacacacaacaaagaatacagactttacagacttagtcctagaaaatcactacacaaacagcaacaacaatgcacctgggactaagggagaggagatgagttccagagttggtatattatttaaatgtctagttttcaataaaaacaattataagacacagagcaaaactagaaagtatggcccatacccagggaaaaacaagcaaccaatagaagctgtccttgaggaagttaatatcttggacttactagaaaatgactttaacactagttattataaatatgttcaaaaaactaaaagaggccaggtgcggaggctcacgcctataatcccagcactttgggaggctgaagcaggtgggtcacctgaggtcaggagtttgagaccagcctgaccaatatggcaaaaccctatctctactaataatacaaaaattagccaggcgttgtggcgcacacctgtaatcccagctacttgggaggctgaagcaggagaactgcttgaaactgggaggaagaggttgcagtaagctgagatcacaccactgtactccagcctgggccacaagagtgaaactccatctccaaaaaaaaaaaaaaaaaaaaaaaccctaaaattaaccatatctaaagaattaaaggaaagtttgagaacaatatctcaccaatacagaatatcaataaaaatataaaaattattttaaaagaaccaaataggaattctggaatttaaagtgtaggaactgaaatgaaaaattcactacgggggctgaacagtagatttgaactggcagaagaagaatcaacatacatgaagataggttgattgagatgattcagtatgagaaagagaaaggaaaaggaatgaagaaaaatgaatagatcttcagatacctgtgagacaccctcaagtgtgccaatgtatacctaacgggagtcccagaagacaggagagaaaaaaagaaagaaataaaaagaatatttgaatttaaaattgcttgaaaatgtctcaaatttgatgaaaaatattactctgcacattcaacccatgaactataagttgtataaaatcaaaaagtttcacaccaaggcgtgtcatagccaaactgtcaaaagccaaagacacagaatcttgaaagcagtgagagcaaagcagacaagggatccccaataggattaacagcagatttctcatcagaagccatgcaagccagaaggctatgggagacatactcaaaatgctgaaataaaagactgtcaacaaacatttccacatccagcaaaaatcaaaaacgaaggagaaatctgttgcatgtgagctgaatagaatttgtattctgctgttgttggatgaagtattctttaaatgtcaattagatcaatttgattgatgatgctcttcagttcaactatattccctatctgataattccagaatctctatcatgtctgagtctgggtctgatgctttcattgtttcttcagattgtgatttttcttgcctcccagtgtgacttgtaatttttaattgaaagctggatatgatgtatttggcaatgggaagtgagggaaatatgtttttagtgtgagggtttatgttaatctttctcagagttgggctgtttaatgttttgctgtggtctgaatgttccttaaaacttgtgtgttgaaactt

SEQ ID NO: 3524 - protein, 111 aa, Homo sapiens
MVIFALNQTLLQQESLRAGSLQIPYTTEDLIKHYNCGDLSSVILSHDSSQVPNFINATLPPQERITAQEIDSYLRRELIYKRNERIGKRVKALLEEFPDKGFFFAFGAASQ

SEQ ID NO: 3525 - DNA, 563 bp, Homo sapiens
gggaaacagtggggctttcgaagcttatcaaaagcaaaccttgctcttttgaaaaagcattttccaacgcaacctggggacaaagtggggttaaattttacacagattgcttacgagcaagagttaagtggctaacaagtcatgaaatcttacggagaagcaggtaaagccaaaattaaaaactccctccgagtcagcccattctgcgacccacctcctcccctttgcggcaggaactctactccatcgaggggctttgctgcagtggcactgcccacgcatactcaactaaaagactcagaccacgccagccatgccacgaggatgcctccaagttgtgagaaaatcaagcatctacaaggaaaggccacatgtcggcattccagccacagcctcagctgaggtcagagctaacagccagcatcaaccactaaccacacaagtgaaggagacttcgaagcttcaaactgccccagctaatgccaagtggagcagagatgagttgtccctgctgaaattgcagactcatgagcaaaataaatgtagttgttttaagacactaa

SEQ ID NO: 3526 - protein, 86 aa, Homo sapiens
MKSYGEAGKAKIKNSLRVSPFCDPPPPLCGRNSTPSRGFAAVALPTHTQLKDSDHASHATRMPPSCEKIKHLQGKATCRHSSHSLS

SEQ ID NO: 3527 - DNA, 500 bp, Homo sapiens
atataaggctaggggcgggcgccgctcttttgtttcttgctgcagcaacgcgagtgggagcaccaggatctcgggctcggaacgagactgcacggattgttttaagaaaatggcagacaaaccagacatgggggaaatcgccagcttcgataaggccaagctgaagaaaacggagacgcaggagaagaacaccctgccgaccaaagagaccattgagcaggagaagcggagtgaaatttcctaagatcctggaggatttcctacccccgtcctcttcgagaccccagtcgtgatgtggaggaagagccacctgcaagatggacacgagccacaagctgcactgtgaacctgggcactccgcgccgatgccaccggcctgtgggtctctgaagggacccccccccaatcggactgccaaattctccggtttgccccgggatattatagaaaattatttgtatgaataatgaaaataaaacacacctcgtggcatggctggc

SEQ ID NO: 3528 - protein, 44 aa, Homo sapiens; identical to SEQ ID NO: 290

SEQ ID NO: 3529 - DNA, 580 bp, Homo sapiens
atataaggctaggggcgggcgccgctcttttgtttcttgctgcagcaacgcgagtgggagcaccaggatctcgggctcggaacgagactgcacggattgttttaagaaaatggcagacaaaccagacatgggggaaatcgccagcttcgataaggccaagctgaagaaaacggagacgcaggagaagaacaccctgccgaccaaagagaccattgagcaggagaagcggagtgaaatttcctaagatcctggaggatttcctacccccgtcctcttcgagaccccagtcgtgatgtggaggaagagccacctgcaagatggacacgagccacaagctgcactgtgaacctgggcactccgcgccgatgccaccggcctgtgggtctctgaagggacccccccccaatcggactgccaaattctccggtttgccccgggatattatagaaaattatttgtatgaataatgaaaataaaacacacctcgtggcatggctggcgtggtctgagtcttttagttgagtatgcgtgggcagtgccactgcagcaaagcccctcgatggagtagagttcctgccgc

SEQ ID NO: 3530 - protein, 44 aa, Homo sapiens; identical to SEQ ID NO: 290

SEQ ID NO: 3531 - DNA, 701 bp, Homo sapiens
gaacgagactgcacggtgagtgcggcgccggggcggggggcccacccagggtgtggtcggatccggtgcaccgggcgggcgcgccgcaaccgcgacaggcgcccttctcggaccggacgcaggggccggcgaccacgccctgggaccgagaagaggggtgcgggacgcgcccagatcctcggccttggggctgctcggcacgccttggcgcgagtgccacgtcgagaggcgtcggcggggagcgcggaaggggacgctggcccccaggcccaggtcaagcgccttggtttgcccactaggattgttttaagaaaatggcagacaaaccagacatgggggaaatcgccagcttcgataaggccaagctgaagaaaacggagacgcaggagaagaacaccctgccgaccaaagagaccattgagcaggagaagcggagtgaaatttcctaagatcctggaggatttcctacccccgtcctcttcgagaccccagtcgtgatgtggaggaagagccacctgcaagatggacacgagccacaagctgcactgtgaacctgggcactccgcgccgatgccaccggcctgtgggtctctgaagggacccccccccaatcggactgccaaattctccggtttgccccgggatattatagaaaattatttgtatgaataatgaaaataaaacacacctcgtggcatggc

SEQ ID NO: 3532 - protein, 44 aa, Homo sapiens; identical to SEQ ID NO: 290

SEQ ID NO: 3533 - DNA, 1326 bp, Homo sapiens
ggcaggagaatggcgtgaacccgggaggcggagcttgcagtgagccgagatcgcgtccagacctgggtgacagagcgagactccctctcaaaaaaaaaagaaaagcaagctctcatcaccccagcctcctggggcttgtaggatgaaatgtaactttaaggcccaacgtgcttttccagcatacggactcttcctgccagcgcaccctgggcttccttgtactgtattaattcctgcccctgtgcctttgtgcatactcttccttctgcttaggtggagcataggaaagtaaagtcaaaattcgggttccctgtactcctgtaagccttccctgcctcccttaggcaaaccagtaatttcctaacttcctcctctgctcactcatgtcgtgctgtaatttttaattcgttttcatcttttttctcaactagactcctcaaaggcagcgaccacattgttctttgtctctgggatccagtagtgttgaatgagtgagtgaatgaacaaattatttatttatttatttatttatttattttttgagacagagcctctctctgtcgcacaggcaggagtgcagtggtgcgatctcggctcactgcaacctctgcctcccgggttcaagtgattctcctgcctcagcctcctgagtagctgggactacaggagggtgccatgacgcctggctaatttttgtatatttagtagagacggggtttcaccatgttgcccaggctggtctcaaactgctggcctcaggtgatccacccacctcagcctcccaaagtcctgggattacagccatgagccaccaggcccggctgtgaatgatgtagagctgaaagaaaaactaatggttctcaaagtgcggtccaaggtccccaagaggtgaggtgaggtgctaggattttcatgctttcagcaaacagcacatcctaacagattgaatgcagaagaagagaatccagctgtcttcatttaagccaaacattaaagagatctgaaaaacaatatcgtacttccacattttttgggaaaaaataagttatttttctttaaaatgtgttctgttactagatagtgggtttattactgtttttaagtgactacgtttttgtttgtttgtttgtttgtttgagacagtctcattctgccacccaggctggatggagggaggagggaaggtgctcagaataaacattcaatgtccctgagcattcctagatcaaccggatcaggatctctgaaggatggggctcaaagattggcatttgaaagaacacccgtggggatcctgatggtgcaataaagttgtagaaccacctc

SEQ ID NO: 3534 - protein, 49 aa, Homo sapiens
MKCNFKAQRAFPAYGLFLPAHPGLPCTVLIPAPVPLCILFLLLRWSIGK

SEQ ID NO: 3535 - DNA, 508 bp, Homo sapiens
taggaaattactggtttgcctaagggaggcagggaaggcttacaggagtacagggaacccgaattttgactttactttcctatgctccacctaagcagaaggaagagtatgcacaaaggcacaggggcaggaattaatacagtacaaggaagcccagggtgcgctggcaggaagagtccgtatgctggaaaagcacgttgggccttaaagttacatttcatcctacaagccccaggaggctgggtggaacaaaaatcatttggtagacaatttggtataaggatttaaattaatccttcttgatcttcttttcttttttgagacagagtgtcacactgtcactcagactaggatgtggtggtacaatcacggctcactgcagactcgacctcctgggctcaagcaatcctcccacctcagcctcctgagtatttgggaccaaaggcggatgccaccacgcccagctaattttttttttttttttgagacggagtctcactctgtcatc

SEQ ID NO: 3536 - protein, 68 aa, Homo sapiens
MLHLSRRKSMHKGTGAGINTVQGSPGCAGRKSPYAGKARWALKLHFILQAPGGWVEQKSFGRQFGIRI

SEQ ID NO: 3537 - DNA, 1919 bp, Homo sapiens
aggaggaggaagaggaggaggaggaggcggcggccgggagccgggggagaggggcggggggtgggccgggggaggggaggagcgggatttgcggagcgccgcgccgctgccgggagccggcaggcccgagagtgaccggagtcacggcgggcgccggcggagctgcggcgtcggacccgcctcctggaggagctcagccccgaccaggcccggccccattcccgccccgcgccgcctccccgccgccgccgccgccgccgccgcgggagcgctcccctgcccaccccgcccccgcggccgagcccgggagtcgagtgggagtcggccggccggcgcgggcagcgccgggaccccgcgggggacactgcagccggagcccgggaggggccgcgccgccaccgtctgaactaggatgtcccgacatgaaggtgtcagctgtgatgcatgtttaaaaggaaattttcgaggtcgcagatataagtgtttaatttgctacgattacgatctttgtgcatcttgttatgaaagtggtgcaacaacaacaaggcatacaactgaccacccaatgcagtgcatattaacaagggtagattttgatttatactatggtggggaagctttctctgtagagcagccacagtcttttacttgtccctattgtggaaaaatgggctatacggagacatctcttcaagaacatgttacttctgaacatgcagaaacatcaacagaagtgatttgtccaatatgtgcagcgttacctggaggcgatcctaatcatgtcacggatgactttgcagctcatcttacacttgaacacagagcccctagagatttagatgaatcgagtggtgttcgacatgtacgtagaatgtttcaccctggccggggattaggaggtcctcgtgctcgtagatcaaacatgcactttactagcagttctactggtggactttcttcttctcagagttcatattctccaagcaatagggaagccatggatcctatagctgagcttttatctcagttatcaggagtgagacgttctgcaggaggacagcttaattcctctggcccttccgcttctcagttacaacaactgcagatgcagctgcagctagaacggcagcatgcccaggcagcacggcaacaactggagaccgcacgcaacgcaacccggcgtactaacacaagcagtgtcaccactacaatcacacaatccacagcaacaaccaacatagctaatacagaaagcagtcagcagactctacagaattcccagtttcttttaacaaggttgaatgatcctaaaatgtctgaaacggagcgccagtccatggaaagcgagcgtgcagaccgcagcctgtttgtccaagagctccttctgtccactttagtgcgtgaagagagctcatcctcagatgaggatgatcggggggagatggcagattttggtgctatgggctgtgtagatattatgcctttagatgttgctttagaaaacctaaatttaaaagagagtaataaaggaaatgagcctccaccacctcctctttgatgacatcccaattcgcagacaatgtcctctgtgctgtatttgccaatgaaagtggacaacaactatcttgggtttgtttggtgattgtaatttcaggtctgtcactcttgttacattgtgtacattcaaaaggaagagagaaaatatatatgataatcatttccacttaactaatttttacttctagcaggtaaatgtaggtagcagtgcaggggtgatctctgcttcctgtaccttgacatgcaaaaggctctcctaatactccacattcaaactgaagaggaaaattgaaatctctaatgaagctgctgtgtgtatttatgaatattaatgaataaaaactgcttggatggtttacctt

SEQ ID NO: 3538 - protein, 381 aa, Homo sapiens; identical to SEQ ID NO: 293

SEQ ID NO: 3539 - DNA, 3394 bp, Homo sapiens
aggaggaggaagaggaggaggaggaggcggcggccgggagccgggggagaggggcggggggtgggccgggggaggggaggagcgggatttgcggagcgccgcgccgctgccgggagccggcaggcccgagagtgaccggagtcacggcgggcgccggcggagctgcggcgtcggacccgcctcctggaggagctcagccccgaccaggcccggccccattcccgccccgcgccgcctccccgccgccgccgccgccgccgccgcgggagcgctcccctgcccaccccgcccccgcggccgagcccgggagtcgagtgggagtcggccggccggcgcgggcagcgccgggaccccgcgggggacactgcagccggagcccgggaggggccgcgccgccaccgtctgaactaggatgtcccgacatgaaggtgtcagctgtgatgcatgtttaaaaggaaattttcgaggtcgcagatataagtgtttaatttgctacgattacgatctttgtgcatcttgttatgaaagtggtgcaacaacaacaaggcatacaactgaccacccaatgcagtgcatattaacaagggtagattttgatttatactatggtggggaagctttctctgtagagcagccacagtcttttacttgtccctattgtggaaaaatgggctatacggagacatctcttcaagaacatgttacttctgaacatgcagaaacatcaacagaagtgatttgtccaatatgtgcagcgttacctggaggcgatcctaatcatgtcacggatgactttgcagctcatcttacacttgaacacagagcccctagagatttagatgaatcgagtggtgttcgacatgtacgtagaatgtttcaccctggccggggattaggaggtcctcgtgctcgtagatcaaacatgcactttactagcagttctactggtggactttcttcttctcagagttcatattctccaagcaatagggaagccatggatcctatagctgagcttttatctcagttatcaggagtgagacgttctgcaggaggacagcttaattcctctggcccttccgcttctcagttacaacaactgcagatgcagctgcagctagaacggcagcatgcccaggcagcacggcaacaactggagaccgcacgcaacgcaacccggcgtactaacacaagcagtgtcaccactacaatcacacaatccacagcaacaaccaacatagctaatacagaaagcagtcagcagactctacagaattcccagtttcttttaacaaggttgaatgatcctaaaatgtctgaaacggagcgccagtccatggaaagcgagcgtgcagaccgcagcctgtttgtccaagagctccttctgtccactttagtgcgtgaagagagctcatcctcagatgaggatgatcggggggagatggcagattttggtgctatgggctgtgtagatattatgcctttagatgttgctttagaaaacctaaatttaaaagagagtaataaaggaaatgagcctccaccacctcctctttgatgacatcccaattcgcagacaatgtcctctgtgctgtatttgccaatgaaagtggacaacaactatcttgggtttgtttggtgattgtaatttcaggtctgtcactcttgttacattgtgtacattcaaaaggaagagagaaaatatatatgataatcatttccacttaactaatttttacttctagcaggtaaatgtaggtagcagtgcaggggtgatctctgcttcctgtaccttgacatgcaaaaggctctcctaatactccacattcaaactgaagaggaaaattgaaatctctaatgaagctgctgtgtgtatttatgaatattaatgaataaaaactgcttggatggtttaccttaactactgcatgaggttttttgcagcgtgcatgagttttagtgaccttgttatttaagaagttaaatacaaggagtaaaacttaaaaaaaaaatacaaagcccaaagctttcccaaacattattcaatggttacacgacgaagtagcttttgaataatgtctgcctgaatcacctttctttgtgtgcctcctacgcacaaagccagctctgcagtggaatctggggattatagccgggtgtggcactccgccctgtgtgactgtcctgtcgccctgttagtcatcttgcctgtgtggagctcagcctgtctctttaactcatctgtagaagacacaccagtaaagctactgttggaatctgctgcaggggcctttgtgtgccctaaaaacaaatcctgttcatgtttgtttaaagtttttactttttgtggttgtttaaaattttttcaattgttaaatatgttttattcaggtgtagatgaatttcatttattgactgttcaacagagttaacctgaattatgttgtctttgtttttaaaaatctcacattctcaatcatattttgcattatttatgtatttgctttgtagtttgctgagacagatcagtatcaggggagctttgaggatttgccttcccagatttgtcagtatattacaaccaaattcttaatgctaattttagcaccttttatttattgggttttttctggcataaaaagtaaagccttttaattgaatcatgccacctatatgcctatattattaatcctatgtgtaaaaaaaatgtacagctttttttgggtttgttttggggtttggaagggccgggttattttttatttcctgtttcagtttttgtgcatagactttcacaatagctccaaggcagggacagcgggtttgggggttgggagggcagtttttggaatgtaaatttaggacttttaaaaaggtgcgcacagcttctgataaatttataactagacttaacctaatcatgtctcgttccagttctcttttctctgagcccttttcaaagtctcctctctttctcctgtcatccttttcctttcctgtccgtgtatctccgtttcttcaacatgacaagcatacagacttgaacacccctccggtgttcttccgagaactgtgaagtccatgttcatccaaatgtaaccaaaaaagaagtcaccctacatgtctgaaaaactgttgcttctcctctgaaacttcaaactccaacgatttccaaatacaatagctttgttttctttagttctgtaatggataatgtttaaaggaaaactttacaccaggcttctggttacactagaagtcaagcccattagggattttcattttttttcatttggttgttgagaagtttcaaaaatcagttttcaagctgtggtctttcaaacacatctgcacataagtcacacatttcaataaagcattttcaagactgttg

SEQ ID NO: 3540 - protein, 381 aa, Homo sapiens; identical to SEQ ID NO: 293

SEQ ID NO: 3541 - DNA, 4514 bp, Homo sapiens
aggaggaggaagaggaggaggaggaggcggcggccgggagccgggggagaggggcggggggtgggccgggggaggggaggagcgggatttgcggagcgccgcgccgctgccgggagccggcaggcccgagagtgaccggagtcacggcgggcgccggcggagctgcggcgtcggacccgcctcctggaggagctcagccccgaccaggcccggccccattcccgccccgcgccgcctccccgccgccgccgccgccgccgccgcgggagcgctcccctgcccaccccgcccccgcggccgagcccgggagtcgagtgggagtcggccggccggcgcgggcagcgccgggaccccgcgggggacactgcagccggagcccgggaggggccgcgccgccaccgtctgaactaggatgtcccgacatgaaggtgtcagctgtgatgcatgtttaaaaggaaattttcgaggtcgcagatataagtgtttaatttgctacgattacgatctttgtgcatcttgttatgaaagtggtgcaacaacaacaaggcatacaactgaccacccaatgcagtgcatattaacaagggtagattttgatttatactatggtggggaagctttctctgtagagcagccacagtcttttacttgtccctattgtggaaaaatgggctatacggagacatctcttcaagaacatgttacttctgaacatgcagaaacatcaacagaagtgatttgtccaatatgtgcagcgttacctggaggcgatcctaatcatgtcacggatgactttgcagctcatcttacacttgaacacagagcccctagagatttagatgaatcgagtggtgttcgacatgtacgtagaatgtttcaccctggccggggattaggaggtcctcgtgctcgtagatcaaacatgcactttactagcagttctactggtggactttcttcttctcagagttcatattctccaagcaatagggaagccatggatcctatagctgagcttttatctcagttatcaggagtgagacgttctgcaggaggacagcttaattcctctggcccttccgcttctcagttacaacaactgcagatgcagctgcagctagaacggcagcatgcccaggcagcacggcaacaactggagaccgcacgcaacgcaacccggcgtactaacacaagcagtgtcaccactacaatcacacaatccacagcaacaaccaacatagctaatacagaaagcagtcagcagactctacagaattcccagtttcttttaacaaggttgaatgatcctaaaatgtctgaaacggagcgccagtccatggaaagcgagcgtgcagaccgcagcctgtttgtccaagagctccttctgtccactttagtgcgtgaagagagctcatcctcagatgaggatgatcggggggagatggcagattttggtgctatgggctgtgtagatattatgcctttagatgttgctttagaaaacctaaatttaaaagagagtaataaaggaaatgagcctccaccacctcctctttgatgacatcccaattcgcagacaatgtcctctgtgctgtatttgccaatgaaagtggacaacaactatcttgggtttgtttggtgattgtaatttcaggtctgtcactcttgttacattgtgtacattcaaaaggaagagagaaaatatatatgataatcatttccacttaactaatttttacttctagcaggtaaatgtaggtagcagtgcaggggtgatctctgcttcctgtaccttgacatgcaaaaggctctcctaatactccacattcaaactgaagaggaaaattgaaatctctaatgaagctgctgtgtgtatttatgaatattaatgaataaaaactgcttggatggtttaccttaactactgcatgaggttttttgcagcgtgcatgagttttagtgaccttgttatttaagaagttaaatacaaggagtaaaacttaaaaaaaaaatacaaagcccaaagctttcccaaacattattcaatggttacacgacgaagtagcttttgaataatgtctgcctgaatcacctttctttgtgtgcctcctacgcacaaagccagctctgcagtggaatctggggattatagccgggtgtggcactccgccctgtgtgactgtcctgtcgccctgttagtcatcttgcctgtgtggagctcagcctgtctctttaactcatctgtagaagacacaccagtaaagctactgttggaatctgctgcaggggcctttgtgtgccctaaaaacaaatcctgttcatgtttgtttaaagtttttactttttgtggttgtttaaaattttttcaattgttaaatatgttttattcaggtgtagatgaatttcatttattgactgttcaacagagttaacctgaattatgttgtctttgtttttaaaaatctcacattctcaatcatattttgcattatttatgtatttgctttgtagtttgctgagacagatcagtatcaggggagctttgaggatttgccttcccagatttgtcagtatattacaaccaaattcttaatgctaattttagcaccttttatttattgggttttttctggcataaaaagtaaagccttttaattgaatcatgccacctatatgcctatattattaatcctatgtgtaaaaaaaatgtacagctttttttgggtttgttttggggtttggaagggccgggttattttttatttcctgtttcagtttttgtgcatagactttcacaatagctccaaggcagggacagcgggtttgggggttgggagggcagtttttggaatgtaaatttaggacttttaaaaaggtgcgcacagcttctgataaatttataactagacttaacctaatcatgtctcgttccagttctcttttctctgagcccttttcaaagtctcctctctttctcctgtcatccttttcctttcctgtccgtgtatctccgtttcttcaacatgacaagcatacagacttgaacacccctccggtgttcttccgagaactgtgaagtccatgttcatccaaatgtaaccaaaaaagaagtcaccctacatgtctgaaaaactgttgcttctcctctgaaacttcaaactccaacgatttccaaatacaatagctttgttttctttagttctgtaatggataatgtttaaaggaaaactttacaccaggcttctggttacactagaagtcaagcccattagggattttcattttttttcatttggttgttgagaagtttcaaaaatcagttttcaagctgtggtctttcaaacacatctgcacataagtcacacatttcaataaagcattttcaagactgttgaccacttgaatttctttggtgttagtggattaacctaaccattactctgagattttatatctctaatccagtattttttttctttttatgctaaacatgggagatcctggttttgtgtgaatgcattattttggatgtgagaaataaatgccaattatatgtactttcccttttctgcacaaattctgggaaaatgtaaaagccttcattttttaacatggttttagggaacaactgtaagtccattcagagcagtttaatttagatgatcacttttaacactgcagaagacctaaggagtcataagattccatctcatgtagaatactgtatattaattattttttaccagatattttacaaatacctcacctcatcctgtatgtaatcaataatgtattattttagggtagaacgacacagaatatcaatataaaaatatattcaagcccttgaaattcttgtgtcctttttctttagtttctgaatgaaaatcttattactggatgtactattgaataaaaattaattgcaaagactttgatggagacaaaatcaaaatataccactgtttattttggcagcaccttcaaatttctaaggaccagatcctgaattttgagaattttttgtttcgttgagttttgagtgtctaggatataagtttataaatgttctacagtgcttgtctttacttcctgtttagaaatcatttaaatctttcccctcgaggtgctctggaagaagtttaatttcagctctgaacaagtagaaataactgtgcttccttgtatggctgcaatcataagacagaatttctgtggttggctaccgtgaaatctttgtatttatattgcattgttttgttaaaaaaaaaaaaatccacagaagtagaacctaggtttgctactaacaaagtagtggattcttataattaggctcaggtaaagtaagagaaaacttctctccctgtggcccccagagaaatgaagtaggatagcagattacactattagaaataatagacgtaacaaaaaaaatccagcccattatccccaccccccattttccctctcaatattagaaatttcaataatatgctgacagattttcaaaggtc

SEQ ID NO: 3542 - protein, 381 aa, Homo sapiens; identical to SEQ ID NO: 293

SEQ ID NO: 3543 - DNA, 441 bp, Homo sapiens
ctggtctcaaactcctgggctcaagtgattctcccacctcagctctcgagtactgggattataggtgtgagctgccatgcccagcaactttttcagtttgaataaatcgtaaattacatttaccttgactttcaatagagaatatataagaatgtaaatttatgggaaaatgaatcacattttaatttctggggtctttgatttcataatttcatttaaagttcattttgaagctcattttcccatatttttatattcatgtttaagttaaaatgtagtaaaacataactacatgttcttgtttcaaattgggaactcaatttggaagagattccttttagttgaggcaggagaatctcttgaacccaggaggcggaggttgcagtgagctgagatcacccattgcactccagcctgagcaacaagagcgaaattctgtct

SEQ ID NO: 3544 - protein, 31 aa, Homo sapiens
MFLFQIGNSIWKRFLLVEAGESLEPRRRRLQ

SEQ ID NO: 3545 - DNA, 3831 bp, Homo sapiens
gtctagagcggcggcggctggctagggctgcggcgcgcgtggagggttcgctgctggtttgccgccgggtcgggctccgtgggccggggcaggaggaccagcacctgaggccgggcccgcagcccgcgacttcacagccaggcggcggcgctgctgctgctgcggggctctggcgcgcagcccggcgggacagcggggcggctggcgccgggggccggggagcgccagatgatggatttggacatgcttctatgaagaaatgccacatggtccgagagcaaacatgtccaggctactgccactttagtggactagggctcggtgccagcacttcccgggtaatcaggcgtggtctgaccgaggatcaagaagcacatcatcaccaatgacatcatgacagcaagagagcacagccctcgccatggtgccagggcccgtgcaatgcagcgggcttccaccatcgacgtggcggccgacatgctgggcctctctctggcaggaaatatacaagacccagatgagcccattttagaatttagcttagcttgcagtgagctgcatactccatcgctagatcgaaagccaaatagttttgttgcggtgagtgtcaccacccctcctcaggcattctggacgaagcatgcacagacggagatcattgagggaaccaacaatcctatatttctaagcagtattgccttctttcaagactctcttatcaatcagatgacacaagtcaaactctccgtgtatgatgtcaaagatagatctcagggaacaatgtatttactgggctctggaacgttcattgtcaaagatctgctccaggacaggcatcataggttgcatttaacactaaggtctgcagagagtgaccgtgtaggtaacatcaccgtgattggctggcagatggaggagaagtcagaccaacggccccctgtgacccggtctgtggacactgtcaatgggaggatggttcttcctgtcgatgagagcttgacggaggcgttaggaatccgatccaaatacgcttcattgcgaaaggacactttgctgaaatcggtgttcggtggtgccatctgccgcatgtaccggtttccaaccactgatggtaaccatttgcggatcctggagcagatggcagagagcgtgctctccctgcacgtgccccggcagttcgtgaagctcctactagaggaagatgcagccagagtgtgtgagctggaggagctgggagagctgtccccttgctgggagagcctccggcgccaaattgtcacccagtaccagaccatcatcctcacataccaggagaacctgaccgacctccatcagtacagagggccctcgtttaaagcaagcagtttgaaagcagataaaaagttagaatttgttcccacaaacttgcacatacaaaggatgagagttcaagacgatggaggatcagatcagaactacgacatcgtcaccattggggcgccagcagcacactgccaaggttttaagtcaggaggtctccgcaaaaagctgcacaaatttgaagagaccaagaaacattttgaggagtgttgtacatcatctggctgccagtccataatctacataccccaggatgttgtcagagccaaggagatcatcgcccagatcaacaccctgaaaacccaagtgagttactacgcagagcggctgtcaagggcagccaaggacaggtctgccactggccttgagaggacactcgccatcttggcagacaagacacggcagctggtcacggtctgcgactgcaagctcctggccaactccatccatgggctgaacgctgcacggcctgactacattgcctccaaggcctctcccacttcgactgaggaggagcaggtgatgcttagaaatgaccaggacaccctcatggcccggtggacagggagaaacagccgatcttccctgcaggtggactggcacgaggaggagtgggagaaagtgtggctgaacgtggacaagagcctagagtgcatcattcagcgtgtggacaagctgctgcagaaggagcggctgcatggcgagggctgtgaggatgtcttcccctgtgcaggcagctgcaccagcaagaaagattgcagtccccctcctgaagagtccagcccaggtgaatggagtgaggccctttacccgctgctgaccactctcaccgactgcgtggccatgatgagtgacaaggccaagaaggccatggtattcctgctcatgcaggacagcgcgcccaccatagccacctacctgagcctgcagtaccgccgtgacgtggtcttctgccagacgctgaccgccctcatctgcggcttcatcattaagctgaggaactgcctgcatgacgacggcttcctgcgccagctctacaccatcgggctgctggcccagttcgagagcctgctgagcacctacggggaggagctggcaatgctggaggacatgagccttgggatcatggacttgaggaacgtgaccttcaaagtcactcaggccacttccagcgcctccgcagacatgctgcccgtcatcacaggaaatcgcgacgggtttaacgtgcgggtccctctgccgggcccgctgtttgacgccttgccccgggagatccagagtggcatgctgctgcgagtgcagcccgtcctcttcaacgtgggcatcaatgagcagcagacactggccgagaggtttggcgatacgtctttacaagaagtcatcaacgtggagagtttggtgcggttaaattcctactttgagcagtttaaggaagttttgcctgaggattgcctgcctcggtctcgcagtcagacgtgcctgccagagctgctgcggtttctgggtcagaacgtgcatgcccggaagaataagaacgtcgacattctctggcaagctgctgagatctgccgccgccttaatggggtccggttcaccagctgcaagagcgctaaggaccgtacagccatgtcggtgacactggagcagtgcctgatcctgcaacacgagcatggcatggccccgcaggtcttcacccaggccctggagtgcatgcgcagcattggaacacgggaggtagtcacccagaagaacttgagcggcctggtgcccatccgagacttaaggctagaccccagcctcctctgttccatccctttattagctctgagccccaatttactgattgtgtggctctttctgagcatagcatacctggtgaccaaattgcgttgcaaatgaatatcattatgaaaaattaataagtcacaagaaaaacaaaagtgccagaacatgtccagccaccgtgtacctaactggacagaaggaatgtgtcaaaccgtggtctgccaagaaatatttcatgccttacattttgacgttttgttcttctgaactgtaaatatctgccaaattatttcaccaagaagacttgtttgtttagctcctgtagcatcttcagtgcttgtaacatgttcttacggtgccctgtcactgcatcgtttagctggcctggaattccttgtaccacgtctctaccttctgatgtacaactatttatcacctgtacctctcatgtgccctgtttccaagagaaacgagttctgtttaaagagaatttgtatatttgatactattctttaagtgtactgctaacccttcctttccttttgatgacaaacgaaaagaaaaaaacatgctttataactggcttatctagaaaaacctatctaataggacatgtactttctgctttcatttcaaagcgtagtccctgaattacagtagcaaacagtttgcagaatcctaccattt

SEQ ID NO: 3546 - protein, 954 aa, Homo sapiens; identical to SEQ ID NO: 295

SEQ ID NO: 3547 - DNA, 3365 bp, Homo sapiens
gtctagagcggcggcggctggctagggctgcggcgcgcgtggagggttcgctgctggtttgccgccgggtcgggctccgtgggccggggcaggaggaccagcacctgaggccgggcccgcagcccgcgacttcacagccaggcggcggcgctgctgctgctgcggggctctggcgcgcagcccggcgggacagcggggcggctggcgccgggggccggggagcgccagatgatggatttggacatgcttctatgaagaaatgccacatggtccgagagcaaacatgtccaggctactgccactttagtggactagggctcggtgccagcacttcccgggtaatcaggcgtggtctgaccgaggatcaagaagcacatcatcaccaatgacatcatgacagcaagagagcacagccctcgccatggtgccagggcccgtgcaatgcagcgggcttccaccatcgacgtggcggccgacatgctgggcctctctctggcaggaaatatacaagacccagatgagcccattttagaatttagcttagcttgcagtgagctgcatactccatcgctagatcgaaagccaaatagttttgttgcggtgagtgtcaccacccctcctcaggcattctggacgaagcatgcacagacggagatcattgagggaaccaacaatcctatatttctaagcagtattgccttctttcaagactctcttatcaatcagatgacacaagtcaaactctccgtgtatgatgtcaaagatagatctcagggaacaatgtatttactgggctctggaacgttcattgtcaaagatctgctccaggacaggcatcataggttgcatttaacactaaggtctgcagagagtgaccgtgtaggtaacatcaccgtgattggctggcagatggaggagaagtcagaccaacggccccctgtgacccggtctgtggacactgtcaatgggaggatggttcttcctgtcgatgagagcttgacggaggcgttaggaatccgatccaaatacgcttcattgcgaaaggacactttgctgaaatcggtgttcggtggtgccatctgccgcatgtaccggtttccaaccactgatggtaaccatttgcggatcctggagcagatggcagagagcgtgctctccctgcacgtgccccggcagttcgtgaagctcctactagaggaagatgcagccagagtgtgtgagctggaggagctgggagagctgtccccttgctgggagagcctccggcgccaaattgtcacccagtaccagaccatcatcctcacataccaggagaacctgaccgacctccatcagtacagagggccctcgtttaaagcaagcagtttgaaagcagataaaaagttagaatttgttcccacaaacttgcacatacaaaggatgagagttcaagacgatggaggatcagatcagaactacgacatcgtcaccattggggcgccagcagcacactgccaaggttttaagtcaggaggtctccgcaaaaagctgcacaaatttgaagagaccaagaaacatacatcatctggctgccagtccataatctacataccccaggatgttgtcagagccaaggagatcatcgcccagatcaacaccctgaaaacccaagtgagttactacgcagagcggctgtcaagggcagccaaggacaggtctgccactggccttgagaggacactcgccatcttggcagacaagacacggcagctggtcacggtctgcgactgcaagctcctggccaactccatccatgggctgaacgctgcacggcctgactacattgcctccaaggcctctcccacttcgactgaggaggagcaggtgatgcttagaaatgaccaggacaccctcatggcccggtggacagggagaaacagccgatcttccctgcaggtggactggcacgaggaggagtgggagaaagtgtggctgaacgtggacaagagcctagagtgcatcattcagcgtgtggacaagctgctgcagaaggagcggctgcatggcgagggctgtgaggatgtcttcccctgtgcaggcagctgcaccagcaagaaaggtaacccggacagccacgcctactggatcagaccagaagaccccttctgtgatgtcccctcctcaccatgcccctccaccatgccctccactgcatgccatcctcatctgaccacacattgcagtccccctcctgaagagtccagcccaggtgaatggagtgaggccctttacccgctgctgaccactctcaccgactgcgtggccatgatgagtgacaaggccaagaaggccatggtattcctgctcatgcaggacagcgcgcccaccatagccacctacctgagcctgcagtaccgccgtgacgtggtcttctgccagacgctgaccgccctcatctgcggcttcatcattaagctgaggaactgcctgcatgacgacggcttcctgcgccagctctacaccatcgggctgctggcccagttcgagagcctgctgagcacctacggggaggagctggcaatgctggaggacatgagccttgggatcatggacttgaggaacgtgaccttcaaagtcactcaggccacttccagcgcctccgcagacatgctgcccgtcatcacaggaaatcgcgacgggtttaacgtgcgggtccctctgccgggcccgctgtttgacgccttgccccgggagatccagagtggcatgctgctgcgagtgcagcccgtcctcttcaacgtgggcatcaatgagcagcagacactggccgagaggtttggcgatacgtctttacaagaagtcatcaacgtggagagtttggtgcggttaaattcctactttgagcagtttaaggaagttttgcctgaggattgcctgcctcggtctcgcagtcagacgtgcctgccagagctgctgcggtttctgggtcagaacgtgcatgcccggaagaataagaacgtcgacattctctggcaagctgctgagatctgccgccgccttaatggggtccggttcaccagctgcaagagcgctaaggaccgtacagccatgtcggtgacactggagcagtgcctgatcctgcaacacgagcatggcatggccccgcaggtcttcacccaggccctggagtgcatgcgcagtgagggttgtcgaagagaaaatacaatgaagaatgttggaagtcgcaaatatgcatttaattccctgcagctgaaggctttccccaagcattacaggcctcccgaagggacttacggaaaagttgaaacgtgaacacacggtttcctctaattagctgttacataataaatgtgggtaccctctag

SEQ ID NO: 3548 - protein, 972 aa, Homo sapiens
MTAREHSPRHGARARAMQRASTIDVAADMLGLSLAGNIQDPDEPILEFSLACSELHTPSLDRKPNSFVAVSVTTPPQAFWTKHAQTEIIEGTNNPIFLSSIAFFQDSLINQMTQVKLSVYDVKDRSQGTMYLLGSGTFIVKDLLQDRHHRLHLTLRSAESDRVGNITVIGWQMEEKSDQRPPVTRSVDTVNGRMVLPVDESLTEALGIRSKYASLRKDTLLKSVFGGAICRMYRFPTTDGNHLRILEQMAESVLSLHVPRQFVKLLLEEDAARVCELEELGELSPCWESLRRQIVTQYQTIILTYQENLTDLHQYRGPSFKASSLKADKKLEFVPTNLHIQRMRVQDDGGSDQNYDIVTIGAPAAHCQGFKSGGLRKKLHKFEETKKHTSSGCQSIIYIPQDVVRAKEIIAQINTLKTQVSYYAERLSRAAKDRSATGLERTLAILADKTRQLVTVCDCKLLANSIHGLNAARPDYIASKASPTSTEEEQVMLRNDQDTLMARWTGRNSRSSLQVDWHEEEWEKVWLNVDKSLECIIQRVDKLLQKERLHGEGCEDVFPCAGSCTSKKGNPDSHAYWIRPEDPFCDVPSSPCPSTMPSTACHPHLTTHCSPPPEESSPGEWSEALYPLLTTLTDCVAMMSDKAKKAMVFLLMQDSAPTIATYLSLQYRRDVVFCQTLTALICGFIIKLRNCLHDDGFLRQLYTIGLLAQFESLLSTYGEELAMLEDMSLGIMDLRNVTFKVTQATSSASADMLPVITGNRDGFNVRVPLPGPLFDALPREIQSGMLLRVQPVLFNVGINEQQTLAERFGDTSLQEVINVESLVRLNSYFEQFKEVLPEDCLPRSRSQTCLPELLRFLGQNVHARKNKNVDILWQAAEICRRLNGVRFTSCKSAKDRTAMSVTLEQCLILQHEHGMAPQVFTQALECMRSEGCRRENTMKNVGSRKYAFNSLQLKAFPKHYRPPEGTYGKVET

SEQ ID NO: 3549 - DNA, 3358 bp, Homo sapiens
gtctagagcggcggcggctggctagggctgcggcgcgcgtggagggttcgctgctggtttgccgccgggtcgggctccgtgggccggggcaggaggaccagcacctgaggccgggcccgcagcccgcgacttcacagccaggcggcggcgctgctgctgctgcggggctctggcgcgcagcccggcgggacagcggggcggctggcgccgggggccggggagcgccagatgatggatttggacatgcttctatgaagaaatgccacatggtccgagagcaaacatgtccaggctactgccactttagtggactagggctcggtgccagcacttcccgggtaatcaggcgtggtctgaccgaggatcaagaagcacatcatcaccaatgacatcatgacagcaagagagcacagccctcgccatggtgccagggcccgtgcaatgcagcgggcttccaccatcgacgtggcggccgacatgctgggcctctctctggcaggaaatatacaagacccagatgagcccattttagaatttagcttagcttgcagtgagctgcatactccatcgctagatcgaaagccaaatagttttgttgcggtgagtgtcaccacccctcctcaggcattctggacgaagcatgcacagacggagatcattgagggaaccaacaatcctatatttctaagcagtattgccttctttcaagactctcttatcaatcagatgacacaagtcaaactctccgtgtatgatgtcaaagatagatctcagggaacaatgtatttactgggctctggaacgttcattgtcaaagatctgctccaggacaggcatcataggttgcatttaacactaaggtctgcagagagtgaccgtgtaggtaacatcaccgtgattggctggcagatggaggagaagtcagaccaacggccccctgtgacccggtctgtggacactgtcaatgggaggatggttcttcctgtcgatgagagcttgacggaggcgttaggaatccgatccaaatacgcttcattgcgaaaggacactttgctgaaatcggtgttcggtggtgccatctgccgcatgtaccggtttccaaccactgatggtaaccatttgcggatcctggagcagatggcagagagcgtgctctccctgcacgtgccccggcagttcgtgaagctcctactagaggaagatgcagccagagtgtgtgagctggaggagctgggagagctgtccccttgctgggagagcctccggcgccaaattgtcacccagtaccagaccatcatcctcacataccaggagaacctgaccgacctccatcagtacagagggccctcgtttaaagcaagcagtttgaaagcagataaaaagttagaatttgttcccacaaacttgcacatacaaaggatgagagttcaagacgatggaggatcagatcagaactacgacatcgtcaccattggggcgccagcagcacactgccaaggttttaagtcaggaggtctccgcaaaaagctgcacaaatttgaagagaccaagaaacattttgaggagtgttgtacatcatctggctgccagtccataatctacataccccaggatgttgtcagagccaaggagatcatcgcccagatcaacaccctgaaaacccaagtgagttactacgcagagcggctgtcaagggcagccaaggacaggtctgccactggccttgagaggacactcgccatcttggcagacaagacacggcagctggtcacggtctgcgactgcaagctcctggccaactccatccatgggctgaacgctgcacggcctgactacattgcctccaaggcctctcccacttcgactgaggaggagcaggtgatgcttagaaatgaccaggacaccctcatggcccggtggacagggagaaacagccgatcttccctgcaggtggactggcacgaggaggagtgggagaaagtgtggctgaacgtggacaagagcctagagtgcatcattcagcgtgtggacaagctgctgcagaaggagcggctgcatggcgagggctgtgaggatgtcttcccctgtgcaggcagctgcaccagcaagaaagattgcagtccccctcctgaagagtccagcccaggtgaatggagtgaggccctttacccgctgctgaccactctcaccgactgcgtggccatgatgagtgacaaggccaagaaggccatggtattcctgctcatgcaggacagcgcgcccaccatagccacctacctgagcctgcagtaccgccgtgacgtggtcttctgccagacgctgaccgccctcatctgcggcttcatcattaagctgaggaactgcctgcatgacgacggcttcctgcgccagctctacaccatcgggctgctggcccagttcgagagcctgctgagcacctacggggaggagctggcaatgctggaggacatgagccttgggatcatggacttgaggaacgtgaccttcaaagtcactcaggccacttccagcgcctccgcagacatgctgcccgtcatcacaggaaatcgcgacgggtttaacgtgcgggtccctctgccgggcccgctgtttgacgccttgccccgggagatccagagtggcatgctgctgcgagtgcagcccgtcctcttcaacgtgggcatcaatgagcagcagacactggccgagaggtttggcgatacgtctttacaagaagtcatcaacgtggagagtttggtgcggttaaattcctactttgagcagtttaaggaagttttgcctgaggattgcctgcctcggtctcgcagtcagacgtgcctgccagagctgctgcggtttctgggtcagaacgtgcatgcccggaagaataagaacgtcgacattctctggcaagctgctgagatctgccgccgccttaatggggtccggttcaccagctgcaagagcgctaaggaccgtacagccatgtcggtgacactggagcagtgcctgatcctgcaacacgagcatggcatggccccgcaggtcttcacccaggccctggagtgcatgcgcagtgagggttgtcgaagagaaaatacaatgaagaatgttggaagtcgcaaatatgcatttaattccctgcagctgaaggctttccccaagcattacaggcctcccgaagggacttacggaaaagttgaaacgtgaacacacggtttcctctaattagctgttacataataaatgtgggtaccctctagtgtcatatatgaattcttcaagaagacctgaaggattggtttttattttttgtggtttttttaaaaaaaacatttcactaaagagtctctggagc

SEQ ID NO: 3550 - protein, 938 aa, Homo sapiens; identical to SEQ ID NO: 297

SEQ ID NO: 3551 - DNA, 5755 bp, Homo sapiens
gtctagagcggcggcggctggctagggctgcggcgcgcgtggagggttcgctgctggtttgccgccgggtcgggctccgtgggccggggcaggaggaccagcacctgaggccgggcccgcagcccgcgacttcacagccaggcggcggcgctgctgctgctgcggggctctggcgcgcagcccggcgggacagcggggcggctggcgccgggggccggggagcgccagatgatggatttggacatgcttctatgaagaaatgccacatggtccgagagcaaacatgtccaggctactgccactttagtggactagggctcggtgccagcacttcccgggtaatcaggcgtggtctgaccgaggatcaagaagcacatcatcaccaatgacatcatgacagcaagagagcacagccctcgccatggtgccagggcccgtgcaatgcagcgggcttccaccatcgacgtggcggccgacatgctgggcctctctctggcaggaaatatacaagacccagatgagcccattttagaatttagcttagcttgcagtgagctgcatactccatcgctagatcgaaagccaaatagttttgttgcggtgagtgtcaccacccctcctcaggcattctggacgaagcatgcacagacggagatcattgagggaaccaacaatcctatatttctaagcagtattgccttctttcaagactctcttatcaatcagatgacacaagtcaaactctccgtgtatgatgtcaaagatagatctcagggaacaatgtatttactgggctctggaacgttcattgtcaaagatctgctccaggacaggcatcataggttgcatttaacactaaggtctgcagagagtgaccgtgtaggtaacatcaccgtgattggctggcagatggaggagaagtcagaccaacggccccctgtgacccggtctgtggacactgtcaatgggaggatggttcttcctgtcgatgagagcttgacggaggcgttaggaatccgatccaaatacgcttcattgcgaaaggacactttgctgaaatcggtgttcggtggtgccatctgccgcatgtaccggtttccaaccactgatggtaaccatttgcggatcctggagcagatggcagagagcgtgctctccctgcacgtgccccggcagttcgtgaagctcctactagaggaagatgcagccagagtgtgtgagctggaggagctgggagagctgtccccttgctgggagagcctccggcgccaaattgtcacccagtaccagaccatcatcctcacataccaggagaacctgaccgacctccatcagtacagagggccctcgtttaaagcaagcagtttgaaagcagataaaaagttagaatttgttcccacaaacttgcacatacaaaggatgagagttcaagacgatggaggatcagatcagaactacgacatcgtcaccattggggcgccagcagcacactgccaaggttttaagtcaggaggtctccgcaaaaagctgcacaaatttgaagagaccaagaaacattttgaggagtgttgtacatcatctggctgccagtccataatctacataccccaggatgttgtcagagccaaggagatcatcgcccagatcaacaccctgaaaacccaagtgagttactacgcagagcggctgtcaagggcagccaaggacaggtctgccactggccttgagaggacactcgccatcttggcagacaagacacggcagctggtcacggtctgcgactgcaagctcctggccaactccatccatgggctgaacgctgcacggcctgactacattgcctccaaggcctctcccacttcgactgaggaggagcaggtgatgcttagaaatgaccaggacaccctcatggcccggtggacagggagaaacagccgatcttccctgcaggtggactggcacgaggaggagtgggagaaagtgtggctgaacgtggacaagagcctagagtgcatcattcagcgtgtggacaagctgctgcagaaggagcggctgcatggcgagggctgtgaggatgtcttcccctgtgcaggcagctgcaccagcaagaaagattgcagtccccctcctgaagagtccagcccaggtgaatggagtgaggccctttacccgctgctgaccactctcaccgactgcgtggccatgatgagtgacaaggccaagaaggccatggtattcctgctcatgcaggacagcgcgcccaccatagccacctacctgagcctgcagtaccgccgtgacgtggtcttctgccagacgctgaccgccctcatctgcggcttcatcattaagctgaggaactgcctgcatgacgacggcttcctgcgccagctctacaccatcgggctgctggcccagttcgagagcctgctgagcacctacggggaggagctggcaatgctggaggacatgagccttgggatcatggacttgaggaacgtgaccttcaaagtcactcaggccacttccagcgcctccgcagacatgctgcccgtcatcacaggaaatcgcgacgggtttaacgtgcgggtccctctgccgggcccgctgtttgacgccttgccccgggagatccagagtggcatgctgctgcgagtgcagcccgtcctcttcaacgtgggcatcaatgagcagcagacactggccgagaggtttggcgatacgtctttacaagaagtcatcaacgtggagagtttggtgcggttaaattcctactttgagcagtttaaggaagttttgcctgaggattgcctgcctcggtctcgcagtcagacgtgcctgccagagctgctgcggtttctgggtcagaacgtgcatgcccggaagaataagaacgtcgacattctctggcaagctgctgagatctgccgccgccttaatggggtccggttcaccagctgcaagagcgctaaggaccgtacagccatgtcggtgacactggagcagtgcctgatcctgcaacacgagcatggcatggccccgcaggtcttcacccaggccctggagtgcatgcgcagtgagggttgtcgaagagaaaatacaatgaagaatgttggaagtcgcaaatatgcatttaattccctgcagctgaaggctttccccaagcattacaggcctcccgaagggacttacggaaaagttgaaacgtgaacacacggtttcctctaattagctgttacataataaatgtgggtaccctctagtgtcatatatgaattcttcaagaagacctgaaggattggtttttattttttgtggtttttttaaaaaaaacatttcactaaagagtctctggagcatgttttttgttttttgggtttttttccccattggaatcaataggaggtaatgtttggctcaatagtgtggatagtaacaactgcctatttaaattaaatagcctttggctgtaactacacagatctcatcaatagttacctacatgaatcaagctaggtttgtctgaaatgctagaagactttttcaaatgcctgcttgctcacttacttttctacagagtaactcaaaagtaaccattgaattacaatccactttgtaaaaatctgaatgtaaaacagtaaataataaattaaataattggatcctaggcataccaataaatgttatttggggaaagaagctagcactatctcatgcagtgagaataacgggttctagtgaattatcctatctacactaccacctgaagaagttgaaagaaagattgataaatcaacgggagataagactttattagaaggtaacacctgcaaggtaccccacatagttggggccactcttttttctgtcccttatgagttacagaacagggagtctgctggagacacaaagccagcagtaaggtccctttagcctgtctcctgttctctgaagctccctgccgaggctccctcacgcccagaggacacatctccccttcttctctagatgttaatgtagggcctcagatgtggcatgtcaacactcccatggggaatttatgaccatagagatagtagaaacctaaatattttcagaaaaaaaattttttttgcaggatttccaatttatctttgaaaagacagtacaatcatgtttgaatgtctgatgaaagtgtcttatttttaggtttgcaataattgttactttcttattctcattcttatgtaagatgactattgagaaacagttgaaatttattctcctcaaatgagattttgaaagggatttatgggccataaaacttaggaatttcatagaaaattttgtctggtcatcttttataagatgatgatgagtcttatctgcacatagcagagtttgtttcttaggagtttatatgttttattgattctgtttacgatgtttacatgttcttgaaaaggttgtaaaagaaatacatatggcacatattaatgatgctgatcctaatgatttgtgaacctcttagaaattcttttgtctaaaagcctagagattcttctggttcctttagaaacatgtaacaaacttgggccaggggtgctgaggcatggggaggactgcttattggcaggaacacagagggggtgggcatcaggtagggtggaactggatgaccttccagaccccctcctactcagaagtcagcatgcaagcagcgcctgctgtctcccgatgcctgcagggaggaaaatgtctgtgaaggacactttaatgaaggacgaagctctctgctgctccctcaaagctgagttcactgtggcaggcaggaagcagagaagctcctgcccgccaaacccactgcacaggtggctgctgctggtatcagattctcctttttaagtgtcaatttctgttcacagacagtttgttttcaatatggctgatttaccctttcacctctccaccatctcatttaatttgtaaatttttagttctgtcttttctcattttaacttttaaaaaatctccttgctttttaaaaataaatattacccacatagttttcagatcttttttgtctggagagcattaaatatctgcactcatcaaagggaatatagcaaatgttgatcatctgtcagcagttttgcatgtgacacctttatatgaattattttcccaatttttgctctatgtaatgggtcaccataaaactgtaagacttggcaaatgctatagaaaaggttcaggtttcagtattctctctgaaggcatcattcctgggcttccggcagcatcacacgcttccagtgcctgcagggtgagggtgtgtggcacagaggcaagcagctcctctcttctgtaggagctttgggttttcagaggtgcagggaaggcagttttacaggttaccgtaaaacagaggttccgtccagtgttccttatgatgcctccccatttaaaaagaaaagagatctatggaaaactgggaatgtaatgtggattctgtcagagctcctacagagcacagttgcctttagtttcctttaaagatgtaaaaatattgtataatacagttttgtccctacacaattgtatttgccaagcttagtgcattatgatacctttatttatttgttttgggcagtattactatatatatataaacatacagttactgttttatatattcttaggtcattcaaagccatgtatgctgtaaatgtgctagtctttagaatgacacataataaataactgacaagatatt

SEQ ID NO: 3552 - protein, 938 aa, Homo sapiens; identical to SEQ ID NO: 297

SEQ ID NO: 3553 - DNA, 6386 bp, Homo sapiens
gtctagagcggcggcggctggctagggctgcggcgcgcgtggagggttcgctgctggtttgccgccgggtcgggctccgtgggccggggcaggaggaccagcacctgaggccgggcccgcagcccgcgacttcacagccaggcggcggcgctgctgctgctgcggggctctggcgcgcagcccggcgggacagcggggcggctggcgccgggggccggggagcgccagatgatggatttggacatgcttctatgaagaaatgccacatggtccgagagcaaacatgtccaggctactgccactttagtggactagggctcggtgccagcacttcccgggtaatcaggcgtggtctgaccgaggatcaagaagcacatcatcaccaatgacatcatgacagcaagagagcacagccctcgccatggtgccagggcccgtgcaatgcagcgggcttccaccatcgacgtggcggccgacatgctgggcctctctctggcaggaaatatacaagacccagatgagcccattttagaatttagcttagcttgcagtgagctgcatactccatcgctagatcgaaagccaaatagttttgttgcggtgagtgtcaccacccctcctcaggcattctggacgaagcatgcacagacggagatcattgagggaaccaacaatcctatatttctaagcagtattgccttctttcaagactctcttatcaatcagatgacacaagtcaaactctccgtgtatgatgtcaaagatagatctcagggaacaatgtatttactgggctctggaacgttcattgtcaaagatctgctccaggacaggcatcataggttgcatttaacactaaggtctgcagagagtgaccgtgtaggtaacatcaccgtgattggctggcagatggaggagaagtcagaccaacggccccctgtgacccggtctgtggacactgtcaatgggaggatggttcttcctgtcgatgagagcttgacggaggcgttaggaatccgatccaaatacgcttcattgcgaaaggacactttgctgaaatcggtgttcggtggtgccatctgccgcatgtaccggtttccaaccactgatggtaaccatttgcggatcctggagcagatggcagagagcgtgctctccctgcacgtgccccggcagttcgtgaagctcctactagaggaagatgcagccagagtgtgtgagctggaggagctgggagagctgtccccttgctgggagagcctccggcgccaaattgtcacccagtaccagaccatcatcctcacataccaggagaacctgaccgacctccatcagtacagagggccctcgtttaaagcaagcagtttgaaagcagataaaaagttagaatttgttcccacaaacttgcacatacaaaggatgagagttcaagacgatggaggatcagatcagaactacgacatcgtcaccattggggcgccagcagcacactgccaaggttttaagtcaggaggtctccgcaaaaagctgcacaaatttgaagagaccaagaaacattttgaggagtgttgtacatcatctggctgccagtccataatctacataccccaggatgttgtcagagccaaggagatcatcgcccagatcaacaccctgaaaacccaagtgagttactacgcagagcggctgtcaagggcagccaaggacaggtctgccactggccttgagaggacactcgccatcttggcagacaagacacggcagctggtcacggtctgcgactgcaagctcctggccaactccatccatgggctgaacgctgcacggcctgactacattgcctccaaggcctctcccacttcgactgaggaggagcaggtgatgcttagaaatgaccaggacaccctcatggcccggtggacagggagaaacagccgatcttccctgcaggtggactggcacgaggaggagtgggagaaagtgtggctgaacgtggacaagagcctagagtgcatcattcagcgtgtggacaagctgctgcagaaggagcggctgcatggcgagggctgtgaggatgtcttcccctgtgcaggcagctgcaccagcaagaaagattgcagtccccctcctgaagagtccagcccaggtgaatggagtgaggccctttacccgctgctgaccactctcaccgactgcgtggccatgatgagtgacaaggccaagaaggccatggtattcctgctcatgcaggacagcgcgcccaccatagccacctacctgagcctgcagtaccgccgtgacgtggtcttctgccagacgctgaccgccctcatctgcggcttcatcattaagctgaggaactgcctgcatgacgacggcttcctgcgccagctctacaccatcgggctgctggcccagttcgagagcctgctgagcacctacggggaggagctggcaatgctggaggacatgagccttgggatcatggacttgaggaacgtgaccttcaaagtcactcaggccacttccagcgcctccgcagacatgctgcccgtcatcacaggaaatcgcgacgggtttaacgtgcgggtccctctgccgggcccgctgtttgacgccttgccccgggagatccagagtggcatgctgctgcgagtgcagcccgtcctcttcaacgtgggcatcaatgagcagcagacactggccgagaggtttggcgatacgtctttacaagaagtcatcaacgtggagagtttggtgcggttaaattcctactttgagcagtttaaggaagttttgcctgaggattgcctgcctcggtctcgcagtcagacgtgcctgccagagctgctgcggtttctgggtcagaacgtgcatgcccggaagaataagaacgtcgacattctctggcaagctgctgagatctgccgccgccttaatggggtccggttcaccagctgcaagagcgctaaggaccgtacagccatgtcggtgacactggagcagtgcctgatcctgcaacacgagcatggcatggccccgcaggtcttcacccaggccctggagtgcatgcgcagtgagggttgtcgaagagaaaatacaatgaagaatgttggaagtcgcaaatatgcatttaattccctgcagctgaaggctttccccaagcattacaggcctcccgaagggacttacggaaaagttgaaacgtgaacacacggtttcctctaattagctgttacataataaatgtgggtaccctctagtgtcatatatgaattcttcaagaagacctgaaggattggtttttattttttgtggtttttttaaaaaaaacatttcactaaagagtctctggagcatgttttttgttttttgggtttttttccccattggaatcaataggaggtaatgtttggctcaatagtgtggatagtaacaactgcctatttaaattaaatagcctttggctgtaactacacagatctcatcaatagttacctacatgaatcaagctaggtttgtctgaaatgctagaagactttttcaaatgcctgcttgctcacttacttttctacagagtaactcaaaagtaaccattgaattacaatccactttgtaaaaatctgaatgtaaaacagtaaataataaattaaataattggatcctaggcataccaataaatgttatttggggaaagaagctagcactatctcatgcagtgagaataacgggttctagtgaattatcctatctacactaccacctgaagaagttgaaagaaagattgataaatcaacgggagataagactttattagaaggtaacacctgcaaggtaccccacatagttggggccactcttttttctgtcccttatgagttacagaacagggagtctgctggagacacaaagccagcagtaaggtccctttagcctgtctcctgttctctgaagctccctgccgaggctccctcacgcccagaggacacatctccccttcttctctagatgttaatgtagggcctcagatgtggcatgtcaacactcccatggggaatttatgaccatagagatagtagaaacctaaatattttcagaaaaaaaattttttttgcaggatttccaatttatctttgaaaagacagtacaatcatgtttgaatgtctgatgaaagtgtcttatttttaggtttgcaataattgttactttcttattctcattcttatgtaagatgactattgagaaacagttgaaatttattctcctcaaatgagattttgaaagggatttatgggccataaaacttaggaatttcatagaaaattttgtctggtcatcttttataagatgatgatgagtcttatctgcacatagcagagtttgtttcttaggagtttatatgttttattgattctgtttacgatgtttacatgttcttgaaaaggttgtaaaagaaatacatatggcacatattaatgatgctgatcctaatgatttgtgaacctcttagaaattcttttgtctaaaagcctagagattcttctggttcctttagaaacatgtaacaaacttgggccaggggtgctgaggcatggggaggactgcttattggcaggaacacagagggggtgggcatcaggtagggtggaactggatgaccttccagaccccctcctactcagaagtcagcatgcaagcagcgcctgctgtctcccgatgcctgcagggaggaaaatgtctgtgaaggacactttaatgaaggacgaagctctctgctgctccctcaaagctgagttcactgtggcaggcaggaagcagagaagctcctgcccgccaaacccactgcacaggtggctgctgctggtatcagattctcctttttaagtgtcaatttctgttcacagacagtttgttttcaatatggctgatttaccctttcacctctccaccatctcatttaatttgtaaatttttagttctgtcttttctcattttaacttttaaaaaatctccttgctttttaaaaataaatattacccacatagttttcagatcttttttgtctggagagcattaaatatctgcactcatcaaagggaatatagcaaatgttgatcatctgtcagcagttttgcatgtgacacctttatatgaattattttcccaatttttgctctatgtaatgggtcaccataaaactgtaagacttggcaaatgctatagaaaaggttcaggtttcagtattctctctgaaggcatcattcctgggcttccggcagcatcacacgcttccagtgcctgcagggtgagggtgtgtggcacagaggcaagcagctcctctcttctgtaggagctttgggttttcagaggtgcagggaaggcagttttacaggttaccgtaaaacagaggttccgtccagtgttccttatgatgcctccccatttaaaaagaaaagagatctatggaaaactgggaatgtaatgtggattctgtcagagctcctacagagcacagttgcctttagtttcctttaaagatgtaaaaatattgtataatacagttttgtccctacacaattgtatttgccaagcttagtgcattatgatacctttatttatttgttttgggcagtattactatatatatataaacatacagttactgttttatatattcttaggtcattcaaagccatgtatgctgtaaatgtgctagtctttagaatgacacataataaataactgacaagatattaaatgtggtcttgcctgattcatcctattaggaggactagttctatgtgaccagcctgtgactggaccattgttcttgggcattgcattgagtgctcgggtgctgaatacatgtttgtaaacatgggaccatgggagacttccattttataagcttgtttctgcctaatttgaagcagaggggcaacagcgttgaggttaagagcacggactttgggagcacacagaccaggtcccaatcctggttctgcccctgactggctggtgactctgagcaagttgcttgacctctccaagcctccgtttcctcatgtgcaaagtgtggacaacaacagtaccttcctcataaggaacgtgcgacgcgcctcagaagtacgtgttcataaatggtagccattgttgttaccttcccgtctgtgaacatggatcacatcatctctgtgggtaacccagtcctcgttgtatgacttgtcaaaatgcagttccacttgtattaatattgaccctgttcatcgtcaccaggactgcatcttgcaccactgtgccgtcttctaggcacacacgacccgttatctcccttggaaaaattcctctcactggaaatgtacaattaaaggatgattgaaatgttt

SEQ ID NO: 3554 - protein, 938 aa, Homo sapiens; identical to SEQ ID NO: 297

SEQ ID NO: 3555 - DNA, 6932 bp, Homo sapiens
gtctagagcggcggcggctggctagggctgcggcgcgcgtggagggttcgctgctggtttgccgccgggtcgggctccgtgggccggggcaggaggaccagcacctgaggccgggcccgcagcccgcgacttcacagccaggcggcggcgctgctgctgctgcggggctctggcgcgcagcccggcgggacagcggggcggctggcgccgggggccggggagcgccagatgatggatttggacatgcttctatgaagaaatgccacatggtccgagagcaaacatgtccaggctactgccactttagtggactagggctcggtgccagcacttcccgggtaatcaggcgtggtctgaccgaggatcaagaagcacatcatcaccaatgacatcatgacagcaagagagcacagccctcgccatggtgccagggcccgtgcaatgcagcgggcttccaccatcgacgtggcggccgacatgctgggcctctctctggcaggaaatatacaagacccagatgagcccattttagaatttagcttagcttgcagtgagctgcatactccatcgctagatcgaaagccaaatagttttgttgcggtgagtgtcaccacccctcctcaggcattctggacgaagcatgcacagacggagatcattgagggaaccaacaatcctatatttctaagcagtattgccttctttcaagactctcttatcaatcagatgacacaagtcaaactctccgtgtatgatgtcaaagatagatctcagggaacaatgtatttactgggctctggaacgttcattgtcaaagatctgctccaggacaggcatcataggttgcatttaacactaaggtctgcagagagtgaccgtgtaggtaacatcaccgtgattggctggcagatggaggagaagtcagaccaacggccccctgtgacccggtctgtggacactgtcaatgggaggatggttcttcctgtcgatgagagcttgacggaggcgttaggaatccgatccaaatacgcttcattgcgaaaggacactttgctgaaatcggtgttcggtggtgccatctgccgcatgtaccggtttccaaccactgatggtaaccatttgcggatcctggagcagatggcagagagcgtgctctccctgcacgtgccccggcagttcgtgaagctcctactagaggaagatgcagccagagtgtgtgagctggaggagctgggagagctgtccccttgctgggagagcctccggcgccaaattgtcacccagtaccagaccatcatcctcacataccaggagaacctgaccgacctccatcagtacagagggccctcgtttaaagcaagcagtttgaaagcagataaaaagttagaatttgttcccacaaacttgcacatacaaaggatgagagttcaagacgatggaggatcagatcagaactacgacatcgtcaccattggggcgccagcagcacactgccaaggttttaagtcaggaggtctccgcaaaaagctgcacaaatttgaagagaccaagaaacattttgaggagtgttgtacatcatctggctgccagtccataatctacataccccaggatgttgtcagagccaaggagatcatcgcccagatcaacaccctgaaaacccaagtgagttactacgcagagcggctgtcaagggcagccaaggacaggtctgccactggccttgagaggacactcgccatcttggcagacaagacacggcagctggtcacggtctgcgactgcaagctcctggccaactccatccatgggctgaacgctgcacggcctgactacattgcctccaaggcctctcccacttcgactgaggaggagcaggtgatgcttagaaatgaccaggacaccctcatggcccggtggacagggagaaacagccgatcttccctgcaggtggactggcacgaggaggagtgggagaaagtgtggctgaacgtggacaagagcctagagtgcatcattcagcgtgtggacaagctgctgcagaaggagcggctgcatggcgagggctgtgaggatgtcttcccctgtgcaggcagctgcaccagcaagaaagattgcagtccccctcctgaagagtccagcccaggtgaatggagtgaggccctttacccgctgctgaccactctcaccgactgcgtggccatgatgagtgacaaggccaagaaggccatggtattcctgctcatgcaggacagcgcgcccaccatagccacctacctgagcctgcagtaccgccgtgacgtggtcttctgccagacgctgaccgccctcatctgcggcttcatcattaagctgaggaactgcctgcatgacgacggcttcctgcgccagctctacaccatcgggctgctggcccagttcgagagcctgctgagcacctacggggaggagctggcaatgctggaggacatgagccttgggatcatggacttgaggaacgtgaccttcaaagtcactcaggccacttccagcgcctccgcagacatgctgcccgtcatcacaggaaatcgcgacgggtttaacgtgcgggtccctctgccgggcccgctgtttgacgccttgccccgggagatccagagtggcatgctgctgcgagtgcagcccgtcctcttcaacgtgggcatcaatgagcagcagacactggccgagaggtttggcgatacgtctttacaagaagtcatcaacgtggagagtttggtgcggttaaattcctactttgagcagtttaaggaagttttgcctgaggattgcctgcctcggtctcgcagtcagacgtgcctgccagagctgctgcggtttctgggtcagaacgtgcatgcccggaagaataagaacgtcgacattctctggcaagctgctgagatctgccgccgccttaatggggtccggttcaccagctgcaagagcgctaaggaccgtacagccatgtcggtgacactggagcagtgcctgatcctgcaacacgagcatggcatggccccgcaggtcttcacccaggccctggagtgcatgcgcagtgagggttgtcgaagagaaaatacaatgaagaatgttggaagtcgcaaatatgcatttaattccctgcagctgaaggctttccccaagcattacaggcctcccgaagggacttacggaaaagttgaaacgtgaacacacggtttcctctaattagctgttacataataaatgtgggtaccctctagtgtcatatatgaattcttcaagaagacctgaaggattggtttttattttttgtggtttttttaaaaaaaacatttcactaaagagtctctggagcatgttttttgttttttgggtttttttccccattggaatcaataggaggtaatgtttggctcaatagtgtggatagtaacaactgcctatttaaattaaatagcctttggctgtaactacacagatctcatcaatagttacctacatgaatcaagctaggtttgtctgaaatgctagaagactttttcaaatgcctgcttgctcacttacttttctacagagtaactcaaaagtaaccattgaattacaatccactttgtaaaaatctgaatgtaaaacagtaaataataaattaaataattggatcctaggcataccaataaatgttatttggggaaagaagctagcactatctcatgcagtgagaataacgggttctagtgaattatcctatctacactaccacctgaagaagttgaaagaaagattgataaatcaacgggagataagactttattagaaggtaacacctgcaaggtaccccacatagttggggccactcttttttctgtcccttatgagttacagaacagggagtctgctggagacacaaagccagcagtaaggtccctttagcctgtctcctgttctctgaagctccctgccgaggctccctcacgcccagaggacacatctccccttcttctctagatgttaatgtagggcctcagatgtggcatgtcaacactcccatggggaatttatgaccatagagatagtagaaacctaaatattttcagaaaaaaaattttttttgcaggatttccaatttatctttgaaaagacagtacaatcatgtttgaatgtctgatgaaagtgtcttatttttaggtttgcaataattgttactttcttattctcattcttatgtaagatgactattgagaaacagttgaaatttattctcctcaaatgagattttgaaagggatttatgggccataaaacttaggaatttcatagaaaattttgtctggtcatcttttataagatgatgatgagtcttatctgcacatagcagagtttgtttcttaggagtttatatgttttattgattctgtttacgatgtttacatgttcttgaaaaggttgtaaaagaaatacatatggcacatattaatgatgctgatcctaatgatttgtgaacctcttagaaattcttttgtctaaaagcctagagattcttctggttcctttagaaacatgtaacaaacttgggccaggggtgctgaggcatggggaggactgcttattggcaggaacacagagggggtgggcatcaggtagggtggaactggatgaccttccagaccccctcctactcagaagtcagcatgcaagcagcgcctgctgtctcccgatgcctgcagggaggaaaatgtctgtgaaggacactttaatgaaggacgaagctctctgctgctccctcaaagctgagttcactgtggcaggcaggaagcagagaagctcctgcccgccaaacccactgcacaggtggctgctgctggtatcagattctcctttttaagtgtcaatttctgttcacagacagtttgttttcaatatggctgatttaccctttcacctctccaccatctcatttaatttgtaaatttttagttctgtcttttctcattttaacttttaaaaaatctccttgctttttaaaaataaatattacccacatagttttcagatcttttttgtctggagagcattaaatatctgcactcatcaaagggaatatagcaaatgttgatcatctgtcagcagttttgcatgtgacacctttatatgaattattttcccaatttttgctctatgtaatgggtcaccataaaactgtaagacttggcaaatgctatagaaaaggttcaggtttcagtattctctctgaaggcatcattcctgggcttccggcagcatcacacgcttccagtgcctgcagggtgagggtgtgtggcacagaggcaagcagctcctctcttctgtaggagctttgggttttcagaggtgcagggaaggcagttttacaggttaccgtaaaacagaggttccgtccagtgttccttatgatgcctccccatttaaaaagaaaagagatctatggaaaactgggaatgtaatgtggattctgtcagagctcctacagagcacagttgcctttagtttcctttaaagatgtaaaaatattgtataatacagttttgtccctacacaattgtatttgccaagcttagtgcattatgatacctttatttatttgttttgggcagtattactatatatatataaacatacagttactgttttatatattcttaggtcattcaaagccatgtatgctgtaaatgtgctagtctttagaatgacacataataaataactgacaagatattaaatgtggtcttgcctgattcatcctattaggaggactagttctatgtgaccagcctgtgactggaccattgttcttgggcattgcattgagtgctcgggtgctgaatacatgtttgtaaacatgggaccatgggagacttccattttataagcttgtttctgcctaatttgaagcagaggggcaacagcgttgaggttaagagcacggactttgggagcacacagaccaggtcccaatcctggttctgcccctgactggctggtgactctgagcaagttgcttgacctctccaagcctccgtttcctcatgtgcaaagtgtggacaacaacagtaccttcctcataaggaacgtgcgacgcgcctcagaagtacgtgttcataaatggtagccattgttgttaccttcccgtctgtgaacatggatcacatcatctctgtgggtaacccagtcctcgttgtatgacttgtcaaaatgcagttccacttgtattaatattgaccctgttcatcgtcaccaggactgcatcttgcaccactgtgccgtcttctaggcacacacgacccgttatctcccttggaaaaattcctctcactggaaatgtacaattaaaggatgattgaaatgtttaactcttggagtttttagtattaccaaactcctagaaatttaagctaccaccaaaaataacatgtgccttttccctttattctcattgatggtagcagtgcacctcgtttcagtgtcctgattccttgattactgtgaacactgaacatcttttatacctttatgatatttctatgtttgtgacttcattggaatgttgatctatttcatatagattgtttttaatatacaatgtattagcccctgtcatatgttgcacactttttaacctatttgtcagctgtcttttggtctgtggtaggagttatacagtattttaaatggtttatgtagtcacatatacctgtctttcattttgatgcttgttctgaaatggagtcctggcttcaccatggaaggtgggacatatgggacagccatgtccttgtgggcatggtggtgtggctgcgtgcccacgacgaggggctggactaaagtgctcactggcaccttgcttggtgcatgggccatgctcagtttaatattattaacagtttctaccttcac

SEQ ID NO: 3556 - protein, 938 aa, Homo sapiens; identical to SEQ ID NO: 297

SEQ ID NO: 3557 - DNA, 635 bp, Homo sapiens
tggcccggtggacagggagaaacagccgatcttccctgcaggtggactggcacgaggaggagtgggagaaagtgtggctgaacgtggacaagagcctagagtgcatcattcagcgtgtggacaagctgctgcagaaggagcggctgcatggcgagggctgtgaggatgtcttcccctgtgcaggcagctgcaccagcaagaaaggtaacccggacagccacgcctactggatcagaccagaagaccccttctgtgatgtcccctcctcaccatgcccctccaccatgccctccactgcatgccatcctcatctgaccacacgtgcgtatgcatccatgcttcccatatgctgcctccatttcaccttgtgctgcttccatttgtctgtgtctctgactccatgccctcctcccccatgcagactgcagggagggctgccaggtggagcgggggcgtcccagtgcatggagcagcaggcagtgagagcggagtctccggttgcctttccatgtaactggagcccatgtgtgattctgcatctctgccagtcagaatctcagggtcctcttgagatacaccaccatggctataagggttgggctcctgggcttttcaggtttgtaaagcaatctgag

SEQ ID NO: 3558 - protein, 116 aa, Homo sapiens
MPSTACHPHLTTRAYASMLPICCLHFTLCCFHLSVSLTPCPPPPCRLQGGLPGGAGASQCMEQQAVRAESPVAFPCNWSPCVILHLCQSESQGPLEIHHHGYKGWAPGLFRFVKQS

SEQ ID NO: 3559 - DNA, 832 bp, Homo sapiens
caggtattcattaaagcaggggctgcaggggcaaccagcgagaagccaaagtgcatcttgggaggtgagatggtgctgtctatgccagagggcaaatatcctgacctggctaagctcccctcctctgggctcccacagcttccgtctcagctgatgccacctttccatctttctgtctctgccctgtcccctgaccggcgtggtgtggagcactcagcagcaacgtgaagtaattagcacaggacctgtgtacgccagggcgaggctgtgtggtggaaaccaggcctgcctcggtctcgcagtcagacgtgcctgccagagctgctgcggtttctgggtcagaacgtgcatgcccggaagaataagaacgtcgacattctctggcaagctgctgagatctgccgccgccttaatggggtccggttcaccagctgcaagagcgctaaggaccgtacagccatgtcggtgacactggagcagtgcctgatcctgcaacacgagcatggcatggccccgcaggtcttcacccaggccctggagtgcatgcgcagtgagggttgtcgaagagaaaatacaatgaagaatgttggaagtcgcaaatatgcatttaattccctgcagctgaaggctttccccaagcattacaggcctcccgaagggacttacggaaaagttgaaacgtgaacacacggtttcctctaattagctgttacataataaatgtgggtaccctctagtgtcatatatgaattcttcaagaagacctgaaggattggtttttattttttgtggtttttttaaaaaaaacatttcactaaagagtctctggagc

SEQ ID NO: 3560 - protein, 74 aa, Homo sapiens
MSVTLEQCLILQHEHGMAPQVFTQALECMRSEGCRRENTMKNVGSRKYAFNSLQLKAFPKHYRPPEGTYGKVET

SEQ ID NO: 3561 - DNA, 3229 bp, Homo sapiens
caggtattcattaaagcaggggctgcaggggcaaccagcgagaagccaaagtgcatcttgggaggtgagatggtgctgtctatgccagagggcaaatatcctgacctggctaagctcccctcctctgggctcccacagcttccgtctcagctgatgccacctttccatctttctgtctctgccctgtcccctgaccggcgtggtgtggagcactcagcagcaacgtgaagtaattagcacaggacctgtgtacgccagggcgaggctgtgtggtggaaaccaggcctgcctcggtctcgcagtcagacgtgcctgccagagctgctgcggtttctgggtcagaacgtgcatgcccggaagaataagaacgtcgacattctctggcaagctgctgagatctgccgccgccttaatggggtccggttcaccagctgcaagagcgctaaggaccgtacagccatgtcggtgacactggagcagtgcctgatcctgcaacacgagcatggcatggccccgcaggtcttcacccaggccctggagtgcatgcgcagtgagggttgtcgaagagaaaatacaatgaagaatgttggaagtcgcaaatatgcatttaattccctgcagctgaaggctttccccaagcattacaggcctcccgaagggacttacggaaaagttgaaacgtgaacacacggtttcctctaattagctgttacataataaatgtgggtaccctctagtgtcatatatgaattcttcaagaagacctgaaggattggtttttattttttgtggtttttttaaaaaaaacatttcactaaagagtctctggagcatgttttttgttttttgggtttttttccccattggaatcaataggaggtaatgtttggctcaatagtgtggatagtaacaactgcctatttaaattaaatagcctttggctgtaactacacagatctcatcaatagttacctacatgaatcaagctaggtttgtctgaaatgctagaagactttttcaaatgcctgcttgctcacttacttttctacagagtaactcaaaagtaaccattgaattacaatccactttgtaaaaatctgaatgtaaaacagtaaataataaattaaataattggatcctaggcataccaataaatgttatttggggaaagaagctagcactatctcatgcagtgagaataacgggttctagtgaattatcctatctacactaccacctgaagaagttgaaagaaagattgataaatcaacgggagataagactttattagaaggtaacacctgcaaggtaccccacatagttggggccactcttttttctgtcccttatgagttacagaacagggagtctgctggagacacaaagccagcagtaaggtccctttagcctgtctcctgttctctgaagctccctgccgaggctccctcacgcccagaggacacatctccccttcttctctagatgttaatgtagggcctcagatgtggcatgtcaacactcccatggggaatttatgaccatagagatagtagaaacctaaatattttcagaaaaaaaattttttttgcaggatttccaatttatctttgaaaagacagtacaatcatgtttgaatgtctgatgaaagtgtcttatttttaggtttgcaataattgttactttcttattctcattcttatgtaagatgactattgagaaacagttgaaatttattctcctcaaatgagattttgaaagggatttatgggccataaaacttaggaatttcatagaaaattttgtctggtcatcttttataagatgatgatgagtcttatctgcacatagcagagtttgtttcttaggagtttatatgttttattgattctgtttacgatgtttacatgttcttgaaaaggttgtaaaagaaatacatatggcacatattaatgatgctgatcctaatgatttgtgaacctcttagaaattcttttgtctaaaagcctagagattcttctggttcctttagaaacatgtaacaaacttgggccaggggtgctgaggcatggggaggactgcttattggcaggaacacagagggggtgggcatcaggtagggtggaactggatgaccttccagaccccctcctactcagaagtcagcatgcaagcagcgcctgctgtctcccgatgcctgcagggaggaaaatgtctgtgaaggacactttaatgaaggacgaagctctctgctgctccctcaaagctgagttcactgtggcaggcaggaagcagagaagctcctgcccgccaaacccactgcacaggtggctgctgctggtatcagattctcctttttaagtgtcaatttctgttcacagacagtttgttttcaatatggctgatttaccctttcacctctccaccatctcatttaatttgtaaatttttagttctgtcttttctcattttaacttttaaaaaatctccttgctttttaaaaataaatattacccacatagttttcagatcttttttgtctggagagcattaaatatctgcactcatcaaagggaatatagcaaatgttgatcatctgtcagcagttttgcatgtgacacctttatatgaattattttcccaatttttgctctatgtaatgggtcaccataaaactgtaagacttggcaaatgctatagaaaaggttcaggtttcagtattctctctgaaggcatcattcctgggcttccggcagcatcacacgcttccagtgcctgcagggtgagggtgtgtggcacagaggcaagcagctcctctcttctgtaggagctttgggttttcagaggtgcagggaaggcagttttacaggttaccgtaaaacagaggttccgtccagtgttccttatgatgcctccccatttaaaaagaaaagagatctatggaaaactgggaatgtaatgtggattctgtcagagctcctacagagcacagttgcctttagtttcctttaaagatgtaaaaatattgtataatacagttttgtccctacacaattgtatttgccaagcttagtgcattatgatacctttatttatttgttttgggcagtattactatatatatataaacatacagttactgttttatatattcttaggtcattcaaagccatgtatgctgtaaatgtgctagtctttagaatgacacataataaataactgacaagatatt

SEQ ID NO: 3562 - protein, 74 aa, Homo sapiens; identical to SEQ ID NO: 3560

SEQ ID NO: 3563 - DNA, 3860 bp, Homo sapiens
caggtattcattaaagcaggggctgcaggggcaaccagcgagaagccaaagtgcatcttgggaggtgagatggtgctgtctatgccagagggcaaatatcctgacctggctaagctcccctcctctgggctcccacagcttccgtctcagctgatgccacctttccatctttctgtctctgccctgtcccctgaccggcgtggtgtggagcactcagcagcaacgtgaagtaattagcacaggacctgtgtacgccagggcgaggctgtgtggtggaaaccaggcctgcctcggtctcgcagtcagacgtgcctgccagagctgctgcggtttctgggtcagaacgtgcatgcccggaagaataagaacgtcgacattctctggcaagctgctgagatctgccgccgccttaatggggtccggttcaccagctgcaagagcgctaaggaccgtacagccatgtcggtgacactggagcagtgcctgatcctgcaacacgagcatggcatggccccgcaggtcttcacccaggccctggagtgcatgcgcagtgagggttgtcgaagagaaaatacaatgaagaatgttggaagtcgcaaatatgcatttaattccctgcagctgaaggctttccccaagcattacaggcctcccgaagggacttacggaaaagttgaaacgtgaacacacggtttcctctaattagctgttacataataaatgtgggtaccctctagtgtcatatatgaattcttcaagaagacctgaaggattggtttttattttttgtggtttttttaaaaaaaacatttcactaaagagtctctggagcatgttttttgttttttgggtttttttccccattggaatcaataggaggtaatgtttggctcaatagtgtggatagtaacaactgcctatttaaattaaatagcctttggctgtaactacacagatctcatcaatagttacctacatgaatcaagctaggtttgtctgaaatgctagaagactttttcaaatgcctgcttgctcacttacttttctacagagtaactcaaaagtaaccattgaattacaatccactttgtaaaaatctgaatgtaaaacagtaaataataaattaaataattggatcctaggcataccaataaatgttatttggggaaagaagctagcactatctcatgcagtgagaataacgggttctagtgaattatcctatctacactaccacctgaagaagttgaaagaaagattgataaatcaacgggagataagactttattagaaggtaacacctgcaaggtaccccacatagttggggccactcttttttctgtcccttatgagttacagaacagggagtctgctggagacacaaagccagcagtaaggtccctttagcctgtctcctgttctctgaagctccctgccgaggctccctcacgcccagaggacacatctccccttcttctctagatgttaatgtagggcctcagatgtggcatgtcaacactcccatggggaatttatgaccatagagatagtagaaacctaaatattttcagaaaaaaaattttttttgcaggatttccaatttatctttgaaaagacagtacaatcatgtttgaatgtctgatgaaagtgtcttatttttaggtttgcaataattgttactttcttattctcattcttatgtaagatgactattgagaaacagttgaaatttattctcctcaaatgagattttgaaagggatttatgggccataaaacttaggaatttcatagaaaattttgtctggtcatcttttataagatgatgatgagtcttatctgcacatagcagagtttgtttcttaggagtttatatgttttattgattctgtttacgatgtttacatgttcttgaaaaggttgtaaaagaaatacatatggcacatattaatgatgctgatcctaatgatttgtgaacctcttagaaattcttttgtctaaaagcctagagattcttctggttcctttagaaacatgtaacaaacttgggccaggggtgctgaggcatggggaggactgcttattggcaggaacacagagggggtgggcatcaggtagggtggaactggatgaccttccagaccccctcctactcagaagtcagcatgcaagcagcgcctgctgtctcccgatgcctgcagggaggaaaatgtctgtgaaggacactttaatgaaggacgaagctctctgctgctccctcaaagctgagttcactgtggcaggcaggaagcagagaagctcctgcccgccaaacccactgcacaggtggctgctgctggtatcagattctcctttttaagtgtcaatttctgttcacagacagtttgttttcaatatggctgatttaccctttcacctctccaccatctcatttaatttgtaaatttttagttctgtcttttctcattttaacttttaaaaaatctccttgctttttaaaaataaatattacccacatagttttcagatcttttttgtctggagagcattaaatatctgcactcatcaaagggaatatagcaaatgttgatcatctgtcagcagttttgcatgtgacacctttatatgaattattttcccaatttttgctctatgtaatgggtcaccataaaactgtaagacttggcaaatgctatagaaaaggttcaggtttcagtattctctctgaaggcatcattcctgggcttccggcagcatcacacgcttccagtgcctgcagggtgagggtgtgtggcacagaggcaagcagctcctctcttctgtaggagctttgggttttcagaggtgcagggaaggcagttttacaggttaccgtaaaacagaggttccgtccagtgttccttatgatgcctccccatttaaaaagaaaagagatctatggaaaactgggaatgtaatgtggattctgtcagagctcctacagagcacagttgcctttagtttcctttaaagatgtaaaaatattgtataatacagttttgtccctacacaattgtatttgccaagcttagtgcattatgatacctttatttatttgttttgggcagtattactatatatatataaacatacagttactgttttatatattcttaggtcattcaaagccatgtatgctgtaaatgtgctagtctttagaatgacacataataaataactgacaagatattaaatgtggtcttgcctgattcatcctattaggaggactagttctatgtgaccagcctgtgactggaccattgttcttgggcattgcattgagtgctcgggtgctgaatacatgtttgtaaacatgggaccatgggagacttccattttataagcttgtttctgcctaatttgaagcagaggggcaacagcgttgaggttaagagcacggactttgggagcacacagaccaggtcccaatcctggttctgcccctgactggctggtgactctgagcaagttgcttgacctctccaagcctccgtttcctcatgtgcaaagtgtggacaacaacagtaccttcctcataaggaacgtgcgacgcgcctcagaagtacgtgttcataaatggtagccattgttgttaccttcccgtctgtgaacatggatcacatcatctctgtgggtaacccagtcctcgttgtatgacttgtcaaaatgcagttccacttgtattaatattgaccctgttcatcgtcaccaggactgcatcttgcaccactgtgccgtcttctaggcacacacgacccgttatctcccttggaaaaattcctctcactggaaatgtacaattaaaggatgattgaaatgttt

SEQ ID NO: 3564 - protein, 74 aa, Homo sapiens; identical to SEQ ID NO: 3560

SEQ ID NO: 3565 - DNA, 4406 bp, Homo sapiens
caggtattcattaaagcaggggctgcaggggcaaccagcgagaagccaaagtgcatcttgggaggtgagatggtgctgtctatgccagagggcaaatatcctgacctggctaagctcccctcctctgggctcccacagcttccgtctcagctgatgccacctttccatctttctgtctctgccctgtcccctgaccggcgtggtgtggagcactcagcagcaacgtgaagtaattagcacaggacctgtgtacgccagggcgaggctgtgtggtggaaaccaggcctgcctcggtctcgcagtcagacgtgcctgccagagctgctgcggtttctgggtcagaacgtgcatgcccggaagaataagaacgtcgacattctctggcaagctgctgagatctgccgccgccttaatggggtccggttcaccagctgcaagagcgctaaggaccgtacagccatgtcggtgacactggagcagtgcctgatcctgcaacacgagcatggcatggccccgcaggtcttcacccaggccctggagtgcatgcgcagtgagggttgtcgaagagaaaatacaatgaagaatgttggaagtcgcaaatatgcatttaattccctgcagctgaaggctttccccaagcattacaggcctcccgaagggacttacggaaaagttgaaacgtgaacacacggtttcctctaattagctgttacataataaatgtgggtaccctctagtgtcatatatgaattcttcaagaagacctgaaggattggtttttattttttgtggtttttttaaaaaaaacatttcactaaagagtctctggagcatgttttttgttttttgggtttttttccccattggaatcaataggaggtaatgtttggctcaatagtgtggatagtaacaactgcctatttaaattaaatagcctttggctgtaactacacagatctcatcaatagttacctacatgaatcaagctaggtttgtctgaaatgctagaagactttttcaaatgcctgcttgctcacttacttttctacagagtaactcaaaagtaaccattgaattacaatccactttgtaaaaatctgaatgtaaaacagtaaataataaattaaataattggatcctaggcataccaataaatgttatttggggaaagaagctagcactatctcatgcagtgagaataacgggttctagtgaattatcctatctacactaccacctgaagaagttgaaagaaagattgataaatcaacgggagataagactttattagaaggtaacacctgcaaggtaccccacatagttggggccactcttttttctgtcccttatgagttacagaacagggagtctgctggagacacaaagccagcagtaaggtccctttagcctgtctcctgttctctgaagctccctgccgaggctccctcacgcccagaggacacatctccccttcttctctagatgttaatgtagggcctcagatgtggcatgtcaacactcccatggggaatttatgaccatagagatagtagaaacctaaatattttcagaaaaaaaattttttttgcaggatttccaatttatctttgaaaagacagtacaatcatgtttgaatgtctgatgaaagtgtcttatttttaggtttgcaataattgttactttcttattctcattcttatgtaagatgactattgagaaacagttgaaatttattctcctcaaatgagattttgaaagggatttatgggccataaaacttaggaatttcatagaaaattttgtctggtcatcttttataagatgatgatgagtcttatctgcacatagcagagtttgtttcttaggagtttatatgttttattgattctgtttacgatgtttacatgttcttgaaaaggttgtaaaagaaatacatatggcacatattaatgatgctgatcctaatgatttgtgaacctcttagaaattcttttgtctaaaagcctagagattcttctggttcctttagaaacatgtaacaaacttgggccaggggtgctgaggcatggggaggactgcttattggcaggaacacagagggggtgggcatcaggtagggtggaactggatgaccttccagaccccctcctactcagaagtcagcatgcaagcagcgcctgctgtctcccgatgcctgcagggaggaaaatgtctgtgaaggacactttaatgaaggacgaagctctctgctgctccctcaaagctgagttcactgtggcaggcaggaagcagagaagctcctgcccgccaaacccactgcacaggtggctgctgctggtatcagattctcctttttaagtgtcaatttctgttcacagacagtttgttttcaatatggctgatttaccctttcacctctccaccatctcatttaatttgtaaatttttagttctgtcttttctcattttaacttttaaaaaatctccttgctttttaaaaataaatattacccacatagttttcagatcttttttgtctggagagcattaaatatctgcactcatcaaagggaatatagcaaatgttgatcatctgtcagcagttttgcatgtgacacctttatatgaattattttcccaatttttgctctatgtaatgggtcaccataaaactgtaagacttggcaaatgctatagaaaaggttcaggtttcagtattctctctgaaggcatcattcctgggcttccggcagcatcacacgcttccagtgcctgcagggtgagggtgtgtggcacagaggcaagcagctcctctcttctgtaggagctttgggttttcagaggtgcagggaaggcagttttacaggttaccgtaaaacagaggttccgtccagtgttccttatgatgcctccccatttaaaaagaaaagagatctatggaaaactgggaatgtaatgtggattctgtcagagctcctacagagcacagttgcctttagtttcctttaaagatgtaaaaatattgtataatacagttttgtccctacacaattgtatttgccaagcttagtgcattatgatacctttatttatttgttttgggcagtattactatatatatataaacatacagttactgttttatatattcttaggtcattcaaagccatgtatgctgtaaatgtgctagtctttagaatgacacataataaataactgacaagatattaaatgtggtcttgcctgattcatcctattaggaggactagttctatgtgaccagcctgtgactggaccattgttcttgggcattgcattgagtgctcgggtgctgaatacatgtttgtaaacatgggaccatgggagacttccattttataagcttgtttctgcctaatttgaagcagaggggcaacagcgttgaggttaagagcacggactttgggagcacacagaccaggtcccaatcctggttctgcccctgactggctggtgactctgagcaagttgcttgacctctccaagcctccgtttcctcatgtgcaaagtgtggacaacaacagtaccttcctcataaggaacgtgcgacgcgcctcagaagtacgtgttcataaatggtagccattgttgttaccttcccgtctgtgaacatggatcacatcatctctgtgggtaacccagtcctcgttgtatgacttgtcaaaatgcagttccacttgtattaatattgaccctgttcatcgtcaccaggactgcatcttgcaccactgtgccgtcttctaggcacacacgacccgttatctcccttggaaaaattcctctcactggaaatgtacaattaaaggatgattgaaatgtttaactcttggagtttttagtattaccaaactcctagaaatttaagctaccaccaaaaataacatgtgccttttccctttattctcattgatggtagcagtgcacctcgtttcagtgtcctgattccttgattactgtgaacactgaacatcttttatacctttatgatatttctatgtttgtgacttcattggaatgttgatctatttcatatagattgtttttaatatacaatgtattagcccctgtcatatgttgcacactttttaacctatttgtcagctgtcttttggtctgtggtaggagttatacagtattttaaatggtttatgtagtcacatatacctgtctttcattttgatgcttgttctgaaatggagtcctggcttcaccatggaaggtgggacatatgggacagccatgtccttgtgggcatggtggtgtggctgcgtgcccacgacgaggggctggactaaagtgctcactggcaccttgcttggtgcatgggccatgctcagtttaatattattaacagtttctaccttcac

SEQ ID NO: 3566 - protein, 74 aa, Homo sapiens; identical to SEQ ID NO: 3560

SEQ ID NO: 3567 - DNA, 2672 bp, Homo sapiens
cagaagttctacacctgtttcccacacattccagtggctagaacttagtcacaggaccacagctagatgcaagggcgtctaggagatctcacccagccatatgctggataaaaaggaagagcagacagctagcagtctgttatttggggtggagtggataacgaatgactgtctcttagctttagtgtatctagatggatctttaccccaggcagttgacaatataggttgaaagcttttgaaaaaggtagcatcttagatacagtttgaagaggcatcagcttataaactatagttataaccttttatatggttagtcttcttttgtctgcctccacgtcgttcatgtgggcaacacatcccaccagcagaattgcagagtttggagaggaaggaaacctgctactcttatccacttttgagagtcactgaggtagatgacatttgatatctaggacccaggcagacatacagactggaaggtggccaagactcctggggaacaggaataccacagacatagtaccctgtagcttttcataggaaaaactggcagagcgtgcctggcacttgcaacataaaggttctggggagtggctgcagtgatgcggctgtagagtcaaaatctgcttgagggaaaatccctgattatgcagagcagatgagctttgggttatattttttctggtgcatgaatgggccacatgtttctatttaagtagtattccagcctgccttgttaatatctttgtgaagtgtttcgtgccaacactaaaaatattctgattttagggtacccagttcacacatttcacccataaggaaatgaagataaccctttctagatttttatataaacagtttaaggaaaagtatccaatagaaaccagtgttttcaagaattcaacagtgtccttaaagttcccaagttactttacaatttttttttcattctttaggcaccaatagcccaaatgaattaagaactatttcctacataactttctattttcctcctttaacacttttaaaaaggactattttcagaaggacaattattttgtactttgtgagaaaatttccaaggtgtttatattgttttatgtgtctgtcataggaaggaaaatcacctcggcagtgtttgaaggaaggatactgcaactctttgaagtacgcattttttgagtgtaaaagatcagtgttggataacagggcaagattcagaggaagaaaaggatattgatgcattatgttgaagccaacatggaaaacaacaaatattttccctggtcattaacacaaagaagccaaaacaggaaacatactttttactacatctgtttggttggaccagatttcccctccgtggaacactgaagaaagtggatgagttgttttcgaatatgtataaagtaaatgattctcttgatccaagttatttttagaagaaaaacctaattgaacaggtatgggttgggagcataataaatgtgttttgagaattgttctaaagcacagaaaatggaaagactgttatttgcaaacttgactcttcaattgaattacccaattagtacaggccactgatttgactgacacagtcgataacatgcagcctatccagaaggtgtctgttgggaaagtttaggataaaactttttctttagttcagtcttttcctgtctagttctaaaatgaattgtgtttgattccttagagaagaaatacttcatttgtgctctgattcactgaagtaataacctcagcactttaatagcgtccacaggcatagctgatgctaggccccagattgtgttgcccaggctctttaccatcatcttcggactgtttttgtttcctggttacattttcagtctggcccgctctacataatgggccagtgtcagctccaagtccacatccttattatccatgattcaaaagggagagagagaacttcctttttcagggtccacaaatcaaatctataaaaggactctggtcttcccaggatcacctgcccttgcattggaccagtccctgtggaagaggggatgggggcctgtgatcttggccaggcctgggctatctatctgcactgtcattgctaactcctgtcagaatcacatggatgagtagtgggctgaatcccaaaaggaaaggggtttagagcaagtggaaacaacagatgttcactatagaaagcaagaatgaaaaccatgaagtggttgaagattagccttacagtaattttattctgatcacttaatacagtagagtcaaacaggaatccaagtttccaactttattatttttggcactgaagaattacaaagaactctagcgtctttatacctccgtggttcactggagttaaagcaatcggggcgttgtacagctcacttgagtttttaaaggttctactaaaaagtgagaattccacagcaatatgggtcattgttgcagaatatcacaaaggtctgttgtgtatactccttttcaccaggaaagggacaataatagtttttttcaatgtatatatatataagtgatctaactttttattaataaaagtaaacaactctaaaatgtatattataaagccctgtcatctttgttgagtaatagctttattgagctttatttggagaaatacacataccgtaaaattc

SEQ ID NO: 3568 - protein, 68 aa, Homo sapiens
MIQKGERELPFSGSTNQIYKRTLVFPGSPALALDQSLWKRGWGPVILARPGLSICTVIANSCQNHMDE

SEQ ID NO: 3569 - DNA, 1633 bp, Homo sapiens
tcactcatcatagggtatcttcgtctccactaacagcttccagatccactgactcttcatcagaatcacctagaagtggaaggaaaatcacctcggcagtgtttgaaggaaggatactgcaactctttgaagtacgcattttttgagtgtaaaagatcagtgttggataacagggcaagattcagaggaagaaaaggatattgatgcattatgttgaagccaacatggaaaacaacaaatattttccctggtcattaacacaaagaagccaaaacaggaaacatactttttactacatctgtttggttggaccagatttcccctccgtggaacactgaagaaagtggatgagttgttttcgaatatgtataaagtaaatgattctcttgatccaagttatttttagaagaaaaacctaattgaacaggtatgggttgggagcataataaatgtgttttgagaattgttctaaagcacagaaaatggaaagactgttatttgcaaacttgactcttcaattgaattacccaattagtacaggccactgatttgactgacacagtcgataacatgcagcctatccagaaggtgtctgttgggaaagtttaggataaaactttttctttagttcagtcttttcctgtctagttctaaaatgaattgtgtttgattccttagagaagaaatacttcatttgtgctctgattcactgaagtaataacctcagcactttaatagcgtccacaggcatagctgatgctaggccccagattgtgttgcccaggctctttaccatcatcttcggactgtttttgtttcctggttacattttcagtctggcccgctctacataatgggccagtgtcagctccaagtccacatccttattatccatgattcaaaagggagagagagaacttcctttttcagggtccacaaatcaaatctataaaaggactctggtcttcccaggatcacctgcccttgcattggaccagtccctgtggaagaggggatgggggcctgtgatcttggccaggcctgggctatctatctgcactgtcattgctaactcctgtcagaatcacatggatgagtagtgggctgaatcccaaaaggaaaggggtttagagcaagtggaaacaacagatgttcactatagaaagcaagaatgaaaaccatgaagtggttgaagattagccttacagtaattttattctgatcacttaatacagtagagtcaaacaggaatccaagtttccaactttattatttttggcactgaagaattacaaagaactctagcgtctttatacctccgtggttcactggagttaaagcaatcggggcgttgtacagctcacttgagtttttaaaggttctactaaaaagtgagaattccacagcaatatgggtcattgttgcagaatatcacaaaggtctgttgtgtatactccttttcaccaggaaagggacaataatagtttttttcaatgtatatatatataagtgatctaactttttattaataaaagtaaacaactctaaaatgtatattataaagccctgtcatctttgttgagtaatagctttattgagctttatttggagaaatacacataccgtaaaattc

SEQ ID NO: 3570 - protein, 68 aa, Homo sapiens; identical to SEQ ID NO: 3568

SEQ ID NO: 3571 - DNA, 1800 bp, Homo sapiens
tggcttccggtcccctgagactggggcctcgctcgctcccgacccggttgcaagtgttgcggtgggagaaagtcgcgtccgcatcggaggggaagcgccgtcatgcctaagtattatgaggacaagccgcagggcggcgcgtgcgcgggcctgaaggaggacctgggcgcgtgtctgctgcagtcggactgtgtggtccaggtagcgcggccgggcgctcccggtggtgacgacccctgtcccaggaaggaaaatcacctcggcagtgtttgaaggaaggatactgcaactctttgaagtacgcattttttgagtgtaaaagatcagtgttggataacagggcaagattcagaggaagaaaaggatattgatgcattatgttgaagccaacatggaaaacaacaaatattttccctggtcattaacacaaagaagccaaaacaggaaacatactttttactacatctgtttggttggaccagatttcccctccgtggaacactgaagaaagtggatgagttgttttcgaatatgtataaagtaaatgattctcttgatccaagttatttttagaagaaaaacctaattgaacaggtatgggttgggagcataataaatgtgttttgagaattgttctaaagcacagaaaatggaaagactgttatttgcaaacttgactcttcaattgaattacccaattagtacaggccactgatttgactgacacagtcgataacatgcagcctatccagaaggtgtctgttgggaaagtttaggataaaactttttctttagttcagtcttttcctgtctagttctaaaatgaattgtgtttgattccttagagaagaaatacttcatttgtgctctgattcactgaagtaataacctcagcactttaatagcgtccacaggcatagctgatgctaggccccagattgtgttgcccaggctctttaccatcatcttcggactgtttttgtttcctggttacattttcagtctggcccgctctacataatgggccagtgtcagctccaagtccacatccttattatccatgattcaaaagggagagagagaacttcctttttcagggtccacaaatcaaatctataaaaggactctggtcttcccaggatcacctgcccttgcattggaccagtccctgtggaagaggggatgggggcctgtgatcttggccaggcctgggctatctatctgcactgtcattgctaactcctgtcagaatcacatggatgagtagtgggctgaatcccaaaaggaaaggggtttagagcaagtggaaacaacagatgttcactatagaaagcaagaatgaaaaccatgaagtggttgaagattagccttacagtaattttattctgatcacttaatacagtagagtcaaacaggaatccaagtttccaactttattatttttggcactgaagaattacaaagaactctagcgtctttatacctccgtggttcactggagttaaagcaatcggggcgttgtacagctcacttgagtttttaaaggttctactaaaaagtgagaattccacagcaatatgggtcattgttgcagaatatcacaaaggtctgttgtgtatactccttttcaccaggaaagggacaataatagtttttttcaatgtatatatatataagtgatctaactttttattaataaaagtaaacaactctaaaatgtatattataaagccctgtcatctttgttgagtaatagctttattgagctttatttggagaaatacacataccgtaaaattc

SEQ ID NO: 3572 - protein, 56 aa, Homo sapiens
MPKYYEDKPQGGACAGLKEDLGACLLQSDCVVQVARPGAPGGDDPCPRKENHLGSV

SEQ ID NO: 3573 - DNA, 1764 bp, Homo sapiens
gttgccgctggcttccggtcccctgagactggggcctcgctcgctcccgacccggttgcaagtgttgcggtgggagaaagtcgcgtccgcatcggaggggaagcgccgtcatgcctaagtattatgaggacaagccgcagggcggcgcgtgcgcgggcctgaaggaggacctgggcgcgtgtctgctgcagtcggactgtgtggtccaggaaggaaaatcacctcggcagtgtttgaaggaaggatactgcaactctttgaagtacgcattttttgagtgtaaaagatcagtgttggataacagggcaagattcagaggaagaaaaggatattgatgcattatgttgaagccaacatggaaaacaacaaatattttccctggtcattaacacaaagaagccaaaacaggaaacatactttttactacatctgtttggttggaccagatttcccctccgtggaacactgaagaaagtggatgagttgttttcgaatatgtataaagtaaatgattctcttgatccaagttatttttagaagaaaaacctaattgaacaggtatgggttgggagcataataaatgtgttttgagaattgttctaaagcacagaaaatggaaagactgttatttgcaaacttgactcttcaattgaattacccaattagtacaggccactgatttgactgacacagtcgataacatgcagcctatccagaaggtgtctgttgggaaagtttaggataaaactttttctttagttcagtcttttcctgtctagttctaaaatgaattgtgtttgattccttagagaagaaatacttcatttgtgctctgattcactgaagtaataacctcagcactttaatagcgtccacaggcatagctgatgctaggccccagattgtgttgcccaggctctttaccatcatcttcggactgtttttgtttcctggttacattttcagtctggcccgctctacataatgggccagtgtcagctccaagtccacatccttattatccatgattcaaaagggagagagagaacttcctttttcagggtccacaaatcaaatctataaaaggactctggtcttcccaggatcacctgcccttgcattggaccagtccctgtggaagaggggatgggggcctgtgatcttggccaggcctgggctatctatctgcactgtcattgctaactcctgtcagaatcacatggatgagtagtgggctgaatcccaaaaggaaaggggtttagagcaagtggaaacaacagatgttcactatagaaagcaagaatgaaaaccatgaagtggttgaagattagccttacagtaattttattctgatcacttaatacagtagagtcaaacaggaatccaagtttccaactttattatttttggcactgaagaattacaaagaactctagcgtctttatacctccgtggttcactggagttaaagcaatcggggcgttgtacagctcacttgagtttttaaaggttctactaaaaagtgagaattccacagcaatatgggtcattgttgcagaatatcacaaaggtctgttgtgtatactccttttcaccaggaaagggacaataatagtttttttcaatgtatatatatataagtgatctaactttttattaataaaagtaaacaactctaaaatgtatattataaagccctgtcatctttgttgagtaatagctttattgagctttatttggagaaatacacataccgtaaaattc

SEQ ID NO: 3574 - protein, 74 aa, Homo sapiens; identical to SEQ ID NO: 299

SEQ ID NO: 3575 - DNA, 1860 bp, Homo sapiens
atggcctattcacacagatccatcagcgcactgccagcaagcttctcggtcactagaatgagattaaaaaaccaagaaaaactccgatccctagtgttttacatccggaatagttcagcagagggagcggtagcgtcggagtccaatccaaccggtccgagctccggggaacgccggccactgcccggctgcccgtctcccctccacttcgcaggccccccagacgccggcagggtctggccgagcccagctgctccctccctgcccggggccgcggactggggcctcgctcgctcccgacccggttgcaagtgttgcggtgggagaaagtcgcgtccgcatcggaggggaagcgccgtcatgcctaagtattatgaggacaagccgcagggcggcgcgtgcgcgggcctgaaggaggacctgggcgcgtgtctgctgcagtcggactgtgtggtccaggaaggaaaatcacctcggcagtgtttgaaggaaggatactgcaactctttgaagtacgcattttttgagtgtaaaagatcagtgttggataacagggcaagattcagaggaagaaaaggatattgatgcattatgtataaagtaaatgattctcttgatccaagttatttttagaagaaaaacctaattgaacaggtatgggttgggagcataataaatgtgttttgagaattgttctaaagcacagaaaatggaaagactgttatttgcaaacttgactcttcaattgaattacccaattagtacaggccactgatttgactgacacagtcgataacatgcagcctatccagaaggtgtctgttgggaaagtttaggataaaactttttctttagttcagtcttttcctgtctagttctaaaatgaattgtgtttgattccttagagaagaaatacttcatttgtgctctgattcactgaagtaataacctcagcactttaatagcgtccacaggcatagctgatgctaggccccagattgtgttgcccaggctctttaccatcatcttcggactgtttttgtttcctggttacattttcagtctggcccgctctacataatgggccagtgtcagctccaagtccacatccttattatccatgattcaaaagggagagagagaacttcctttttcagggtccacaaatcaaatctataaaaggactctggtcttcccaggatcacctgcccttgcattggaccagtccctgtggaagaggggatgggggcctgtgatcttggccaggcctgggctatctatctgcactgtcattgctaactcctgtcagaatcacatggatgagtagtgggctgaatcccaaaaggaaaggggtttagagcaagtggaaacaacagatgttcactatagaaagcaagaatgaaaaccatgaagtggttgaagattagccttacagtaattttattctgatcacttaatacagtagagtcaaacaggaatccaagtttccaactttattatttttggcactgaagaattacaaagaactctagcgtctttatacctccgtggttcactggagttaaagcaatcggggcgttgtacagctcacttgagtttttaaaggttctactaaaaagtgagaattccacagcaatatgggtcattgttgcagaatatcacaaaggtctgttgtgtatactccttttcaccaggaaagggacaataatagtttttttcaatgtatatatatataagtgatctaactttttattaataaaagtaaacaactctaaaatgtatattataaagccctgtcatctttgttgagtaatagctttattgagctttatttggagaaatacacataccgtaaaattc

SEQ ID NO: 3576 - protein, 194 aa, Homo sapiens
MAYSHRSISALPASFSVTRMRLKNQEKLRSLVFYIRNSSAEGAVASESNPTGPSSGERRPLPGCPSPLHFAGPPDAGRVWPSPAAPSLPGAADWGLARSRPGCKCCGGRKSRPHRRGSAVMPKYYEDKPQGGACAGLKEDLGACLLQSDCVVQEGKSPRQCLKEGYCNSLKYAFFECKRSVLDNRARFRGRKGY

SEQ ID NO: 3577 - DNA, 2592 bp, Homo sapiens
cagaagttctacacctgtttcccacacattccagtggctagaacttagtcacaggaccacagctagatgcaagggcgtctaggagatctcacccagccatatgctggataaaaaggaagagcagacagctagcagtctgttatttggggtggagtggataacgaatgactgtctcttagctttagtgtatctagatggatctttaccccaggcagttgacaatataggttgaaagcttttgaaaaaggtagcatcttagatacagtttgaagaggcatcagcttataaactatagttataaccttttatatggttagtcttcttttgtctgcctccacgtcgttcatgtgggcaacacatcccaccagcagaattgcagagtttggagaggaaggaaacctgctactcttatccacttttgagagtcactgaggtagatgacatttgatatctaggacccaggcagacatacagactggaaggtggccaagactcctggggaacaggaataccacagacatagtaccctgtagcttttcataggaaaaactggcagagcgtgcctggcacttgcaacataaaggttctggggagtggctgcagtgatgcggctgtagagtcaaaatctgcttgagggaaaatccctgattatgcagagcagatgagctttgggttatattttttctggtgcatgaatgggccacatgtttctatttaagtagtattccagcctgccttgttaatatctttgtgaagtgtttcgtgccaacactaaaaatattctgattttagggtacccagttcacacatttcacccataaggaaatgaagataaccctttctagatttttatataaacagtttaaggaaaagtatccaatagaaaccagtgttttcaagaattcaacagtgtccttaaagttcccaagttactttacaatttttttttcattctttaggcaccaatagcccaaatgaattaagaactatttcctacataactttctattttcctcctttaacacttttaaaaaggactattttcagaaggacaattattttgtactttgtgagaaaatttccaaggtgtttatattgttttatgtgtctgtcataggaaggaaaatcacctcggcagtgtttgaaggaaggatactgcaactctttgaagtacgcattttttgagtgtaaaagatcagtgttggataacagggcaagattcagaggaagaaaaggatattgatgcattatgttgaagccaacatggaaaacaacaaatattttccctggtcattaacacaaagaagccaaaacaggaaacatactttttactacatctgtttggttggaccagatttcccctccgtggaacactgaagaaagtggatgagttgttttcgaatatgtataaagtaaatgattctcttgatccaagttatttttagaagaaaaacctaattgaacaggtatgggttgggagcataataaatgtgttttgagaattgttctaaagcacagaaaatggaaagactgttatttgcaaacttgactcttcaattgaattacccaattagtacaggccactgatttgactgacacagtcgataacatgcagcctatccagaaggtgtctgttgggaaagtttaggataaaactttttctttagttcagtcttttcctgtctagttctaaaatgaattgtgtttgattccttagagaagaaatacttcatttgtgctctgattcactgaagtaataacctcagcactttaatagcgtccacaggcatagctgatgctaggccccagattgtgttgcccaggctctttaccatcatcttcggactgtttttgtttcctggttacattttcagtctggcccgctctacataatgggccagtgtcagctccaagtccacatccttattatccatgattcaaaagggagagagagaacttcctttttcagggtccacaaatcaaatctataaaaggactctggtcttcccaggatcacctgcccttgcattggaccagtccctgtggaagaggggatgggggcctgtgatcttggccaggcctgggctatctatctgcactgtcattgctaactcctgtcagaatcacatggatgagtagtgggctgaatcccaaaaggaaaggggtttagagcaagtggaaacaacagatgttcactatagaaagcaagaatgaaaaccatgaagtggttgaagattagccttacagtaattttattctgatcacttaatacagtagagtcaaacaggaatccaagtttccaactttattatttttggcactgaagaattacaaagaactctagcgtctttatacctccgtggttcactggagttaaagcaatcggggcgttgtacagctcacttgagtttttaaaggttctactaaaaagtgagaattccacagcaatatgggtcattgttgcagaatatcacaaaggtctgttgtgtatactccttttcaccaggaaagggacaataatagtttttttcaatgtatatatatataagtgatctaactttttattaataaaagtaaacaactctaaaatgt

SEQ ID NO: 3578 - protein, 68 aa, Homo sapiens; identical to SEQ ID NO: 3568

SEQ ID NO: 3579 - DNA, 1553 bp, Homo sapiens
tcactcatcatagggtatcttcgtctccactaacagcttccagatccactgactcttcatcagaatcacctagaagtggaaggaaaatcacctcggcagtgtttgaaggaaggatactgcaactctttgaagtacgcattttttgagtgtaaaagatcagtgttggataacagggcaagattcagaggaagaaaaggatattgatgcattatgttgaagccaacatggaaaacaacaaatattttccctggtcattaacacaaagaagccaaaacaggaaacatactttttactacatctgtttggttggaccagatttcccctccgtggaacactgaagaaagtggatgagttgttttcgaatatgtataaagtaaatgattctcttgatccaagttatttttagaagaaaaacctaattgaacaggtatgggttgggagcataataaatgtgttttgagaattgttctaaagcacagaaaatggaaagactgttatttgcaaacttgactcttcaattgaattacccaattagtacaggccactgatttgactgacacagtcgataacatgcagcctatccagaaggtgtctgttgggaaagtttaggataaaactttttctttagttcagtcttttcctgtctagttctaaaatgaattgtgtttgattccttagagaagaaatacttcatttgtgctctgattcactgaagtaataacctcagcactttaatagcgtccacaggcatagctgatgctaggccccagattgtgttgcccaggctctttaccatcatcttcggactgtttttgtttcctggttacattttcagtctggcccgctctacataatgggccagtgtcagctccaagtccacatccttattatccatgattcaaaagggagagagagaacttcctttttcagggtccacaaatcaaatctataaaaggactctggtcttcccaggatcacctgcccttgcattggaccagtccctgtggaagaggggatgggggcctgtgatcttggccaggcctgggctatctatctgcactgtcattgctaactcctgtcagaatcacatggatgagtagtgggctgaatcccaaaaggaaaggggtttagagcaagtggaaacaacagatgttcactatagaaagcaagaatgaaaaccatgaagtggttgaagattagccttacagtaattttattctgatcacttaatacagtagagtcaaacaggaatccaagtttccaactttattatttttggcactgaagaattacaaagaactctagcgtctttatacctccgtggttcactggagttaaagcaatcggggcgttgtacagctcacttgagtttttaaaggttctactaaaaagtgagaattccacagcaatatgggtcattgttgcagaatatcacaaaggtctgttgtgtatactccttttcaccaggaaagggacaataatagtttttttcaatgtatatatatataagtgatctaactttttattaataaaagtaaacaactctaaaatgt

SEQ ID NO: 3580 - protein, 68 aa, Homo sapiens; identical to SEQ ID NO: 3568

SEQ ID NO: 3581 - DNA, 1720 bp, Homo sapiens
tggcttccggtcccctgagactggggcctcgctcgctcccgacccggttgcaagtgttgcggtgggagaaagtcgcgtccgcatcggaggggaagcgccgtcatgcctaagtattatgaggacaagccgcagggcggcgcgtgcgcgggcctgaaggaggacctgggcgcgtgtctgctgcagtcggactgtgtggtccaggtagcgcggccgggcgctcccggtggtgacgacccctgtcccaggaaggaaaatcacctcggcagtgtttgaaggaaggatactgcaactctttgaagtacgcattttttgagtgtaaaagatcagtgttggataacagggcaagattcagaggaagaaaaggatattgatgcattatgttgaagccaacatggaaaacaacaaatattttccctggtcattaacacaaagaagccaaaacaggaaacatactttttactacatctgtttggttggaccagatttcccctccgtggaacactgaagaaagtggatgagttgttttcgaatatgtataaagtaaatgattctcttgatccaagttatttttagaagaaaaacctaattgaacaggtatgggttgggagcataataaatgtgttttgagaattgttctaaagcacagaaaatggaaagactgttatttgcaaacttgactcttcaattgaattacccaattagtacaggccactgatttgactgacacagtcgataacatgcagcctatccagaaggtgtctgttgggaaagtttaggataaaactttttctttagttcagtcttttcctgtctagttctaaaatgaattgtgtttgattccttagagaagaaatacttcatttgtgctctgattcactgaagtaataacctcagcactttaatagcgtccacaggcatagctgatgctaggccccagattgtgttgcccaggctctttaccatcatcttcggactgtttttgtttcctggttacattttcagtctggcccgctctacataatgggccagtgtcagctccaagtccacatccttattatccatgattcaaaagggagagagagaacttcctttttcagggtccacaaatcaaatctataaaaggactctggtcttcccaggatcacctgcccttgcattggaccagtccctgtggaagaggggatgggggcctgtgatcttggccaggcctgggctatctatctgcactgtcattgctaactcctgtcagaatcacatggatgagtagtgggctgaatcccaaaaggaaaggggtttagagcaagtggaaacaacagatgttcactatagaaagcaagaatgaaaaccatgaagtggttgaagattagccttacagtaattttattctgatcacttaatacagtagagtcaaacaggaatccaagtttccaactttattatttttggcactgaagaattacaaagaactctagcgtctttatacctccgtggttcactggagttaaagcaatcggggcgttgtacagctcacttgagtttttaaaggttctactaaaaagtgagaattccacagcaatatgggtcattgttgcagaatatcacaaaggtctgttgtgtatactccttttcaccaggaaagggacaataatagtttttttcaatgtatatatatataagtgatctaactttttattaataaaagtaaacaactctaaaatgt

SEQ ID NO: 3582 - protein, 56 aa, Homo sapiens; identical to SEQ ID NO: 3572

SEQ ID NO: 3583 - DNA, 1684 bp, Homo sapiens
gttgccgctggcttccggtcccctgagactggggcctcgctcgctcccgacccggttgcaagtgttgcggtgggagaaagtcgcgtccgcatcggaggggaagcgccgtcatgcctaagtattatgaggacaagccgcagggcggcgcgtgcgcgggcctgaaggaggacctgggcgcgtgtctgctgcagtcggactgtgtggtccaggaaggaaaatcacctcggcagtgtttgaaggaaggatactgcaactctttgaagtacgcattttttgagtgtaaaagatcagtgttggataacagggcaagattcagaggaagaaaaggatattgatgcattatgttgaagccaacatggaaaacaacaaatattttccctggtcattaacacaaagaagccaaaacaggaaacatactttttactacatctgtttggttggaccagatttcccctccgtggaacactgaagaaagtggatgagttgttttcgaatatgtataaagtaaatgattctcttgatccaagttatttttagaagaaaaacctaattgaacaggtatgggttgggagcataataaatgtgttttgagaattgttctaaagcacagaaaatggaaagactgttatttgcaaacttgactcttcaattgaattacccaattagtacaggccactgatttgactgacacagtcgataacatgcagcctatccagaaggtgtctgttgggaaagtttaggataaaactttttctttagttcagtcttttcctgtctagttctaaaatgaattgtgtttgattccttagagaagaaatacttcatttgtgctctgattcactgaagtaataacctcagcactttaatagcgtccacaggcatagctgatgctaggccccagattgtgttgcccaggctctttaccatcatcttcggactgtttttgtttcctggttacattttcagtctggcccgctctacataatgggccagtgtcagctccaagtccacatccttattatccatgattcaaaagggagagagagaacttcctttttcagggtccacaaatcaaatctataaaaggactctggtcttcccaggatcacctgcccttgcattggaccagtccctgtggaagaggggatgggggcctgtgatcttggccaggcctgggctatctatctgcactgtcattgctaactcctgtcagaatcacatggatgagtagtgggctgaatcccaaaaggaaaggggtttagagcaagtggaaacaacagatgttcactatagaaagcaagaatgaaaaccatgaagtggttgaagattagccttacagtaattttattctgatcacttaatacagtagagtcaaacaggaatccaagtttccaactttattatttttggcactgaagaattacaaagaactctagcgtctttatacctccgtggttcactggagttaaagcaatcggggcgttgtacagctcacttgagtttttaaaggttctactaaaaagtgagaattccacagcaatatgggtcattgttgcagaatatcacaaaggtctgttgtgtatactccttttcaccaggaaagggacaataatagtttttttcaatgtatatatatataagtgatctaactttttattaataaaagtaaacaactctaaaatgt

SEQ ID NO: 3584 - protein, 74 aa, Homo sapiens; identical to SEQ ID NO: 299

SEQ ID NO: 3585 - DNA, 1780 bp, Homo sapiens
atggcctattcacacagatccatcagcgcactgccagcaagcttctcggtcactagaatgagattaaaaaaccaagaaaaactccgatccctagtgttttacatccggaatagttcagcagagggagcggtagcgtcggagtccaatccaaccggtccgagctccggggaacgccggccactgcccggctgcccgtctcccctccacttcgcaggccccccagacgccggcagggtctggccgagcccagctgctccctccctgcccggggccgcggactggggcctcgctcgctcccgacccggttgcaagtgttgcggtgggagaaagtcgcgtccgcatcggaggggaagcgccgtcatgcctaagtattatgaggacaagccgcagggcggcgcgtgcgcgggcctgaaggaggacctgggcgcgtgtctgctgcagtcggactgtgtggtccaggaaggaaaatcacctcggcagtgtttgaaggaaggatactgcaactctttgaagtacgcattttttgagtgtaaaagatcagtgttggataacagggcaagattcagaggaagaaaaggatattgatgcattatgtataaagtaaatgattctcttgatccaagttatttttagaagaaaaacctaattgaacaggtatgggttgggagcataataaatgtgttttgagaattgttctaaagcacagaaaatggaaagactgttatttgcaaacttgactcttcaattgaattacccaattagtacaggccactgatttgactgacacagtcgataacatgcagcctatccagaaggtgtctgttgggaaagtttaggataaaactttttctttagttcagtcttttcctgtctagttctaaaatgaattgtgtttgattccttagagaagaaatacttcatttgtgctctgattcactgaagtaataacctcagcactttaatagcgtccacaggcatagctgatgctaggccccagattgtgttgcccaggctctttaccatcatcttcggactgtttttgtttcctggttacattttcagtctggcccgctctacataatgggccagtgtcagctccaagtccacatccttattatccatgattcaaaagggagagagagaacttcctttttcagggtccacaaatcaaatctataaaaggactctggtcttcccaggatcacctgcccttgcattggaccagtccctgtggaagaggggatgggggcctgtgatcttggccaggcctgggctatctatctgcactgtcattgctaactcctgtcagaatcacatggatgagtagtgggctgaatcccaaaaggaaaggggtttagagcaagtggaaacaacagatgttcactatagaaagcaagaatgaaaaccatgaagtggttgaagattagccttacagtaattttattctgatcacttaatacagtagagtcaaacaggaatccaagtttccaactttattatttttggcactgaagaattacaaagaactctagcgtctttatacctccgtggttcactggagttaaagcaatcggggcgttgtacagctcacttgagtttttaaaggttctactaaaaagtgagaattccacagcaatatgggtcattgttgcagaatatcacaaaggtctgttgtgtatactccttttcaccaggaaagggacaataatagtttttttcaatgtatatatatataagtgatctaactttttattaataaaagtaaacaactctaaaatgt

SEQ ID NO: 3586 - protein, 194 aa, Homo sapiens; identical to SEQ ID NO: 3576

SEQ ID NO: 3587 - DNA, 479 bp, Homo sapiens
tcactcatcatagggtatcttcgtctccactaacagcttccagatccactgactcttcatcagaatcacctagaagtggaaggaaaatcacctcggcagtgtttgaaggaaggatactgcaactctttgaagtacgcattttttgagtgtaaaagatcagtgttggataacagggcaagattcagaggaagaaaaggatattgatgcattatgttgaagccaacatggaaaacaacaaatattttccctggtcattaacacaaagaagccaaaacaggaaacatactttttactacatctgtttggttggaccagatttcccctccgtggaacactgaagaaagtggatgagttgttttcgaatatgtataaagtaaatgattctcttgatccaagttatttttagaagaaaaacctaattgaacaggtatgggttgggagcataataaatgtgttttgagaattgttctaaagcacag

SEQ ID NO: 3588 - protein, 44 aa, Homo sapiens
MHYVEANMENNKYFPWSLTQRSQNRKHTFYYICLVGPDFPSVEH

SEQ ID NO: 3589 - DNA, 645 bp, Homo sapiens
ggcttccggtcccctgagactggggcctcgctcgctcccgacccggttgcaagtgttgcggtgggagaaagtcgcgtccgcatcggaggggaagcgccgtcatgcctaagtattatgaggacaagccgcagggcggcgcgtgcgcgggcctgaaggaggacctgggcgcgtgtctgctgcagtcggactgtgtggtccaggtagcgcggccgggcgctcccggtggtgacgacccctgtcccaggaaggaaaatcacctcggcagtgtttgaaggaaggatactgcaactctttgaagtacgcattttttgagtgtaaaagatcagtgttggataacagggcaagattcagaggaagaaaaggatattgatgcattatgttgaagccaacatggaaaacaacaaatattttccctggtcattaacacaaagaagccaaaacaggaaacatactttttactacatctgtttggttggaccagatttcccctccgtggaacactgaagaaagtggatgagttgttttcgaatatgtataaagtaaatgattctcttgatccaagttatttttagaagaaaaacctaattgaacaggtatgggttgggagcataataaatgtgttttgagaattgttctaaagcacag

SEQ ID NO: 3590 - protein, 56 aa, Homo sapiens; identical to SEQ ID NO: 3572

SEQ ID NO: 3591 - DNA, 610 bp, Homo sapiens
gttgccgctggcttccggtcccctgagactggggcctcgctcgctcccgacccggttgcaagtgttgcggtgggagaaagtcgcgtccgcatcggaggggaagcgccgtcatgcctaagtattatgaggacaagccgcagggcggcgcgtgcgcgggcctgaaggaggacctgggcgcgtgtctgctgcagtcggactgtgtggtccaggaaggaaaatcacctcggcagtgtttgaaggaaggatactgcaactctttgaagtacgcattttttgagtgtaaaagatcagtgttggataacagggcaagattcagaggaagaaaaggatattgatgcattatgttgaagccaacatggaaaacaacaaatattttccctggtcattaacacaaagaagccaaaacaggaaacatactttttactacatctgtttggttggaccagatttcccctccgtggaacactgaagaaagtggatgagttgttttcgaatatgtataaagtaaatgattctcttgatccaagttatttttagaagaaaaacctaattgaacaggtatgggttgggagcataataaatgtgttttgagaattgttctaaagcacag

SEQ ID NO: 3592 - protein, 74 aa, Homo sapiens; identical to SEQ ID NO: 299

SEQ ID NO: 3593 - DNA, 706 bp, Homo sapiens
atggcctattcacacagatccatcagcgcactgccagcaagcttctcggtcactagaatgagattaaaaaaccaagaaaaactccgatccctagtgttttacatccggaatagttcagcagagggagcggtagcgtcggagtccaatccaaccggtccgagctccggggaacgccggccactgcccggctgcccgtctcccctccacttcgcaggccccccagacgccggcagggtctggccgagcccagctgctccctccctgcccggggccgcggactggggcctcgctcgctcccgacccggttgcaagtgttgcggtgggagaaagtcgcgtccgcatcggaggggaagcgccgtcatgcctaagtattatgaggacaagccgcagggcggcgcgtgcgcgggcctgaaggaggacctgggcgcgtgtctgctgcagtcggactgtgtggtccaggaaggaaaatcacctcggcagtgtttgaaggaaggatactgcaactctttgaagtacgcattttttgagtgtaaaagatcagtgttggataacagggcaagattcagaggaagaaaaggatattgatgcattatgtataaagtaaatgattctcttgatccaagttatttttagaagaaaaacctaattgaacaggtatgggttgggagcataataaatgtgttttgagaattgttctaaagcacag

SEQ ID NO: 3594 - protein, 194 aa, Homo sapiens; identical to SEQ ID NO: 3576

SEQ ID NO: 3595 - DNA, 1517 bp, Homo sapiens
cagaagttctacacctgtttcccacacattccagtggctagaacttagtcacaggaccacagctagatgcaagggcgtctaggagatctcacccagccatatgctggataaaaaggaagagcagacagctagcagtctgttatttggggtggagtggataacgaatgactgtctcttagctttagtgtatctagatggatctttaccccaggcagttgacaatataggttgaaagcttttgaaaaaggtagcatcttagatacagtttgaagaggcatcagcttataaactatagttataaccttttatatggttagtcttcttttgtctgcctccacgtcgttcatgtgggcaacacatcccaccagcagaattgcagagtttggagaggaaggaaacctgctactcttatccacttttgagagtcactgaggtagatgacatttgatatctaggacccaggcagacatacagactggaaggtggccaagactcctggggaacaggaataccacagacatagtaccctgtagcttttcataggaaaaactggcagagcgtgcctggcacttgcaacataaaggttctggggagtggctgcagtgatgcggctgtagagtcaaaatctgcttgagggaaaatccctgattatgcagagcagatgagctttgggttatattttttctggtgcatgaatgggccacatgtttctatttaagtagtattccagcctgccttgttaatatctttgtgaagtgtttcgtgccaacactaaaaatattctgattttagggtacccagttcacacatttcacccataaggaaatgaagataaccctttctagatttttatataaacagtttaaggaaaagtatccaatagaaaccagtgttttcaagaattcaacagtgtccttaaagttcccaagttactttacaatttttttttcattctttaggcaccaatagcccaaatgaattaagaactatttcctacataactttctattttcctcctttaacacttttaaaaaggactattttcagaaggacaattattttgtactttgtgagaaaatttccaaggtgtttatattgttttatgtgtctgtcataggaaggaaaatcacctcggcagtgtttgaaggaaggatactgcaactctttgaagtacgcattttttgagtgtaaaagatcagtgttggataacagggcaagattcagaggaagaaaaggatattgatgcattatgttgaagccaacatggaaaacaacaaatattttccctggtcattaacacaaagaagccaaaacaggaaacatactttttactacatctgtttggttggaccagatttcccctccgtggaacactgaagaaagtggatgagttgttttcgaatatgtataaagtaaatgattctcttgatccaagttatttttagaagaaaaacctaattgaacaggtatgggttgggagcataataaatgtgttttgagaattgttctaaagcaca

SEQ ID NO: 3596 - protein, 47 aa, Homo sapiens
MKITLSRFLYKQFKEKYPIETSVFKNSTVSLKFPSYFTIFFSFFRHQ

SEQ ID NO: 3597 - DNA, 2174 bp, Homo sapiens
tccgcggcggaagtcggttcccgtgacgcggcgcgccccaagggccggctccgttgagggaagggaagcccgcccggtggcggctggggtcggctgctgggaggaggtggtgggctggttcggacgtgggtcgaggctgtagcaggactccaggtgaggcctgaggaccactctgccctcccgcggcccgggctcgcgccgggggccatttaatcccgacagcttgcggcctgacgtcgctgcggcctggcagtgaccatgtcggcgtccggcccctcggccggcgatagagttgcggctaaaatgaaaggacgcccagttacatttgcatcgtagataaagaaagagcatttagtataagcatgtccgaaatgttgcgtgggatgtaggcatactaaaaccttattcgtggcctgtctgaaatccaaatggagctgggtattctgtgtttttatttgctaaatctggcagccgtacccgcggccccgggcagggagggagcagctgggctcggccagaccctgccggcgtctggggggcctgcgaagtggaggggagacgggcagccgggcagtggccggcgttccccggagctcggaccggttggattggactccgacgctaccgctccctctgctgaactattccggatgtaaaacactagggatcggagtttttcttggttttttaatctcattctagtgaccgagaagcttgctggcagtgcgctgatggatctgtgtgaataggccatttatttgacctcttcagtaacactgttctaaccggctgaaactgctttcttaggcattttcttaaaagcttggtggttaagagcacggaatttcgagtcagatttccaatcttggctctatcactatcctcggagtcatggggcagtcacatcatccctgtctctgtaatggtagctgcccctggataagtgttattaggtgattcagaagggtgggctgttgcccttgcctgaggttgcagtctgcggttcccaagccccaagacccgcctcagaactaactgcatttgcttttgactcctggcctttctctagggttgggaagaacatggaaagtgacctccctgccaaataactcagaagaggagtgtcggtagccaaatgtttcttcagaatacgtgtaaaagaaatgtttttcttccatctaggaagatgttaccgagtacttcagtgaattccttagtgcaggggaacggagtcttgaattccagggatgcggcaagacacacagccggagcgaaacgctacaaatatctgagaaggcttttccgctttcggcaaatggactttgaatttgctgcctggcagatgctctacctgttcacatccccacagagagtttacagaaattttcattatcgaaaacagacgaaggaccagtgggccagagatgaccctgctttcttggtcctgttaagtatctggctctgtgtgtccactataggatttggctttgtgctggacatgggattctttgagacaataaagcttctcctttgggttgtactcatagattgtgtaggcgttggtcttctgatagcaactttaatgtggttcatctctaacaagtatttagtgaaacgacagagcagagactatgatgtggaatggggctatgcttttgatgtgcatctcaatgctttttatccactcctggtcattttgcattttatccagctttttttcatcaaccatgttatcctgacagacacatttattggatatttagttggaaataccttatggttggttgcagttggctattatatctatgtaactttcctgggatacagtgcattgccatttttgaaaaatacagtaattcttctgtatccatttgcacctctgattctgctctacgggctttccctggcactgggatggaacttcacccatactctctgttctttctataagtacagagtgaaataaaaagtgagaagaagattcaatcgtaactgtgtcaacagtattgtgaagtgatcatttcttgtaaaacttgtaaataaactatcatctttgtagatatcttaaaggtgtaaagtttgcaaatttgaagaaatatatattaacactgtggtcaggtacattccttaaaactaattaaatgtacatttctataataaatattttttaaact

SEQ ID NO: 3598 - protein, 276 aa, Homo sapiens
MFLQNTCKRNVFLPSRKMLPSTSVNSLVQGNGVLNSRDAARHTAGAKRYKYLRRLFRFRQMDFEFAAWQMLYLFTSPQRVYRNFHYRKQTKDQWARDDPAFLVLLSIWLCVSTIGFGFVLDMGFFETIKLLLWVVLIDCVGVGLLIATLMWFISNKYLVKRQSRDYDVEWGYAFDVHLNAFYPLLVILHFIQLFFINHVILTDTFIGYLVGNTLWLVAVGYYIYVTFLGYSALPFLKNTVILLYPFAPLILLYGLSLALGWNFTHTLCSFYKYRVK

SEQ ID NO: 3599 - DNA, 1140 bp, Homo sapiens
ggcggaagtcggttcccgtgacgcggcgcgccccaagggccggctccgttgagggaagggaagcccgcccggtggcggctggggtcggctgctgggaggaggtggtgggctggttcggacgtgggtcgaggctgtagcaggactccaggaagatgttaccgagtacttcagtgaattccttagtgcaggggaacggagtcttgaattccagggatgcggcaagacacacagccggagcgaaacgctacaaatatctgagaaggcttttccgctttcggcaaatggactttgaatttgctgcctggcagatgctctacctgttcacatccccacagagagtttacagaaattttcattatcgaaaacagacgaaggaccagtgggccagagatgaccctgctttcttggtcctgttaagtatctggctctgtgtgtccactataggatttggctttgtgctggacatgggattctttgagacaataaagcttctcctttgggttgtactcatagattgtgtaggcgttggtcttctgatagcaactttaatgtggttcatctctaacaagtatttagtgaaacgacagagcagagactatgatgtggaatggggctatgcttttgatgtgcatctcaatgctttttatccactcctggtcattttgcattttatccagctttttttcatcaaccatgttatcctgacagacacatttattggatatttagttggaaataccttatggttggttgcagttggctattatatctatgtaactttcctgggatacagtgcattgccatttttgaaaaatacagtaattcttctgtatccatttgcacctctgattctgctctacgggctttccctggcactgggatggaacttcacccatactctctgttctttctataagtacagagtgaaataaaaagtgagaagaagattcaatcgtaactgtgtcaacagtattgtgaagtgatcatttcttgtaaaacttgtaaataaactatcatctttgtagatatcttaaaggtgtaaagtttgcaaatttgaagaaatatatattaacactgtggtcaggtacattccttaaaactaattaaatgtacatttctataataaatattttttaaact

SEQ ID NO: 3600 - protein, 259 aa, Homo sapiens; identical to SEQ ID NO: 301

SEQ ID NO: 3601 - DNA, 1337 bp, Homo sapiens
ggcggaagtcggttcccgtgacgcggcgcgccccaagggccggctccgttgagggaagggaagcccgcccggtggcggctggggtcggctgctgggaggaggtggtgggctggttcggacgtgggtcgaggctgtagcaggactccaggaagatgttaccgagtacttcagtgaattccttagtgcaggggaacggagtcttgaattccagggatgcggcaagacacacagccggagcgaaacgctacaaatatctgagaaggcttttccgctttcggcaaatggactttgaatttgctgcctggcagatgctctacctgttcacatccccacagagagtttacagaaattttcattatcgaaaacagacgaaggaccagtgggccagagatgaccctgctttcttggtcctgttaagtatctggctctgtgtgtccactataggatttggctttgtgctggacatgggattctttgagacaataaagcttctcctttgggttgtactcatagattgtgtaggcgttggtcttctgatagcaactttaatgtggttcatctctaacaagtatttagtgaaacgacagagcagagactatgatgtggaatggggctatgcttttgatgtgcatctcaatgctttttatccactcctggtcattttgcattttatccagctttttttcatcaaccatgttatcctgacagacacatttattggatatttagttggaaataccttatggttggttgcagttggctattatatctatgtaactttcctgggatacagtgcattgccatttttgaaaaatacagtaattcttctgtatccatttgcacctctgattctgctctacgggctttccctggcactgggatggaacttcacccatactctctgttctttctataagtacagagtgaaataaaaagtgagaagaagattcaatcgtaactgtgtcaacagtattgtgaagtgatcatttcttgtaaaacttgtaaataaactatcatctttgtagatatcttaaaggtgtaaagtttgcaaatttgaagaaatatatattaacactgtggtcaggtacattccttaaaactaattaaatgtacatttctataataaatattttttaaactaaagcatgtgtgttcactctaatatttgcaaatgtaagagctacatgtaaaatgctaatggcatggggaaaacataaacataaaacaatatgaattatttttgaaagagtatcatctagttggagaacaagggaataatcatacagccccatcgctctcctattgacaaagatgcataatctccatttctaattagc

SEQ ID NO: 3602 - protein, 259 aa, Homo sapiens; identical to SEQ ID NO: 301

SEQ ID NO: 3603 - DNA, 1026 bp, Homo sapiens
agtcggttcccgtgacgcggcgcgccccaagggccggctccgttgagggaagggaagcccgcccggtggcggctggggtcggctgctgggaggaggtggtgggctggttcggacgtgggtcgaggctgtagcaggactccaggaagatgttaccgagtacttcagtgaattccttagtgcaggggaacggagtcttgaattccagggatgcggcaagacacacagccggagcgaaacgctacaaatatctgagaaggcttttccgctttcggcaaatggactttgaatttgctgcctggcagatgctctacctgttcacatccccacagagagtttacagaaattttcattatcgaaaacagacgaaggaccagtgggccagagatgaccctgctttcttggtcctgttaagtatctggctctgtgtgtccactataggatttggctttgtgctggacatgggattctttgagacaataaagcttctcctttgggttgtactcatagattgtgtaggcgttggtcttctgatagcaactttaatgtggttcatctctaacaagtatttagtgaaacgacagagcagagactatgatgtggaatggggctatgcttttgatgtgcatctcaatgctttttatccactcctggtcattttgcattttatccagctttttttcatcaaccatgttatcctgacagacacatttattggatatttagttggaaataccttatggttggttgcagttggctattatatctatgtaactttcctgggatacagtgcattgccatttttgaaaaatacagtaattcttctgtatccatttgcacctctgattctgctctacgggctttccctggcactgggatggaacttcacccatactctctgttctttctataagtacagagtgaaataaaaagtgagaagaagattcaatcgtaactgtgtcaacagtattgtgaagtgatcatttcttgtaaaacttgtaaataaactatcatctttgtagatatctt

SEQ ID NO: 3604 - protein, 259 aa, Homo sapiens; identical to SEQ ID NO: 301

SEQ ID NO: 3605 - DNA, 1273 bp, Homo sapiens
ggcccctcggccggcgatagagttgcggctaaaatgaaaggacgcccagttacatttgcatcgtagataaagaaagagcatttagtataagcatgtccgaaatgttgcgtgggatgtaggcatactaaaaccttattcgtggcctgtctgaaatccaaatggagctggggttgggaagaacatggaaagtgacctccctgccaaataactcagaagaggagtgtcggtagccaaatgtttcttcagaatacgtgtaaaagaaatgtttttcttccatctaggaagatgttaccgagtacttcagtgaattccttagtgcaggggaacggagtcttgaattccagggatgcggcaagacacacagccggagcgaaacgctacaaatatctgagaaggcttttccgctttcggcaaatggactttgaatttgctgcctggcagatgctctacctgttcacatccccacagagagtttacagaaattttcattatcgaaaacagacgaaggaccagtgggccagagatgaccctgctttcttggtcctgttaagtatctggctctgtgtgtccactataggatttggctttgtgctggacatgggattctttgagacaataaagcttctcctttgggttgtactcatagattgtgtaggcgttggtcttctgatagcaactttaatgtggttcatctctaacaagtatttagtgaaacgacagagcagagactatgatgtggaatggggctatgcttttgatgtgcatctcaatgctttttatccactcctggtcattttgcattttatccagctttttttcatcaaccatgttatcctgacagacacatttattggatatttagttggaaataccttatggttggttgcagttggctattatatctatgtaactttcctgggatacagtgcattgccatttttgaaaaatacagtaattcttctgtatccatttgcacctctgattctgctctacgggctttccctggcactgggatggaacttcacccatactctctgttctttctataagtacagagtgaaataaaaagtgagaagaagattcaatcgtaactgtgtcaacagtattgtgaagtgatcatttcttgtaaaacttgtaaataaactatcatctttgtagatatcttaaaggtgtaaagtttgcaaatttgaagaaatatatattaacactgtggtcaggtacattccttaaaactaattaaatgtacatttctataataaatattttttaaact

SEQ ID NO: 3606 - protein, 276 aa, Homo sapiens; identical to SEQ ID NO: 3598

SEQ ID NO: 3607 - DNA, 826 bp, Homo sapiens
gtcagccttccttcctagatggaaggcagggatttttgtctgttttgtttactggtatatctccagaatttagaatgtctgccgcatagaaagtcgtcagtaaacatttacagaattcattttattatgaaagaaattttaattttgctcttaggttcatctctaacaagtatttagtgaaacgacagagcagagactatgatgtggaatggggctatgcttttgatgtgcatctcaatgctttttatccactcctggtcattttgcattttatccagctttttttcatcaaccgtaagtagcagttaattagagtattatccaagtcttcattgcatgcattggtaaagggactcatggtctgcgtctcttctggcagatgttatcctgacagacacatttattggatatttagttggaaataccttatggttggttgcagttggctattatatctatgtaactttcctgggatacagtgcattgccatttttgaaaaatacagtaattcttctgtatccatttgcacctctgattctgctctacgggctttccctggcactgggatggaacttcacccatactctctgttctttctataagtacagagtgaaataaaaagtgagaagaagattcaatcgtaactgtgtcaacagtattgtgaagtgatcatttcttgtaaaacttgtaaataaactatcatctttgtagatatcttaaaggtgtaaagtttgcaaatttgaagaaatatatattaacactgtggtcaggtacattccttaaaactaattaaatgtacatttctataataaatattttttaaact

SEQ ID NO: 3608 - protein, 81 aa, Homo sapiens
MVCVSSGRCYPDRHIYWIFSWKYLMVGCSWLLYLCNFPGIQCIAIFEKYSNSSVSICTSDSALRAFPGTGMELHPYSLFFL

SEQ ID NO: 3609 - DNA, 1023 bp, Homo sapiens
gtcagccttccttcctagatggaaggcagggatttttgtctgttttgtttactggtatatctccagaatttagaatgtctgccgcatagaaagtcgtcagtaaacatttacagaattcattttattatgaaagaaattttaattttgctcttaggttcatctctaacaagtatttagtgaaacgacagagcagagactatgatgtggaatggggctatgcttttgatgtgcatctcaatgctttttatccactcctggtcattttgcattttatccagctttttttcatcaaccgtaagtagcagttaattagagtattatccaagtcttcattgcatgcattggtaaagggactcatggtctgcgtctcttctggcagatgttatcctgacagacacatttattggatatttagttggaaataccttatggttggttgcagttggctattatatctatgtaactttcctgggatacagtgcattgccatttttgaaaaatacagtaattcttctgtatccatttgcacctctgattctgctctacgggctttccctggcactgggatggaacttcacccatactctctgttctttctataagtacagagtgaaataaaaagtgagaagaagattcaatcgtaactgtgtcaacagtattgtgaagtgatcatttcttgtaaaacttgtaaataaactatcatctttgtagatatcttaaaggtgtaaagtttgcaaatttgaagaaatatatattaacactgtggtcaggtacattccttaaaactaattaaatgtacatttctataataaatattttttaaactaaagcatgtgtgttcactctaatatttgcaaatgtaagagctacatgtaaaatgctaatggcatggggaaaacataaacataaaacaatatgaattatttttgaaagagtatcatctagttggagaacaagggaataatcatacagccccatcgctctcctattgacaaagatgcataatctccatttctaattagc

SEQ ID NO: 3610 - protein, 81 aa, Homo sapiens; identical to SEQ ID NO: 3608

SEQ ID NO: 3611 - DNA, 4465 bp, Homo sapiens
gcaaacattacaaaccaatgccatttttcaaatgcactgccatttaagattgattatagatggatttcttaattgaagtacttttataatcacagtgactgaacaaaatattttcaaagacatttgtcattccttaaagccaagattttaaagactaatgtccttcctgagggttactttactatactgtgtatggtgtatagccacagaaagtcagtctgataaattttcaatgtgtaagtgtgatgcattcaacccagattattgtagacttaacttattatatttcctctgatatgtaaaatgacaaactcttctttcctttttaatctttgtctttaatccatgaattaggtgcattatctgctgttgattcttttatatctgcactcattttatgacgtcagacaaaatgttttctaggtgttgctattgtatgagtcataattggtataattttaaagaaaattgtaatattgttttttggtgaaatatattattagtagtatattttccaaaatgattttattgtagtatgaactgataagtgagtcccgtgtccaagagactgtatttattactcttaaacacgctattccaaatgatattactactataaacaaagaatattaccggtctcagcaatcagtgatctttataaaatgctgggattataggtgtgtgccaccatgtccagccccctttctctctcttaactccctctccctgctgtcgttgccatactcttgcatacacaatcggttgtctagtttttgattgtttgtgtgtatggtgtgtgctgtctctctgaccagatttcaggttcctgaggcgagcctgcagctcatactgctcatctgtcctctcctatggtgggtgctcagggcctctcactgttagttactccctcctttctgcccagttctgcactcaactagtagaagcagccatcctttccccaagcaggaaattgtagtggtcgcccttaagagcagtgtgagggcagaagattaagggaggggaagagtccctggaactggaagaaggtaaatactttgccttgagagggcgccgaatcattttaccaaaatagtaaatggaaaaagtgtcaaaggttgggactagttttaaaaacacatatagccagtagacacatgggggctgtttaaataaaaacatttttttacccggttctgccatcacacacactagtgacattccaagtactcagtggccatgtggagctagtggccaccacacttgacaccacggatgcagaacttttccatcactgcagaaagctctgttgaacagtactgtgtccagagtgctaattatgaacagcttagaaaccacaattaatacattctcatgaggttaaaagcagacatgggaatagaacataatgcaaatgatgatgaatattttgggtgagaagagaaagctgaggacccatttctaggattctaagatgtaagatttcttaagttctttatcttagtctcatgcattctccacatcacgcgctgtaccatactgtgtagtcagaacagacagtgtgattgaaaagctttggaaaaagttaacacaaaggattatttagcacataggctgtagatacgtatgtgtgtatttgttcaacaattggagatggttgaatacccttgaacaaagtgtgtatcttctcaaatcagtggttgcactagtcaataattagaaggtgttgttatttttaaaactataagcaaaattatgaaggcctttaaaaaatctatcataataatgaaaaagaggttgtctcccaacagtgctgtccctcaaagaaaagactggttatgtggaaacagcacgtttggagagattattctagtgaataacagtgtatatttgtggtaggcaaatttctaagaatgacccctactgacacccccaccaatgaccttgtataatatcctcccactttgagcatgggtggaacctgtttgatccatgattatatcatgttatgtagcaaaaggaagactgtctgggggtggctaatcaaatcttgtgactcctttaaaagcagagagttttctcgggctggtggcagaagtcaagagacaaagcagaaggacctcaggcaccattgctgttttaaggtagagggggctgcatgagaaggaatgcacatggctttgaggagctgagagaggccttggctaacagcaaaggagctgggaactgcagtcctacagccacgggaactgaattcagcccataagctcattcataggcttggaaaggcattcatctccagtctccagataagacccagcctggccaacactttgaatccagccttgtgagaccctaagccgagaactcacttaagcctgcttggacttctgacctacagaactatgagataataaatcagtggtgttttaagctgctaaatttgtggcaatttgttatgtaggaataggaaatgaatacagtattttaaaagaggtaaagaggaaatcttcatacttgattccctgtagtatgctggatatttcttggtaaatgcatgaataaagtctttagtagcaagtcatgtacctggaccttgttggggatgttctcgccagagatctcaattagtcttcattggacgtttgttggcaaagttgcagcatcttactgagtagcgtttggtaaaggaactgctagaatgagactataggaataggactgaaacagtgtgtaagggatcttttttatttctagaagaggtgttactttatactgatttagactgctctgagcctgtcagaagtaaattcaagaatgattaacagtggtattttagatacattaagagcaaaaataacctttgccttgtagagatcagataatctgtgtatcgagggatttaattttttttaaccaaaacttagtttctctttttatcatctagcacagatcaaatcctgtatgggccagccaaatgtttgtagtttgagaatgttttgcaaatacctctctgcttccaagccattaatagctaatgaagttttattttggtttgtccattaatttttctgcttatttttactgtattgccatgtccttgatacgagacaagtagaactaaaagagagaaaatgagaggttaagactgtcagaagatgagaaatgtgagtcataaccataccttagtgttttaagggaactttatccagtccaatccctttatagaaaaggaacttttccaagttatgttgcagtatttatagtgtgtaaaattttgtttgactttggtagttgtgcattttaaattatgaatcttatatgctacgataactagtatgcttactttctttaatgcatgtgatcatacaatgctaaaaaggtattttttaaagacccaaccaaactgaggattttgttatacatatctgtatcaacacctatatataaactcttcttcttacctgaaacactccttcacccggtttgggcactaactagatcattttcaaaggaacaaacaggaaggagcaagctggcactccagggtgcatctgagctgagaatttagaagacctcattcaagaaagtaaactgagcattgatgggaaagcactttgcgcgaagtaacattcccactgttaatgttgcagtcaaaattgtggaaaaaaaaaagtggtgctaaaattgttctgaaatgaagattgtttgttgtggggaatattttaatactcttggactttagggaggctattttatgtgtcacttgctcctagttgtttcattgtattagtaattagcaaactgtcctggaaccaagggtttggtacttttgcctgattagcattccattatttatttgaaatgctcagtgtttgctcaaatttggtgaaaatatcttttgaagacatattctctgagccttaaaaatggctgctatcgacagtactgtaagatgcactgccagtagatttgatacttttcatttcagtgtaggcagtaatgttttctaagaaagatttagaaatcagcaaagtgtaacaattgtgtttcatttatggaatggaaaaactgaagtgtcccattcagaacactttggaaaggttgtctgcattaggggatgtttctggaagcatcccttagagaagctgcctgaggaatctccttgccaggttgtaccagatttttttttttcttaaatgtattgtatatattttccttaaaatgtcttcattggctgaatgattcctatccgtagtaatattttaggtacttgttggatttttaaaggaagattatttattttcagatttgctgctataattgaaaacctagtaactggtcctgttgattgtgccttcatcactgtttctctgtgccacgaccgttcatgtgtatttgaaataaagaagtttaaaaagccatgttgaattcaagattccttctaataaaaataggtgaaacttaa

SEQ ID NO: 3612 - protein, 63 aa, Homo sapiens
MGGTCLIHDYIMLCSKRKTVWGWLIKSCDSFKSREFSRAGGRSQETKQKDLRHHCCFKVEGAA

SEQ ID NO: 3613 - DNA, 4422 bp, Homo sapiens
gcaaacattacaaaccaatgccatttttcaaatgcactgccatttaagattgattatagatggatttcttaattgaagtacttttataatcacagtgactgaacaaaatattttcaaagacatttgtcattccttaaagccaagattttaaagactaatgtccttcctgagggttactttactatactgtgtatggtgtatagccacagaaagtcagtctgataaattttcaatgtgtaagtgtgatgcattcaacccagattattgtagacttaacttattatatttcctctgatatgtaaaatgacaaactcttctttcctttttaatctttgtctttaatccatgaattaggtgcattatctgctgttgattcttttatatctgcactcattttatgacgtcagacaaaatgttttctaggtgttgctattgtatgagtcataattggtataattttaaagaaaattgtaatattgttttttggtgaaatatattattagtagtatattttccaaaatgattttattgtagtatgaactgataagtgagtcccgtgtccaagagactgtatttattactcttaaacacgctattccaaatgatattactactataaacaaagaatattaccggtctcagcaatcagtgatctttataaaatgctgggattataggtgtgtgccaccatgtccagccccctttctctctcttaactccctctccctgctgtcgttgccatactcttgcatacacaatcggttgtctagtttttgattgtttgtgtgtatggtgtgtgctgtctctctgaccagatttcaggttcctgaggcgagcctgcagctcatactgctcatctgtcctctcctatggtgggtgctcagggcctctcactgttagttactccctcctttctgcccagttctgcactcaactagtagaagcagccatcctttccccaagcaggaaattgtagtggtcgcccttaagagcagtgtgagggcagaagattaagggaggggaagagtccctggaactggaagaaggtaaatactttgccttgagagggcgccgaatcattttaccaaaatagtaaatggaaaaagtgtcaaaggttgggactagttttaaaaacacatatagccagtagacacatgggggctgtttaaataaaaacatttttttacccggttctgccatcacacacactagtgacattccaagtactcagtggccatgtggagctagtggccaccacacttgacaccacggatgcagaacttttccatcactgcagaaagctctgttgaacagtactgtgtccagagtgctaattatgaacagcttagaaaccacaattaatacattctcatgaggttaaaagcagacatgggaatagaacataatgcaaatgatgatgaatattttgggtgagaagagaaagctgaggacccatttctaggattctaagatgtaagatttcttaagttctttatcttagtctcatgcattctccacatcacgcgctgtaccatactgtgtagtcagaacagacagtgtgattgaaaagctttggaaaaagttaacacaaaggattatttagcacataggctgtagatacgtatgtgtgtatttgttcaacaattggagatggttgaatacccttgaacaaagtgtgtatcttctcaaatcagtggttgcactagtcaataattagaaggtgttgttatttttaaaactataagcaaaattatgaaggcctttaaaaaatctatcataataatgaaaaagaggttgtctcccaacagtgctgtccctcaaagaaaagactggttatgtggaaacagcacgtttggagagattattctagtgaataacagtgtatatttgtggtaggcaaatttctaagaatgacccctactgacacccccaccaatgaccttgtataatatcctcccactttgagcatgggtggaacctgtttgatccatgattatatcatgttatgtagcaaaaggaagactgtctgggggtggctaatcaaatcttgtgactcctttaaaagcagagagttttctcgggctggtggcagaagtcaagagacaaagcagaaggacctcaggcaccattgctgttttaaggtagagggggctgcatgagaaggaatgcacatggctttgaggagctgagagaggccttggctaacagcaaaggagctgggaactgcagtcctacagccacgggaactgaattcagcccataagctcattcataggcttggaaaggcattcatctccagtctccagataagacccagcctggccaacactttgaatccagccttgtgagaccctaagccgagaactcacttaagcctgcttggacttctgacctacagaactatgagataataaatcagtggtgttttaagctgctaaatttgtggcaatttgttatgtaggaataggaaatgaatacagtattttaaaagaggtaaagaggaaatcttcatacttgattccctgtagtatgctggatatttcttggtaaatgcatgaataaagtctttagtagcaagtcatgtacctggaccttgttggggatgttctcgccagagatctcaattagtcttcattggacgtttgttggcaaagttgcagcatcttactgagtagcgtttggtaaaggaactgctagaatgagactataggaataggactgaaacagtgtgtaagggatcttttttatttctagaagaggtgttactttatactgatttagactgctctgagcctgtcagaagtaaattcaagaatgattaacagtggtattttagatacattaagagcaaaaataacctttgccttgtagagatcagataatctgtgtatcgagggatttaattttttttaaccaaaacttagtttctctttttatcatctagcacagatcaaatcctgtatgggccagccaaatgtttgtagtttgagaatgttttgcaaatacctctctgcttccaagccattaatagctaatgaagttttattttggtttgtccattaatttttctgcttatttttactgtattgccatgtccttgatacgagacaagtagaactaaaagagagaaaatgagaggttaagactgtcagaagatgagaaatgtgagtcataaccataccttagtgttttaagggaactttatccagtccaatccctttatagaaaaggaacttttccaagttatgttgcagtatttatagtgtgtaaaattttgtttgactttggtagttgtgcattttaaattatgaatcttatatgctacgataactagtatgcttactttctttaatgcatgtgatcatacaatgctaaaaaggtattttttaaagacccaaccaaactgaggattttgttatacatatctgtatcaacacctatatataaactcttcttcttacctgaaacactccttcacccggtttgggcactaactagatcattttcaaaggaacaaacaggaaggagcaagctggcactccagggtgcatctgagctgagaatttagaagacctcattcaagaaagtaaactgagcattgatgggaaagcactttgcgcgaagtaacattcccactgttaatgttgcagtcaaaattgtggaaaaaaaaaagtggtgctaaaattgttctgaaatgaagattgtttgttgtggggaatattttaatactcttggactttagggaggctattttatgtgtcacttgctcctagttgtttcattgtattagtaattagcaaactgtcctggaaccaagggtttggtacttttgcctgattagcattccattatttatttgaaatgctcagtgtttgctcaaatttggtgaaaatatcttttgaagacatattctctgagccttaaaaatggctgctatcgacagtactgtaagatgcactgccagtagatttgatacttttcatttcagtgtaggcagtaatgttttctaagaaagatttagaaatcagcaaagtgtaacaattgtgtttcatttatggaatggaaaaactgaagtgtcccattcagaacactttggaaaggttgtctgcattaggggatgtttctggaagcatcccttagagaagctgcctgaggaatctccttgccaggttgtaccagatttttttttttcttaaatgtattgtatatattttccttaaaatgtcttcattggctgaatgattcctatccgtagtaatattttaggtacttgttggatttttaaaggaagattatttattttcagatttgctgctataattgaaaacctagtaactggtcctgttgattgtgccttcatcactgtttctctgtgccacgaccgttcatgtgtatttgaaataaagaagtttaaaaagccat

SEQ ID NO: 3614 - protein, 63 aa, Homo sapiens; identical to SEQ ID NO: 3612

SEQ ID NO: 3615 - DNA, 3700 bp, Homo sapiens
cgcagcggcggcggcagcggcggcggcggctacagcagctccgccggcagccgcgggagcacggcgacgccagcggcgggaagggaaaaggccgaggcatcagcgtgtgaagaccgcaaagacgatcccgagtacagttgtgaacagcattgctgctaggctcctcctgcagatcatctgaaatgaacctctcttattgatttttattggcctagagccaggagtactgcattcagttgactttcagggtaaaaagaaaacagtcctggttgttgtcatcataaacatatggaccagtgtgatggtgaaatgagatgaggctccgcaatggaactgtagccactgctttagcatttatcacttccttccttactttgtcttggtatactacatggcaaaatgggaaagaaaaactgattgcttatcaacgagaattccttgctttgaaagaacgtcttcgaatagctgaacacagaatctcacagcgctcttctgaattaaatacgattgtgcaacagttcaagcgtgtaggagcagaaacaaatggaagtaaggatgcgttgaataagttttcagataataccctaaagctgttaaaggagttaacaagcaaaaaatctcttcaagtgccaagtatttattatcatttgcctcatttattgaaaaatgaaggaagtcttcaacctgctgtacagattggcaacggaagaacaggagtttcaatagtcatgggcattcccacagtgaagagagaagttaaatcttacctcatagaaactcttcattcccttattgataacctgtatcctgaagagaagttggactgtgttatagtagtcttcataggagagacagatattgattatgtacatggtgttgtagccaacctggagaaagaattttctaaagaaatcagttctggcttggtggaagtcatatcaccccctgaaagctattatcctgacttgacaaacctaaaggagacatttggagactccaaagaaagagtaagatggagaacaaagcaaaacctagattactgttttctaatgatgtatgctcaagaaaagggcatatattacattcagcttgaagatgatattattgtcaaacaaaattattttaataccataaaaaattttgcacttcaactttcttctgaggaatggatgattctagagttttcccagctgggcttcattggtaaaatgtttcaagcgccggatcttactctgattgtagaattcatattcatgttttacaaggagaaacccattgattggctcctggaccatattctctgggtgaaagtctgcaaccctgaaaaagatgcaaaacattgtgatagacagaaagcaaatctgcgaattcgcttcagaccttcccttttccaacatgttggtctgcactcatcactatcaggaaaaatccaaaaactcacggataaagattatatgaaaccattacttcttaaaatccatgtaaacccacctgcggaggtatctacttccttgaaggtctaccaagggcatacgctggagaaaacttacatgggagaggatttcttctgggctatcacaccgatagctggagactacatcttgtttaaatttgataaaccagtcaatgtagaaagttatttgttccatagcggcaaccaagaacatcctggagatattctgctaaacacaactgtggaagttttgccttttaagagtgaaggtttggaaataagcaaagaaaccaaagacaaacgattagaagatggctatttcagaataggaaaatttgagaatggtgttgcagaaggaatggtggatccaagtctcaatcccatttcagcctttcgactttcagttattcagaattctgctgtttgggccattcttaatgagattcatattaaaaaagccaccaactgatcatctgagaaaccaacacattttttcctgtgaatttgttaattaaagatagttaagcatgtatcttttttttatttctacttgaacactacctcttgtgaagtctactgtagataagacgattgtcatttccacttggaaagtgaatctcccataataattgtatttgtttgaaactaagctgtcctcagattttaacttgactcaaacatttttcaattatgacagcctgttaatatgacttgtactattttggtattatactaatacataagagttgtacatattgttacattctttaaatttgagaaaaactaatgttacatacattttatgaagggggtacttttgaggttcacttattttactattatagaccctcttttatagattatcagggattatatatataaatatataaatatacataaaaatgttatggaattaatttattagaaacacttaagaagtacatatttttgtgcagtagatttttgaatcgatactttttttgaaaaccagtttccttgcttttttaagttctttctatatttttctttggaaatgcaaacattacaaaccaatgccatttttcaaatgcactgccatttaagattgattatagatggatttcttaattgaagtacttttataatcacagtgactgaacaaaatattttcaaagacatttgtcattccttaaagccaagattttaaagactaatgtccttcctgagggttactttactatactgtgtatggtgtatagccacagaaagtcagtctgataaattttcaatgtgtaagtgtgatgcattcaacccagattattgtagacttaacttattatatttcctctgatatgtaaaatgacaaactcttctttcctttttaatctttgtctttaatccatgaattaggtgcattatctgctgttgattcttttatatctgcactcattttatgacgtcagacaaaatgttttctaggtgttgctattgtatgagtcataattggtataattttaaagaaaattgtaatattgttttttggtgaaatatattattagtagtatattttccaaaatgattttattgtagtatgaactgataagtgagtcccgtgtccaagagactgtatttattactcttaaacacgctattccaaatgatattactactataaacaaagaatattaccggtctcagcaatcagtgatctttataaaagtacttttaaaaaatgatgaattatcaccaggcgctgtggctcacgcctgtaatcccagcactttgggaggccgaggcgggcggatcacgaggtcaggagatcaagaccatcctggctaacacggtgaaaccctgtctctactaaaaatacaaaaaattagccaggcgtggtggcaggtgcctgtaatcccagctacttgggaggctgaggcaggagaatggcgtgaacccaggaggcagagctggcagtgagctgagatcgcaccactgcactccagcctgggcgacacagctagactccgtctcaaaaaaaaaaaaagatgaagtatcaacatcagttcccagccagtctgcttggacacactggggtgccacaagtgggttgcaggttggttgcagacgggcagagatggattctgctgagctttcagagtgaccactggctggggcctagcgctggggcaaggttccagctggctgcctctagcctggaggagcttcatctagttacccaatgtgctgaaccaacagcatgaaatagcatcattt

SEQ ID NO: 3616 - protein, 535 aa, Homo sapiens; identical to SEQ ID NO: 303

SEQ ID NO: 3617 - DNA, 682 bp, Homo sapiens
ctggagcggtttcattgcctacattccgcattggaaaatagaagcaggcacaatgaagggaaaaggccgaggcatcagcgtgtgaagaccgcaaagacgatcccgagtacagttgtgaacagcattgctgctaggctcctcctgcagatcatctgaaatgaacctctcttattgatttttattggcctagagccaggagtactgcattcagttgactttcagggtaaaaagaaaacagtcctggttgttgtcatcataaacatatggaccagtgtgatggtgaaatgagatgaggctccgcaatggaactgtagccactgctttagcatttatcacttccttccttactttgtcttggtatactacatggcaaaatgggaaaggtaaggaaaatgactcggaaaatgtgcatgaaatgtactagggtttttgcttggttaaggtgcctaaatgcttaggtcaaataccctggcaatctgcatgttacatgctatctgctggcagtttctttctgatataaaaatgaaacagtattcttggacagaggacacagaatttctaattccagtggggcttgttttgttttcagtttcttataattgtacttggagaaacagatactgatcagtgttttatattctaaaagacagccaagttgaataataaagactttcgttttggc

SEQ ID NO: 3618 - protein, 57 aa, Homo sapiens
MLRSNTLAICMLHAICWQFLSDIKMKQYSWTEDTEFLIPVGLVLFSVSYNCTWRNRY

SEQ ID NO: 3619 - DNA, 1777 bp, Homo sapiens
atagcagctacaggccagggcgagaggcctcagaggaaaccagtcctgctgactctttgaactcggacttccagcctccagaactgaaccactgtcttcctttatcccaggatgtctgcaaggaagaaaatgtcctttttctagcatttagaggccaccaacattgaataaccacactggggtagacacagcggcgaagagattcctgctgttcccatcacagcagccttggagatgagaagacagatggatctgaccagaagtctggagaacttcgagaaaaaaggaggaggacacaaaaggaaataacaaaaaagatgcatccggagcaactatgaggatggtaaattggtgtctaattctgaaaatcataattggtataaatgctatgtactgtggaaggagggatgaagggtagagggaataaaaaagaacatgaagttagaatccttggcatgaaagcctgccatttatacaagcaaacaaacaagatcagggactatcaactggctggctgaattggaccaataggcaggtttattcagccccacacttcaaaaattaggagatctccaaattaaaatctgggaatctgaccttttgtaacaaatcagaggatttgcaacaccaagagcatcatcacaggcaacgaccagcttggatgggcagcggctgcccctgcaggtgggtcaggtgctcttccgttggacacagtctccaccactccctgtcgcttgctccttgctccccatcagcataactgtttgggccttatagcatatgcatttatcactccctactaggacgtccacaacatgaaatgagagaacgatttggtaagttcaacaaaaggcatattatgcagccaccatacattctttgtggaaagagaagtggcataaatcaattcataaattatctcaagttgtttcctctggagtcctgggctggctgttggatgaattcatctgtcttctagcagatggacaagaaaattgaattgtagtggcccatcaggtgtcgatcgcagcctctgggtccgtgtaggtgagccctcaccacagagagaatgagagctggctctaggacggggtgttgatctgtgcacagctgcccgggaaagggcctagagagaggagctatgggtcctgcactgacatcagccttgaacatgaggctggcgtggcagcggcggcggggtggggggggacatgaataattcatatcgcaaccagattgatgctcagtgagcttcaataggaatgaattaccttgtgtgcatttcctgcctaaatgtcagtgtatcttttcacaagcgcctgggacgggtttatgaataggtgcattctctgatgcctctgctttaggcaaggcagtttcagaatcttggctgagtttccaacttctgacttgctatttacaaactgtaatcataagatttcaagtgacacatgactgaaaaaaaaaagcccttactcaggagaaatctggatggaaatggaacaatggttttgaatgtatctggatcatgaaatgaaagtcaggaggcttgagtgttctgctgagaaaaagtgatgggggaagaacataaacatgtataggacacttactgtcttgggaactttatgggtgttctcattgttaacatcatttaacagatgagaaaaacagttctcagacattgctgctaacagaaattcaatgcaagccacatttgtaatttaagatttcctagtaaccacattaaaaaagagaaaaataaaaaagagactgaaat

SEQ ID NO: 3620 - protein, 52 aa, Homo sapiens
MRERFGKFNKRHIMQPPYILCGKRSGINQFINYLKLFPLESWAGCWMNSSVF

SEQ ID NO: 3621 - DNA, 679 bp, Homo sapiens
gtttagaagagcccagcgaagctggcttagtgcccttcaagtcaccccaaaagagctagctgcctgactgaagccagagcctgccctccttttaatgtgtacagcatctcacggactgccctgtttacagcacctcttacggttagatgtggccaccacaaggatgctctgctgtgttcatggacagcatagccatgggggggacacgggctctggggtcagatttgtttctgtttgtgtctcagatctgcgacttaatatgtgtgacctcagcgagttacttattcctcctgtgcctcagtttcctcatatgcaaagtgggataataatggcaactcccacatagggtttgctgaggattaaatgagtgagtacacgactgtagcacgatgtaggagtgtttaatggcattatcgtcatgattagctgtgtgggccttggcttcccatctgtagcatagagctaccaatacctacctatggcatattgttactttggggattaaacgagacgctgaatgacaagcacatggcatataggtgcaagtgtttgttcctttcctgcttctaccattttttttcccgagacagagtcttgctctgccgcccaggctggagtgcatgagccaaggttgcaccattgcacttcagcctgggcaacaagagcaaaacttcgtctc

SEQ ID NO: 3622 - protein, 53 aa, Homo sapiens
MTSTWHIGASVCSFPASTIFFPETESCSAAQAGVHEPRLHHCTSAWATRAKLR

SEQ ID NO: 3623 - DNA, 3871 bp, Homo sapiens
tctgctgtgtgcctgtgcacccgcccaaggagctcacggggcacaggagggctgggcttggcagaagccccacttcctcctggcgcacgggtacttctgtgagagatggggacaagggctcttgatcagcaaccagtggtgacccgtgggccctaggccactcagaggaaagggaggcccactcttctccctgctgctagcttccaggaggatgagagagctggaggctcacagcacactcaggaggatggctgccttttaccagtgcatcaggcctgaccccagcgagcttgacatgatttccacaagggtgatggacattaagcttcgggaggctgcagaaggccttggggaggacagcacaggaaagaaaaaatctaaattcaaaacttttaagaagttttttgggaagaagaagagaaaagaatcgccgtcgtccacaggaagtagcacctggaaacaaagtcagacgaggaatgaggtcattgccatcgaatccgggccagtgggctacgactccgaggatgagctggaggagtcgaggggcacgctgggcagccgggccctttctcacgacagtattttcattcctgagtccggacaggacgctactcggcctgtgcgggtgttttcccaagaaaatgtgtgtgatcggattaaagctctgcagttaaaaatacagtgtaatgtgaaaatggggccaccacctcctccaggggggcttcctgccaagcggggagaggatgccggcatgagctctgaggacgacgggctgcccaggagccccccagagatgtctctgctgcacgacgtgggtcctggtaccaccataaaggtctctgtcgtgtctccagaccacgtgagcgacagcaccgtctctgcccggatctcagacaacagcctggcaccagtggctgacttcagttatcctgcagaatcctcctcctgcctggacaactctgcagctaagcacaagctccaggtcaagccccgcaaccagcggtcgagtaagatgaggcggctctcatcgcgcgctcagtctgaatccctgagcgacctgacgtgcaccccagaggaggaggaaaacgaggagaagccacttttggaagtcagcccagaagagcgccccagctctgggcagcaggacgtggcgccagacagaggccctgagcctgggccaccggcgcccttgccgccacccggaggggcccgtgccagacgcgcccgcctgcagcactcctccgcgctcacggccagcgtggaggaggggggcgtccccggggaggacccctcaagccgcccggccaccccggagctcgccgagcccgagtcggcccccactctccgcgtggagcccccgtccccgccggagggccccccgaatcccggtcccgacggcggaaagcaggatggggaggcgccccccgcaggcccgtgtgccccggccacggacaaggcggaggaggtggtctgtgctcccgaagacgtcgcgagcccgtttcccaccgccatccctgagggggacacgactccccccgagactgaccccgccgccacctcagaggcgccctctgctcgcgacgggccagaacgcagtgtcccgaaggaagcggagccgacgccgcccgtgctcccggatgaggagaaggggcccccagggccggcgcctgagcccgagagagaagcggagacggagcccgagagaggagcggggaccgagcccgagagaattgggaccgagccctccacggcgcccgccccgagcccgccggcgcccaagagctgcctgaaacaccggcccgcggccgccagcgagggccccgccgcgtccccgccgcttgccgctgcggagtctcccccggtggagcccggccccggttccctcgacgcagaggccgccgccccggagcgccccaaggccgagcgagccgaggcgccaccggcgggcgccgagagggcggcgccagagcggaaggcggagaggggcggtgccgagctgcgaggcgcgaagaagttctcggtgtcctcgtgccgagcgcggcctcgtccgggcgtctcccgcccgctggaacgggccagcggccgcctgcccctcgcgaggagcggcccggtctggaggagcgaggcggctcttgacgacctccagggtctccccgagccccagcacgcgaaacctggccctcggaagctggcggagcgcggccctcaggactcgggggacagggcggccagcccggccgggccgcgcaagagccctcaggaggcggccgccgcgcccggcacgagagagccctgcccagccgcccaggagccggccccgagtgaggacagaaaccccttccccgtcaagctccggtccacctccctctcgctcaaatacagggatggcgcctctcaggaggtgaagggtgtgaagaggtacagtgccgaggtccggttagaaaggtcgctgaccgtgctcccgaaggaggagaagtgtcccctcgggacggcccccgcccttcgaggcaccagggcccccagcgaccaaggaaaggggaaggcccggccccccgagccgctcagctccaagccgcccctgccccggaagccgcttctgcagagcttcacgctcccgcaccagcccgcgccccccgacgccggcccgggagagcgggaacccaggaaggagcccaggacggcggagaaaaggccgctgcgcaggggagctgaaaagagtctgccgcctgcagcaacagggcctggagctgatgggcagcctgcgccaccctggatcaccgtcactcggcagaagcggagggggaccttggaccagccacccaaccaggaagacaagcctggggcacggaccctgaagtctgaaccaggaaagcaagccaaggtgcccgagagaggccaggagcctgtgaagcaagctgactttgttcgcagcaagtctttcctgataacccctgtgaagcccgctgtggaccggaagcagggggcaaagctcaacttcaaggaggggctgcaaagaggaatctcattgtcccatcagaacttggctcagtctgcagtgatgatggagaaggaactgcatcagctgaagagagccagttatgccagtacagatcagccatcctggatggaacttgccagaaagaaatctcaagcttggagtgacatgccccagattataaaataggtgggcagtgtgctgataaagcatgtccactaccctgacaagccacttagttaaaaactgccagtgtattgtggcaaacaaactgtgaaacttaaagattgattttatcatcaagttatgacgaacttggggaagaggaaggaaccaggcaaaacaaagaggataaacacacagccatactcctgggccagagggcccagaaacaagaacaacattgaaaaagtccaggaaccagttcctgtgcccaaaggtacgaatgtgtcttttcgaattcccttgataaagaagcctcagacaaggaagaaaatagaaatgaaattggacacataaataggacacccagcaaaggccagaagagaagcccttctaggagaagggacatctgtgcttccagctgagatcagcccatgtctctggtcgctctcttgcctgtggatcctgtcttctttcatgtttactacgaggcatgacattcatggcaaaacagggatgccgtttccaagagcagctataaaacaatctgttttcctaaagacagccactctgagaaggagatgaaggaacacggcagggttcatcaattcatagactgtttccaaaaataatttttaaacttttccactaggcatctgtgtctttaaccactgcacaatgcattgcctgtttaataaaaggtttcaaacatgc

SEQ ID NO: 3624 - protein, 990 aa, Homo sapiens
MRELEAHSTLRRMAAFYQCIRPDPSELDMISTRVMDIKLREAAEGLGEDSTGKKKSKFKTFKKFFGKKKRKESPSSTGSSTWKQSQTRNEVIAIESGPVGYDSEDELEESRGTLGSRALSHDSIFIPESGQDATRPVRVFSQENVCDRIKALQLKIQCNVKMGPPPPPGGLPAKRGEDAGMSSEDDGLPRSPPEMSLLHDVGPGTTIKVSVVSPDHVSDSTVSARISDNSLAPVADFSYPAESSSCLDNSAAKHKLQVKPRNQRSSKMRRLSSRAQSESLSDLTCTPEEEENEEKPLLEVSPEERPSSGQQDVAPDRGPEPGPPAPLPPPGGARARRARLQHSSALTASVEEGGVPGEDPSSRPATPELAEPESAPTLRVEPPSPPEGPPNPGPDGGKQDGEAPPAGPCAPATDKAEEVVCAPEDVASPFPTAIPEGDTTPPETDPAATSEAPSARDGPERSVPKEAEPTPPVLPDEEKGPPGPAPEPEREAETEPERGAGTEPERIGTEPSTAPAPSPPAPKSCLKHRPAAASEGPAASPPLAAAESPPVEPGPGSLDAEAAAPERPKAERAEAPPAGAERAAPERKAERGGAELRGAKKFSVSSCRARPRPGVSRPLERASGRLPLARSGPVWRSEAALDDLQGLPEPQHAKPGPRKLAERGPQDSGDRAASPAGPRKSPQEAAAAPGTREPCPAAQEPAPSEDRNPFPVKLRSTSLSLKYRDGASQEVKGVKRYSAEVRLERSLTVLPKEEKCPLGTAPALRGTRAPSDQGKGKARPPEPLSSKPPLPRKPLLQSFTLPHQPAPPDAGPGEREPRKEPRTAEKRPLRRGAEKSLPPAATGPGADGQPAPPWITVTRQKRRGTLDQPPNQEDKPGARTLKSEPGKQAKVPERGQEPVKQADFVRSKSFLITPVKPAVDRKQGAKLNFKEGLQRGISLSHQNLAQSAVMMEKELHQLKRASYASTDQPSWMELARKKSQAWSDMPQIIK

SEQ ID NO: 3625 - DNA, 3888 bp, Homo sapiens
gcccccgccgagccgagcggagccgagcgaagccggcgcgcctgcagctgggagctgggagctgggagcgcgccgggcgcagggccgggccggccgcgggagggtagtgtcagcgcccgcgtccagctcttcggccgcagacccgggctgtctggaggccgcgcggccacctgctgcgtcgccccggctttgggctggggctagacgcgcaccgcggcgggagcagccccggctcgccgcaccccgcggaaggtgcccttctctgcgcgtctcgccgagcccgggccacgctcctgtcccagcgagcttgacatgatttccacaagggtgatggacattaagcttcgggaggctgcagaaggccttggggaggacagcacaggaaagaaaaaatctaaattcaaaacttttaagaagttttttgggaagaagaagagaaaagaatcgccgtcgtccacaggaagtagcacctggaaacaaagtcagacgaggaatgaggtcattgccatcgaatccgggccagtgggctacgactccgaggatgagctggaggagtcgaggggcacgctgggcagccgggccctttctcacgacagtattttcattcctgagtccggacaggacgctactcggcctgtgcgggtgttttcccaagaaaatgtgtgtgatcggattaaagctctgcagttaaaaatacagtgtaatgtgaaaatggggccaccacctcctccaggggggcttcctgccaagcggggagaggatgccggcatgagctctgaggacgacgggctgcccaggagccccccagagatgtctctgctgcacgacgtgggtcctggtaccaccataaaggtctctgtcgtgtctccagaccacgtgagcgacagcaccgtctctgcccggatctcagacaacagcctggcaccagtggctgacttcagttatcctgcagaatcctcctcctgcctggacaactctgcagctaagcacaagctccaggtcaagccccgcaaccagcggtcgagtaagatgaggcggctctcatcgcgcgctcagtctgaatccctgagcgacctgacgtgcaccccagaggaggaggaaaacgaggagaagccacttttggaagtcagcccagaagagcgccccagctctgggcagcaggacgtggcgccagacagaggccctgagcctgggccaccggcgcccttgccgccacccggaggggcccgtgccagacgcgcccgcctgcagcactcctccgcgctcacggccagcgtggaggaggggggcgtccccggggaggacccctcaagccgcccggccaccccggagctcgccgagcccgagtcggcccccactctccgcgtggagcccccgtccccgccggagggccccccgaatcccggtcccgacggcggaaagcaggatggggaggcgccccccgcaggcccgtgtgccccggccacggacaaggcggaggaggtggtctgtgctcccgaagacgtcgcgagcccgtttcccaccgccatccctgagggggacacgactccccccgagactgaccccgccgccacctcagaggcgccctctgctcgcgacgggccagaacgcagtgtcccgaaggaagcggagccgacgccgcccgtgctcccggatgaggagaaggggcccccagggccggcgcctgagcccgagagagaagcggagacggagcccgagagaggagcggggaccgagcccgagagaattgggaccgagccctccacggcgcccgccccgagcccgccggcgcccaagagctgcctgaaacaccggcccgcggccgccagcgagggccccgccgcgtccccgccgcttgccgctgcggagtctcccccggtggagcccggccccggttccctcgacgcagaggccgccgccccggagcgccccaaggccgagcgagccgaggcgccaccggcgggcgccgagagggcggcgccagagcggaaggcggagaggggcggtgccgagctgcgaggcgcgaagaagttctcggtgtcctcgtgccgagcgcggcctcgtccgggcgtctcccgcccgctggaacgggccagcggccgcctgcccctcgcgaggagcggcccggtctggaggagcgaggcggctcttgacgacctccagggtctccccgagccccagcacgcgaaacctggccctcggaagctggcggagcgcggccctcaggactcgggggacagggcggccagcccggccgggccgcgcaagagccctcaggaggcggccgccgcgcccggcacgagagagccctgcccagccgcccaggagccggccccgagtgaggacagaaaccccttccccgtcaagctccggtccacctccctctcgctcaaatacagggatggcgcctctcaggaggtgaagggtgtgaagaggtacagtgccgaggtccggttagaaaggtcgctgaccgtgctcccgaaggaggagaagtgtcccctcgggacggcccccgcccttcgaggcaccagggcccccagcgaccaaggaaaggggaaggcccggccccccgagccgctcagctccaagccgcccctgccccggaagccgcttctgcagagcttcacgctcccgcaccagcccgcgccccccgacgccggcccgggagagcgggaacccaggaaggagcccaggacggcggagaaaaggccgctgcgcaggggagctgaaaagagtctgccgcctgcagcaacagggcctggagctgatgggcagcctgcgccaccctggatcaccgtcactcggcagaagcggagggggaccttggaccagccacccaaccaggaagacaagcctggggcacggaccctgaagtctgaaccaggaaagcaagccaaggtgcccgagagaggccaggagcctgtgaagcaagctgactttgttcgcagcaagtctttcctgataacccctgtgaagcccgctgtggaccggaagcagggggcaaagctcaacttcaaggaggggctgcaaagaggaatctcattgtcccatcagaacttggctcagtctgcagtgatgatggagaaggaactgcatcagctgaagagagccagttatgccagtacagatcagccatcctggatggaacttgccagaaagaaatctcaagcttggagtgacatgccccagattataaaataggtgggcagtgtgctgataaagcatgtccactaccctgacaagccacttagttaaaaactgccagtgtattgtggcaaacaaactgtgaaacttaaagattgattttatcatcaagttatgacgaacttggggaagaggaaggaaccaggcaaaacaaagaggataaacacacagccatactcctgggccagagggcccagaaacaagaacaacattgaaaaagtccaggaaccagttcctgtgcccaaaggtacgaatgtgtcttttcgaattcccttgataaagaagcctcagacaaggaagaaaatagaaatgaaattggacacataaataggacacccagcaaaggccagaagagaagcccttctaggagaagggacatctgtgcttccagctgagatcagcccatgtctctggtcgctctcttgcctgtggatcctgtcttctttcatgtttactacgaggcatgacattcatggcaaaacagggatgccgtttccaagagcagctataaaacaatctgttttcctaaagacagccactctgagaaggagatgaaggaacacggcagggttcatcaattcatagactgtttccaaaaataatttttaaacttttccactaggcatctgtgtctttaaccactgcacaatgcattgcctgtttaataaaaggtttcaaacatgc

SEQ ID NO: 3626 - protein, 962 aa, Homo sapiens; identical to SEQ ID NO: 305

SEQ ID NO: 3627 - DNA, 1158 bp, Homo sapiens
agtgtcccgaaggaagcggagccgacgccgcccgtgctcccggatgaggagaaggggcccccagggccggcgcctgagcccgagagagaagcggagacggagcccgagagaggagcggggaccgagcccgagagaattgggaccgagccctccacggcgcccgccccgagcccgccggcgcccaagagctgcctgaaacaccggcccgcggccgccagcgagggccccgccgcgtccccgccgcttgccgctgcggagtctcccccggtggagcccggccccggttccctcgacgcagaggccgccgccccggagcgccccaaggccgagcgagccgaggcgccaccggcgggcgccgagagggcggcgccagagcggaaggcggagaggggcggtgccgagctgcgaggcgcgaagaagttctcggtgtcctcgtgccgagcgcggcctcgtccgggcgtctcccgcccgctggaacgggccagcggccgcctgcccctcgcgaggagcggcccggtctggaggagcgaggcggctcttgacgacctccagggtctccccgagccccagcacgcgaaacctggccctcggaagctggcggagcgcggccctcaggactcgggggacagggcggccagcccggccgggccgcgcaagagccctcaggaggcggccgccgcgcccggcacgagagagccctgcccagccgcccaggagccggccccgagtgaggacagaaaccccttccccgtcaagctccggtccacctccctctcgctcaaatacagggatggcgcctctcaggaggtgaagggtgtgaagaggtacagtgccgaggtccggttagaaaggtcgctgaccgtgctcccgaaggaggagaagtgtcccctcgggacggcccccgcccttcgaggcaccagggcccccagcgaccaaggaaaggggaaggcccggccccccgagccgctcagctccaagccgcccctgccccggaagccgcttctgcagagcttcacgctcccgcaccagcccgcgccccccgacgccggcccgggagagcgggaacccaggaaggagcccaggacggcggagaaaaggccgctgcgcaggggagctgctgcacagaatgctgtatgagaatgggattctccttgtccc

SEQ ID NO: 3628 - protein, 50 aa, Homo sapiens
MRRRGPQGRRLSPREKRRRSPREERGPSPRELGPSPPRRPPRARRRPRAA

SEQ ID NO: 3629 - DNA, 897 bp, Homo sapiens
agcggagccgagcgaagccggcgcgcctgcagctgggagctgggagctgggagcgcgccgggcgcagggccgggccggccgcgggagggtagtgtcagcgcccgcgtccagctcttcggccgcagacccgggctgtctggaggccgcgcggccacctgctgcgtcgccccggctttgggctggggctagacgcgcaccgcggcgggagcagccccggctcgccgcaccccgcggaaggtgcccttctctgcgcgtctcgccgagcccgggccacgctcctgtcccagcgagcttgacatgatttccacaagggtgatggacattaagcttcgggaggctgcagaaggccttggggaggacagcacaggaaagaaaaaatctaaattcaaaacttttaagaagttttttgggaagaagaagagaaaagaatcgccgtcgtccacaggaagtagcacctggaaacaaagtcagacgaggaatgaggtcattgccatcgaatccgggccagtgggctacgactccgaggatgagctggattaaaaatacagtgtaatgtgaaaatggggccaccacctcctccaggggggcttcctgccaagcggggagaggatgccggcatgagctctgaggacgacgggctgcccaggagccccccagagatgtctctgctgcacgacgtgggtcctggtaccaccataaaggtctctgtcgtgtctccagaccacgtgagcgacagcaccgtctctgcccggatctcagacaacagcctggcaccagtggctgacttcagttatcctgcagaatcctcctcctgcctggacaactctgcagctaagcacaagctccaggtcaagccccgcaaccagcggtcgagtaagatgaggcggctctcatcgg

SEQ ID NO: 3630 - protein, 111 aa, Homo sapiens
MGPPPPPGGLPAKRGEDAGMSSEDDGLPRSPPEMSLLHDVGPGTTIKVSVVSPDHVSDSTVSARISDNSLAPVADFSYPAESSSCLDNSAAKHKLQVKPRNQRSSKMRRLS

SEQ ID NO: 3631 - DNA, 434 bp, Homo sapiens
taaggaggatggaggtcaaggagacggagggacatggacagactggagagtggttctgaggtaggagagacaggagatgaggaaaggagaaagaaaagagggctcccagaccatggagacacccaggaggatgagagctgctgcctcaaatggaaaagagcagcaggtttggttgctggcaggggacaaaggtggactcaggcaggaggtggaaagcgaagtaaatgaactctggggtggtgtctcccaactctcacttccagctctcctgtgtttgtagactctgtgttcctaaacaagggaaaatacagccacaacctccaaaggacaagtgcttattcattcctttaatttatctttattgaggatgttccatgtacagtggaagaaaaattgaaagtgaataaaggaagctgaagatgtttaaagatata

SEQ ID NO: 3632 - protein, 67 aa, Homo sapiens
MRKGERKEGSQTMETPRRMRAAASNGKEQQVWLLAGDKGGLRQEVESEVNELWGGVSQLSLPALLCL

SEQ ID NO: 3633 - DNA, 426 bp, Homo sapiens
ggtgctggctttcaagtctcctccaaatgcaactgacccaggtctgcctgtcctccattagcttttgctcgttggagagggataacacaccgctaagaaaaagacttgttctgagagtgaggactgcccccggattttgtaaccagttgcaaccacctgaaagcagctctggggaagaggtcattgaagagtctttccaggtggaaagcgaagtaaatgaactctggggtggtgtctcccaactctcacttccagctctcctgtgtttgtagactctgtgttcctaaacaagggaaaatacagccacaacctccaaaggacaagtgcttattcattcctttaatttatctttattgaggatgttccatgtacagtggaagaaaaattgaaagtgaataaaggaagctgaagatgtttaaagatata

SEQ ID NO: 3634 - protein, 81 aa, Homo sapiens
MQLTQVCLSSISFCSLERDNTPLRKRLVLRVRTAPGFCNQLQPPESSSGEEVIEESFQVESEVNELWGGVSQLSLPALLCL

SEQ ID NO: 3635 - DNA, 691 bp, Homo sapiens
gtatctgtgaattggaagccacagagggaggaccactgaggcccctgagtcacgtggaggaagggaacaccatgtctggactgtgtttgagaaggtggcataagtggaaataaactcaagctgatgcttcaaaaacgagaagcacctgttccaactaagactaaagtggccgttgatgagaataaagccaaagaattccttggcagcctgaagcgccagaagcggcagctgtgggaccggactcggcccgaggtgcagcagtggtaccagcagtttctctacatgggctttgacgaagcgaaatttgaagatgacatcacctattggcttaacagagatcgaaatggacatgaatactatggcgattactaccaacgtcactatgatgaagactctgcaattggtccccggagcccctacggctttaggcatggagccagcgtcaactacgatgactactaaccatgacttgccacacgctgtacaagaagcaaatagcgattctcttcatgtatctcctaatgccttacactacttggtttctgatttgctctatttcagcagatcttttctacctactttgtgtgatcaaaaaagaagagttaaaacaacacatgtaaatgccttttgatatttcatgggaatgcctctcatttaaaaatagaaataaagcattttgttaaaaagaaaa

SEQ ID NO: 3636 - protein, 112 aa, Homo sapiens
MLQKREAPVPTKTKVAVDENKAKEFLGSLKRQKRQLWDRTRPEVQQWYQQFLYMGFDEAKFEDDITYWLNRDRNGHEYYGDYYQRHYDEDSAIGPRSPYGFRHGASVNYDDY

SEQ ID NO: 3637 - DNA, 776 bp, Homo sapiens
gaggacacagcaagaaggtgccatctaggaagcaggaagcagggcctgaccagacaccaaatctgctggggccttagtcttgaatttccagcctccataactgtgcaaaatccatttctgttgcttataagctacccagcttatgggattttgtttagcagcccaaatggactaagacagtggcataagtggaaataaactcaagctgatgcttcaaaaacgagaagcacctgttccaactaagactaaagtggccgttgatgagaataaagccaaagaattccttggcagcctgaagcgccagaagcggcagctgtgggaccggactcggcccgaggtgcagcagtggtaccagcagtttctctacatgggctttgacgaagcgaaatttgaagatgacatcacctattggcttaacagagatcgaaatggacatgaatactatggcgattactaccaacgtcactatgatgaagactctgcaattggtccccggagcccctacggctttaggcatggagccagcgtcaactacgatgactactaaccatgacttgccacacgctgtacaagaagcaaatagcgattctcttcatgtatctcctaatgccttacactacttggtttctgatttgctctatttcagcagatcttttctacctactttgtgtgatcaaaaaagaagagttaaaacaacacatgtaaatgccttttgatatttcatgggaatgcctctcatttaaaaatagaaataaagcattttgttaaaaagaaaa

SEQ ID NO: 3638 - protein, 112 aa, Homo sapiens; identical to SEQ ID NO: 3636

SEQ ID NO: 3639 - DNA, 785 bp, Homo sapiens
gggataacccgcggccgcgcctgcccgctcgcacccctctcccgcgcccggttctccctcgcagcacctcgaagtgcgcccctcgccctcctgctcgcgccccgccgccatggctgcctcccccgcgcggcctgctgtcctggccctgaccgggctggcgctgctcctgctcctgtgctggggcccaggtggcataagtggaaataaactcaagctgatgcttcaaaaacgagaagcacctgttccaactaagactaaagtggccgttgatgagaataaagccaaagaattccttggcagcctgaagcgccagaagcggcagctgtgggaccggactcggcccgaggtgcagcagtggtaccagcagtttctctacatgggctttgacgaagcgaaatttgaagatgacatcacctattggcttaacagagatcgaaatggacatgaatactatggcgattactaccaacgtcactatgatgaagactctgcaattggtccccggagcccctacggctttaggcatggagccagcgtcaactacgatgactactaaccatgacttgccacacgctgtacaagaagcaaatagcgattctcttcatgtatctcctaatgccttacactacttggtttctgatttgctctatttcagcagatcttttctacctactttgtgtgatcaaaaaagaagagttaaaacaacacatgtaaatgccttttgatatttcatgggaatgcctctcatttaaaaatagaaataaagcattttgttaaaaagaaaa

SEQ ID NO: 3640 - protein, 148 aa, Homo sapiens; identical to SEQ ID NO: 307

SEQ ID NO: 3641 - DNA, 854 bp, Homo sapiens
gaccgggctggcgctgctcctgctcctgtgctggggcccagaccccctggagcctgtccatggaaggagaggctaagaaccctgctgagaaagtggtcaccattacctccatcctggggcctgactccagttccttacacccgaagttgctctactcactacttacgatgtcatgcaacagttaagggtcagaggctcctataggtctgcaagccagttcgctgggtggaggcgtgtgttctatcaggccagacaaggtggcataagtggaaataaactcaagctgatgcttcaaaaacgagaagcacctgttccaactaagactaaagtggccgttgatgagaataaagccaaagaattccttggcagcctgaagcgccagaagcggcagctgtgggaccggactcggcccgaggtgcagcagtggtaccagcagtttctctacatgggctttgacgaagcgaaatttgaagatgacatcacctattggcttaacagagatcgaaatggacatgaatactatggcgattactaccaacgtcactatgatgaagactctgcaattggtccccggagcccctacggctttaggcatggagccagcgtcaactacgatgactactaaccatgacttgccacacgctgtacaagaagcaaatagcgattctcttcatgtatctcctaatgccttacactacttggtttctgatttgctctatttcagcagatcttttctacctactttgtgtgatcaaaaaagaagagttaaaacaacacatgtaaatgccttttgatatttcatgggaatgcctctcatttaaaaatagaaataaagcattttgttaaaaagaaaa

SEQ ID NO: 3642 - protein, 150 aa, Homo sapiens
MQQLRVRGSYRSASQFAGWRRVFYQARQGGISGNKLKLMLQKREAPVPTKTKVAVDENKAKEFLGSLKRQKRQLWDRTRPEVQQWYQQFLYMGFDEAKFEDDITYWLNRDRNGHEYYGDYYQRHYDEDSAIGPRSPYGFRHGASVNYDDY

SEQ ID NO: 3643 - DNA, 434 bp, Homo sapiens
ataagtggaaataaactcaagctgatgcttcaaaaacgagaagaaatttgaagatgacatcacctattggcttaacagagatcgaaatggacatgaatactatggcgattactaccaacgtcactatgatgaagactctgcaattggtccccggagcccctacggctttaggcatggagccagcgtcaactacgatgactactaaccatgacttgccacacgctgtacaagaagcaaatagcgattctcttcatgtatctcctaatgccttacactacttggtttctgatttgctctatttcagcagatcttttctacctactttgtgtgatcaaaaaagaagagttaaaacaacacatgtaaatgccttttgatatttcatgggaatgcctctcatttaaaaatagaaataaagcattttgttaaaaagaaaa

SEQ ID NO: 3644 - protein, 106 aa, Homo sapiens
MTSPIGLTEIEMDMNTMAITTNVTMMKTLQLVPGAPTALGMEPASTTMTTNHDLPHAVQEANSDSLHVSPNALHYLVSDLLYFSRSFLPTLCDQKRRVKTTHVNAF

SEQ ID NO: 3645 - DNA, 617 bp, Homo sapiens
gggattcaccgcaagtgaggaaggaagtcattctttgtgctttggggatggggaattgatgatttcagcacctgttccaactaagactaaagtggccgttgatgagaataaagccaaagaattccttggcagcctgaagcgccagaagcggcagctgtgggaccggactcggcccgaggtgcagcagtggtaccagcagtttctctacatgggctttgacgaagcgaaatttgaagatgacatcacctattggcttaacagagatcgaaatggacatgaatactatggcgattactaccaacgtcactatgatgaagactctgcaattggtccccggagcccctacggctttaggcatggagccagcgtcaactacgatgactactaaccatgacttgccacacgctgtacaagaagcaaatagcgattctcttcatgtatctcctaatgccttacactacttggtttctgatttgctctatttcagcagatcttttctacctactttgtgtgatcaaaaaagaagagttaaaacaacacatgtaaatgccttttgatatttcatgggaatgcctctcatttaaaaatagaaataaagcattttgttaaaaagaaaa

SEQ ID NO: 3646 - protein, 109 aa, Homo sapiens [sequence omitted]

SEQ ID NO: 3647 - DNA, 1247 bp, Homo sapiens
agtgggcggtaactcaggcctgttgagacagaataacctgccccccaccgagctcttgctgggcgcctgcacacagtcagcttggccacagcagttgcaggagcactccctggacttccacgcagaacagtccctcgggagctccggggcttctcagagaactgcatttccaccgcctgcaccctattcacaccacatatggggtttgcctttgatgtggatggtaaggctgtgcttacccatgctttgtgattctctcctaccttttttttctttaaacatctcaggtagcggaagtgaaattcagtttctctccgaagcccaggatgacccacagaaaagaaaaccagacatcaaaaaagcaaagctgatgctggggtgggagcccgtggtcccgctggaggaaggtttaaacaaagcaattcactacttccgtaaagaactcgagtaccaggcaaataatcagtacatccccaaaccaaagcctgccagaataaagaaaggacggactcgccacagctgaactcctcacttttaggacacaagactaccattgtacacttgatgggatgtatttttggcttttttttgttgtcgtttaaagaaagactttaacaggtgtcatgaagaacaaactggaatttcattctgaagcttgctttaatgaaatggatgtgcctaaaagctcccctcaaaaaactgcagattttgccttgcactttttgaatctctctttttatgtaaaatagcgtagatgcatctctgcgtattttcaagtttttttatcttgctgtgagagcatatgttgtgactgtcgttgacagttttatttactggtttctttgtgaagctgaaaaggaacattaagcgggacaaaaaatgccgattttatttatgaaagtgggtacttaataaatgagtcgttatactatgcataaagaaaaatcctagcagtattgtcaggtggtggtgcgccggcattgattttagggcagataaaagaattctgtgtgagagctttatgtttctcttttaattcagagtttttccaaggtctacttttgagttgcaaacttgactttgaaatattcctgttggtcatgatcaaggatatttgaaatcactactgtgttttgctgcgtatctggggcgggggcaggttggggggcacaaagttaacatattcttggttaaccatggttaaatatgctattttaataaattattgaaactcaccagtcatggac

SEQ ID NO: 3648 - protein, 102 aa, Homo sapiens
MWMVRLCLPMLCDSLLPFFSLNISGSGSEIQFLSEAQDDPQKRKPDIKKAKLMLGWEPVVPLEEGLNKAIHYFRKELEYQANNQYIPKPKPARIKKGRTRHS

SEQ ID NO: 3649 - DNA, 2913 bp, Homo sapiens
cttcagtagtatttatttactccccactctggtgatcctctctggtttcacattagcagagtctgagatgatgaggcttcagggactttgccatacttgggcaagggtttcctgacttaaactttttagttattgaggactcagatgagttcattaactgaccaaagttttgatgtttttcacaagcaattttttaggaactgagcgtcttttagtaatgcacgatgtctgggtccatatagttactgtactaaattaaccattccccaaacccatgattgcctcgaaacaacagtgcagggagtctgaggtctaggtggccatccgcatcggcattttggcatgactctgtttaatattctcatggccggttttgtcctcatttacataacaaaggcatgctatattttttaaaagtcactttgtcaaaatgacacttgtaaagagcttcaggttaaagaatgtgatctatgcaattttgaccttaaaagttgccagtttgtcatgtaaaaggcccatggctctcccgtctgccccactgaggatgactgcctgagagtcacccttcttccaactcagataaaccccaccccccagtttcaatattaaatcatattgtggatgcaatggaatggcagcttttaatgtctttttataaacctgcacagatgtatgtcatgagtgcactattgtaatgtagcaatactgccatagtgatgaagtgactttttgctagtttctataaaggagaaatcatccaaggttagcagggatttgcatttgtgcttgatccttgagaatagaacattttaagcatgttcatatgaaatacgcatttgtcgtaaaggaaaacgcagaaatatctgatttacgaaataccccaataggttttttcaattgaaagcaaaacctatctgcggttttcttttggaagtttatcctgacccagagtgacctgctcctcactggtaacgatggaggaggagaaggagaagggtcagagctttaaaagtcttctaagaattgtagctcatggaaaattggcgtagaaaaagtgcttgtgcttagcagtgaggtgtcatttttacgaagtaactttgttttaacagagccacactttaaagcttctgaaaataagaaccaaaccttggtaagcgaaagtttgcttacttatcttcaccttcatggcctagttgatcacaatccatttgaaacatccaaatatccctgaccgtttcatacgaggtgttttggggggtggcgactttaaggttgggggagtagggagtgacgtttctgtttatttcaaccctcagtattgtttgcctttatctgtgatttgccagtatggggatcacatactggagttcgttcatttccgtggatcttgtttttaaaagtaatcatgtgctttcgtacaggtcaactactgggttcacattaaacatgaattttctttggaaacttatgtaaactccatcttttttgagtgtatgcctgttttaacttatgcttagtttttaattgttaaaggacttcagaaatgcagtggcgaactcagccccatcactcagcttccatcctatttaactatctccaccacacccaaaaaaagcaaatcccagacatcaaatatatcatttcatccataaatactttcgcattgtaaacaccatcttagtttgtaggattttgtttcgacattcaattttccatttgggtttttgttttctcctgggggtggtaatttttcttctgggagggcttctatgtggtgcgtggcactagcatattccagcaggcagagcctcacctgcctcccctttttttccagcgatctagtgaatggcctcgtggctctcatgaacagcaacgtcagcagcccggtcaacctggggaacccagaagaacacacaatcctagaatttgctcagttaattaaaaaccttgttggtagcggaagtgaaattcagtttctctccgaagcccaggatgacccacagaaaagaaaaccagacatcaaaaaagcaaagctgatgctggggtgggagcccgtggtcccgctggaggaaggtttaaacaaagcaattcactacttccgtaaagaactcgagtaccaggcaaataatcagtacatccccaaaccaaagcctgccagaataaagaaaggacggactcgccacagctgaactcctcacttttaggacacaagactaccattgtacacttgatgggatgtatttttggcttttttttgttgtcgtttaaagaaagactttaacaggtgtcatgaagaacaaactggaatttcattctgaagcttgctttaatgaaatggatgtgcctaaaagctcccctcaaaaaactgcagattttgccttgcactttttgaatctctctttttatgtaaaatagcgtagatgcatctctgcgtattttcaagtttttttatcttgctgtgagagcatatgttgtgactgtcgttgacagttttatttactggtttctttgtgaagctgaaaaggaacattaagcgggacaaaaaatgccgattttatttatgaaagtgggtacttaataaatgagtcgttatactatgcataaagaaaaatcctagcagtattgtcaggtggtggtgcgccggcattgattttagggcagataaaagaattctgtgtgagagctttatgtttctcttttaattcagagtttttccaaggtctacttttgagttgcaaacttgactttgaaatattcctgttggtcatgatcaaggatatttgaaatcactactgtgttttgctgcgtatctggggcgggggcaggttggggggcacaaagttaacatattcttggttaaccatggttaaatatgctattttaataaattattgaaactcaccagtcatggac

SEQ ID NO: 3650 - protein, 139 aa, Homo sapiens
MWCVALAYSSRQSLTCLPFFSSDLVNGLVALMNSNVSSPVNLGNPEEHTILEFAQLIKNLVGSGSEIQFLSEAQDDPQKRKPDIKKAKLMLGWEPVVPLEEGLNKAIHYFRKELEYQANNQYIPKPKPARIKKGRTRHS

SEQ ID NO: 3651 - DNA, 2000 bp, Homo sapiens
gcgcattgtgcagcaggcgggcccccgcgcggtagggccctggacccgcgcggctcccggggatggtgagcaaggcgctgctgcgcctcgtgtctgccgtcaaccgcaggaggatgaagctgctgctgggcatcgccttgctggcctacgtcgcctctgtttggggcaacttcgttaatatgagatggttgaaccactaagagagaaaatcagagatttagaaaaaagctttacccagaaatacccaccagtaaagtttttatcagaaaaggatcggaaaagaattttgataacaggaggcgcagggttcgtgggctcccatctaactgacaaactcatgatggacggccacgaggtgaccgtggtggacaatttcttcacgggcaggaagagaaacgtggagcactggatcggacatgagaacttcgagttgattaaccacgacgtggtggagcccctctacatcgaggttgaccagatataccatctggcatctccagcctcccctccaaactacatgtataatcctatcaagacattaaagaccaatacgattgggacattaaacatgttggggctggcaaaacgagtcggtgcccgtctgctcctggcctccacatcggaggtgtatggagatcctgaagtccaccctcaaagtgaggattactggggccacgtgaatccaataggacctcgggcctgctacgatgaaggcaaacgtgttgcagagaccatgtgctatgcctacatgaagcaggaaggcgtggaagtgcgagtggccagaatcttcaacacctttgggccacgcatgcacatgaacgatgggcgagtagtcagcaacttcatcctgcaggcgctccagggggagccactcacggtatacggatccgggtctcagacaagggcgttccagtacgtcagcgatctagtgaatggcctcgtggctctcatgaacagcaacgtcagcagcccggtcaacctggggaacccagaagaacacacaatcctagaatttgctcagttaattaaaaaccttgttggtagcggaagtgaaattcagtttctctccgaagcccaggatgacccacagaaaagaaaaccagacatcaaaaaagcaaagctgatgctggggtgggagcccgtggtcccgctggaggaaggtttaaacaaagcaattcactacttccgtaaagaactcgagtaccaggcaaataatcagtacatccccaaaccaaagcctgccagaataaagaaaggacggactcgccacagctgaactcctcacttttaggacacaagactaccattgtacacttgatgggatgtatttttggcttttttttgttgtcgtttaaagaaagactttaacaggtgtcatgaagaacaaactggaatttcattctgaagcttgctttaatgaaatggatgtgcctaaaagctcccctcaaaaaactgcagattttgccttgcactttttgaatctctctttttatgtaaaatagcgtagatgcatctctgcgtattttcaagtttttttatcttgctgtgagagcatatgttgtgactgtcgttgacagttttatttactggtttctttgtgaagctgaaaaggaacattaagcgggacaaaaaatgccgattttatttatgaaagtgggtacttaataaatgagtcgttatactatgcataaagaaaaatcctagcagtattgtcaggtggtggtgcgccggcattgattttagggcagataaaagaattctgtgtgagagctttatgtttctcttttaattcagagtttttccaaggtctacttttgagttgcaaacttgactttgaaatattcctgttggtcatgatcaaggatatttgaaatcactactgtgttttgctgcgtatctggggcgggggcaggttggggggcacaaagttaacatattcttggttaaccatggttaaatatgctattttaataaattattgaaactcaccagtcatggac

SEQ ID NO: 3652 - protein, 363 aa, Homo sapiens
MVEPLREKIRDLEKSFTQKYPPVKFLSEKDRKRILITGGAGFVGSHLTDKLMMDGHEVTVVDNFFTGRKRNVEHWIGHENFELINHDVVEPLYIEVDQIYHLASPASPPNYMYNPIKTLKTNTIGTLNMLGLAKRVGARLLLASTSEVYGDPEVHPQSEDYWGHVNPIGPRACYDEGKRVAETMCYAYMKQEGVEVRVARIFNTFGPRMHMNDGRVVSNFILQALQGEPLTVYGSGSQTRAFQYVSDLVNGLVALMNSNVSSPVNLGNPEEHTILEFAQLIKNLVGSGSEIQFLSEAQDDPQKRKPDIKKAKLMLGWEPVVPLEEGLNKAIHYFRKELEYQANNQYIPKPKPARIKKGRTRHS

SEQ ID NO: 3653 - DNA, 2191 bp, Homo sapiens
cggaggggcgggggcggagccggaggaagggggtggaggcgcgcctgcgcggtgatcccgccagcaggaagcaggcgcgcgggggcgggggcgcgcggcggcaggaggcggggctctcggggccgctgccgccgccgccgccgcgcattgtgcagcaggcgggcccccgcgcggtagggccctggacccgcgcggctcccggggatggtgagcaaggcgctgctgcgcctcgtgtctgccgtcaaccgcaggaggatgaagctgctgctgggcatcgccttgctggcctacgtcgcctctgtttggggcaacttcgttaatatgaggtctatccaggaaaatggtgaactaaaaattgaaagcaagattgaagagatggttgaaccactaagagagaaaatcagagatttagaaaaaagctttacccagaaatacccaccagtaaagtttttatcagaaaaggatcggaaaagaattttgataacaggaggcgcagggttcgtgggctcccatctaactgacaaactcatgatggacggccacgaggtgaccgtggtggacaatttcttcacgggcaggaagagaaacgtggagcactggatcggacatgagaacttcgagttgattaaccacgacgtggtggagcccctctacatcgaggttgaccagatataccatctggcatctccagcctcccctccaaactacatgtataatcctatcaagacattaaagaccaatacgattgggacattaaacatgttggggctggcaaaacgagtcggtgcccgtctgctcctggcctccacatcggaggtgtatggagatcctgaagtccaccctcaaagtgaggattactggggccacgtgaatccaataggacctcgggcctgctacgatgaaggcaaacgtgttgcagagaccatgtgctatgcctacatgaagcaggaaggcgtggaagtgcgagtggccagaatcttcaacacctttgggccacgcatgcacatgaacgatgggcgagtagtcagcaacttcatcctgcaggcgctccagggggagccactcacggtatacggatccgggtctcagacaagggcgttccagtacgtcagcgatctagtgaatggcctcgtggctctcatgaacagcaacgtcagcagcccggtcaacctggggaacccagaagaacacacaatcctagaatttgctcagttaattaaaaaccttgttggtagcggaagtgaaattcagtttctctccgaagcccaggatgacccacagaaaagaaaaccagacatcaaaaaagcaaagctgatgctggggtgggagcccgtggtcccgctggaggaaggtttaaacaaagcaattcactacttccgtaaagaactcgagtaccaggcaaataatcagtacatccccaaaccaaagcctgccagaataaagaaaggacggactcgccacagctgaactcctcacttttaggacacaagactaccattgtacacttgatgggatgtatttttggcttttttttgttgtcgtttaaagaaagactttaacaggtgtcatgaagaacaaactggaatttcattctgaagcttgctttaatgaaatggatgtgcctaaaagctcccctcaaaaaactgcagattttgccttgcactttttgaatctctctttttatgtaaaatagcgtagatgcatctctgcgtattttcaagtttttttatcttgctgtgagagcatatgttgtgactgtcgttgacagttttatttactggtttctttgtgaagctgaaaaggaacattaagcgggacaaaaaatgccgattttatttatgaaagtgggtacttaataaatgagtcgttatactatgcataaagaaaaatcctagcagtattgtcaggtggtggtgcgccggcattgattttagggcagataaaagaattctgtgtgagagctttatgtttctcttttaattcagagtttttccaaggtctacttttgagttgcaaacttgactttgaaatattcctgttggtcatgatcaaggatatttgaaatcactactgtgttttgctgcgtatctggggcgggggcaggttggggggcacaaagttaacatattcttggttaaccatggttaaatatgctattttaataaattattgaaactcaccagtcatggac

SEQ ID NO: 3654 - protein, 420 aa, Homo sapiens; identical to SEQ ID NO: 309

SEQ ID NO: 3655 - DNA, 1536 bp, Homo sapiens
cgcagcagcagcatcatcagatgtgtgttagaaattcagactctcatgccctagcccaggcccccagatcaggatctgcctgttgacaggctcttcaggtgatccgtgcgtgctgacgcttgagaaacactatttgaaacctaaggctggggggaggggcgtgcagcttccctgctgtgcttctgtatatagctttgtgacagaccatcctgaaccacctgtggtggtgattcgctgcagagtctgcaatgtggcctccatgacacggaggcagggaaagcctccacaggctttcttctgcaggtctggcccacagtcactggtggggctgtgtactgctggccagtggggcctgggcccagcaaggatgtggaacaggccagcctttgccgtcctccgagaggtccctccagctgggtggctgcacatcttgggtctcagggctgtctaggctccgagcacccaggtatggcccacttggggcatccacctcagggatggccccacaccacgtttgtggtctcacaccggggtcatgctcggtgggcacgtctgcacttgttacctggtgtgggtggtctgccttggagcaaccctcttgtagtgggcggtaactcaggcctgttgagacagaataacctgccccccaccgagctcttgctgggcgcctgcacacagtcagcttggccacagcagttgcaggagcactccctggacttccacgcagaacagtccctcgggagctccggggcttctcagagaactgcatttccaccgcctgcaccctattcacaccacatatggggtttgcctttgatgtggatggtaaggctgtgcttacccatgctttgtgattctctcctaccttttttttctttaaacatctcaggtagcggaagtgaaattcagtttctctccgaagcccaggatgacccacagaaaagaaaaccagacatcaaaaaagcaaagctgatgctggggtgggagcccgtggtcccgctggaggaaggtttaaacaaagcaattcactacttccgtaaagaactcgagtaccaggcaaataatcagtacatccccaaaccaaagcctgccagaataaagaaaggacggactcgccacagctgaactcctcacttttaggacacaagactaccattgtacacttgatgggatgtatttttggcttttttttgttgtcgtttaaagaaagactttaacaggtgtcatgaagaacaaactggaatttcattctgaagcttgctttaatgaaatggatgtgcctaaaagctcccctcaaaaaactgcagattttgccttgcactttttgaatctctctttttatgtaaaatagcgtagatgcatctctgcgtattttcaagtttttttatcttgctgtgagagcatatgttgtgactgtcgttgacagttttatttactggtttctttgtgaagctgaaaaggaacattaagcgggacaaaaaatgccgattttatttatgaaagtgggtacttaataaatgagtcgttatactatgc

SEQ ID NO: 3656 - protein, 218 aa, Homo sapiens
MAHLGHPPQGWPHTTFVVSHRGHARWARLHLLPGVGGLPWSNPLVVGGNSGLLRQNNLPPTELLLGACTQSAWPQQLQEHSLDFHAEQSLGSSGASQRTAFPPPAPYSHHIWGLPLMWMVRLCLPMLCDSLLPFFSLNISGSGSEIQFLSEAQDDPQKRKPDIKKAKLMLGWEPVVPLEEGLNKAIHYFRKELEYQANNQYIPKPKPARIKKGRTRHS

SEQ ID NO: 3657 - DNA, 1924 bp, Homo sapiens
aggataggaactggagttattgttaatgttacaggaagaacacattctcaaaggagaggggggtggtgggaaactttgattttcatagggttttcagtttcctctcaaatgggaggatgcagcagtgccgctacttaactgaacgtctcgacagtctgatggggcggccctcagccttccggagcagcagtgggactgacctgtccagtgaggaagaaacactgaaccagatggaatggcctttggggatggaaaaaccccagtttacgctcatctcttctctcagctaacttttgtggagccctgttcccaaactggcctgggccagagcaccgtggaggggtatttgttgtaaatggaaggtttccaggcccgcctggaaatcctgaagggtgagacctgcagtgggctcaggagtctgcatttgtgggtgaccgagggggcctcccctccctctagagtccacactgtggagagcatcaggaagggaaaggcctgcatcttgtgctcagtgagctcatcgtctagtgaggaaggcatgtgtgaatctctggacaaggcagcgctgagctgttgtggactagtggtgcaggcaagggattatttctgaccaaggatggtgagaaggtttcccatacagactgacgtctggattgagctttgaagaagaaagccaggactggagcagacgacgaggagggaagagtttgaccagatataccatctggcatctccagcctcccctccaaactacatgtataatcctatcaagacattaaagaccaatacgattgggacattaaacatgttggggctggcaaaacgagtcggtgcccgtctgctcctggcctccacatcggaggtgtatggagatcctgaagtccaccctcaaagtgaggattactggggccacgtgaatccaataggacctcgggcctgctacgatgaaggcaaacgtgttgcagagaccatgtgctatgcctacatgaagcaggaaggcgtggaagtgcgagtggccagaatcttcaacacctttgggccacgcatgcacatgaacgatgggcgagtagtcagcaacttcatcctgcaggcgctccagggggagccactcacggtatacggatccgggtctcagacaagggcgttccagtacgtcagcgatctagtgaatggcctcgtggctctcatgaacagcaacgtcagcagcccggtcaacctggggaacccagaagaacacacaatcctagaatttgctcagttaattaaaaaccttgttggtagcggaagtgaaattcagtttctctccgaagcccaggatgacccacagaaaagaaaaccagacatcaaaaaagcaaagctgatgctggggtgggagcccgtggtcccgctggaggaaggtttaaacaaagcaattcactacttccgtaaagaactcgagtaccaggcaaataatcagtacatccccaaaccaaagcctgccagaataaagaaaggacggactcgccacagctgaactcctcacttttaggacacaagactaccattgtacacttgatgggatgtatttttggcttttttttgttgtcgtttaaagaaagactttaacaggtgtcatgaagaacaaactggaatttcattctgaagcttgctttaatgaaatggatgtgcctaaaagctcccctcaaaaaactgcagattttgccttgcactttttgaatctctctttttatgtaaaatagcgtagatgcatctctgcgtattttcaagtttttttatcttgctgtgagagcatatgttgtgactgtcgttgacagttttatttactggtttctttgtgaagctgaaaaggaacattaagcgggacaaaaaatgccgattttatttatgaaagtgggtacttaataaatgagtcgttatactatgc

SEQ ID NO: 3658 - protein, 252 aa, Homo sapiens
MYNPIKTLKTNTIGTLNMLGLAKRVGARLLLASTSEVYGDPEVHPQSEDYWGHVNPIGPRACYDEGKRVAETMCYAYMKQEGVEVRVARIFNTFGPRMHMNDGRVVSNFILQALQGEPLTVYGSGSQTRAFQYVSDLVNGLVALMNSNVSSPVNLGNPEEHTILEFAQLIKNLVGSGSEIQFLSEAQDDPQKRKPDIKKAKLMLGWEPVVPLEEGLNKAIHYFRKELEYQANNQYIPKPKPARIKKGRTRHS

SEQ ID NO: 3659 - DNA, 817 bp, Homo sapiens
cagactcacagcctcccatcccctccagccccagcccacctgacctacatcagccaccttctgattgattctgttttttcctggggaaaaggccaaaaagccatctaggcctcaaccccagcatctctgaacctctgacccagccctggacttccaaatttcagacttctttcagctcctgcttcttcgtcacaggtacaccagggcatccagcacattgatttgtccccactcgccttagcctgtctcctgccacagttgtctcattttggtgaagtgcgtgtccagatttccccatgctcccagctgcaacatggatctgtgaaagacagtacagcagaaaagtattcacatcctggctctctctgcccttcattgtctttaagctctttaacaacttttacttggagaggaaaacaactatctagacaggaacacggagcagcagagggagaaattgtgtctttactgatttcagtcaattattgcagtgaccacatgtctcaggagtgttgatgtccagatgagggctgacccatgaaaggtcagcaaggaaaaaggaggacctaaactttcctcggtttgcaagttgtaaaagacccatggaatgccaactatccttgtccatggacatgtggacagactgtccagtggctatcatcaattttgcatctatttgtaaattctatgtcagcattcctattgtcctagctatgcgtggcatttttaattctcctttgggctggttgtagcatcttactggttccctcattaattaatgaactaaataaaatctttgacatgtgttcattttaca

SEQ ID NO: 3660 - protein, 49 aa, Homo sapiens
MECQLSLSMDMWTDCPVAIINFASICKFYVSIPIVLAMRGIFNSPLGWL

SEQ ID NO: 3661 - DNA, 5039 bp, Homo sapiens
catctttggttcagtgaccaacataccagcaaaggatgcagcaccagtggagaaaatagacaccatgctggtcttggaaggcagtggaaacctggtgctatacacaggagtggttcgggtgggaaaggtttttattcctggactgccagctccctctctgacgatgtccaacacaatgcctcggcccagtactccactagatggcgttagtactccaaagcctcttagtaaactccttggatcattggacgaggttgttctgttgtccccagttccagaactgagggattcttcaaaacttcatgattctctctataatgaggattgtactttccaacagcttggaacttacattcattctatcagagatcctgtccataacagagtcaccctggaactgagtaatggctccatggttaggatcactattcctgaaattgccacctctgagttagtacaaacgtgtttgcaagcaattaagtttatcctgccaaaagaaatagcagttcagatgcttgtcaagtggtacaatgtccacagtgctccaggaggacccagttatcactcagagtggaatttatttgtgacttgtctcatgaacatgatgggttataacacagaccgcttagcatggactagaaattttgactttgaaggatcactttctcctgtcattgcgcccaaaaaagcaaggccttccgagactggatctgatgatgactgggaatatttactaaattcagactaccaccagaatgttgagtctcatcttttgaacagatctttatgtctgagtccttcagaagcttcacagatgaaggatgaggatttttcacagaatctcagtctggattcttctacacttctctttactcacatacctgcaatttttttcgttcttcaccttgtgtatgaggagcttaagttgaatactctaatgggagaaggaatttgttcacttgttgaacttctcgttcagttggcaagggacttaaaattggggccttatgtagatcattactatagagactacccaacgcttgtcagaactactggacaagtgtgcacaattgatccaggtcaaacaggatttatgcatcatccatcattttttacgtctgagccaccaagtatttatcagtgggtgagttcttgtctgaagggtgaaggaatgccaccttatccttacctccctggaatctgtgaaagaagcagacttgtagtcttgagtattgcactgtacatacttggtgatgagagcttggtttctgatgaatcctcacagtatttaaccagaataactatagccccccagaagttgcaagtagaacaagaggaaaacaggtttagtttcaggcattctacatctgtttctagtctagctgaaagattggttgtctggatgactaatgtaggattcactttaagagatttggaaactcttccctttggaattgctcttcccatcagagatgcaatttatcactgtcgtgagcagcctgcctcagactggccagaagctgtctgtctcttgattggacgtcaggatctttccaagcaggcctgcgaaggaaacttacccaaagggaagtctgtgctctcatcagatgttccttcaggaacagaaactgaggaggaagatgacggcatgaatgacatgaatcacgaggtcatgtcattaatatggagtgaagatttaagggtgcaggatgtgcgaaggcttcttcagagtgcgcatcctgtccgtgtcaacgtagtgcagtacccagagctcagtgaccacgagttcatcgaggaaaaggaaaacagattgctccaattgtgtcagcgaactatggctcttcctgtaggacgaggaatgtttaccttgttttcgtaccatcctgttccaacagagccattgcctattcctaaattgaatctgactgggcgtgcccctcctcggaacacaacagtagaccttaatagtggaaacatcgatgtgcctcccaacatgacaagctgggccagctttcataatggtgtggctgctggcctgaagatagctcctgcctcccagatcgactcagcttggattgtttacaataagcccaagcatgctgagttggccaatgagtatgctggctttctcatggctctgggtttgaatgggcaccttaccaagctggcgactctcaatatccatgactacttgaccaagggccatgaaatgacaagcattggactgctacttggtgtttctgctgcaaaactaggcaccatggatatgtctattactcggcttcttagcattcacattcctgctctcttacccccaacgtccacagagctggatgttcctcacaatgtccaagtggctgcagtggttggcattggccttgtatatcaagggacagctcacagacatactgcagaagtcctgttggctgagataggacggcctcctggtcctgaaatggaatactgcactgacagagagtcatactccttagctgctggcttggccctgggcatggtctgcttggggcatggcagcaatttgataggtatgtctgatctcaatgtgcctgagcagctctatcagtacatggttggaggacataggcgctttcaaacaggaatgcatagggagaaacataaatcaccaagttatcaaatcaaagaaggagataccataaatgtggatgtgacttgtccaggtgctactctagctttggctatgatctacttaaaaaccaataacagatctattgcagattggctccgagcccctgacaccatgtatttgttggactttgtgaagccagaatttctcttgcttaggacacttgctcgatgcctgattttgtgggatgatattttaccaaattccaagtgggttgacagcaatgttcctcaaattataagagaaaatagtatctctctcagtgaaatcgaattgccgtgctcagaggatttgaatttggaaactttgtcccaagcacatgtctacataattgcaggagcctgcttgtctctgggttttcgatttgctggctcagaaaacttatcagcatttaactgtttgcataaatttgccaaagattttatgacttatttgtccgcacctaatgcttctgttacaggtcctcataacctagaaacttgtctgagcgtggtgctgctgtctctcgccatggtcatggctggctcaggaaacctaaaggttttgcagctttgtcgcttcttacacatgaaaacgggtggtgaaatgaactatggttttcacttagcccaccacatggcccttggacttctatttttgggaggaggaaggtactctttgagcacatcaaattcttccattgccgctcttctctgtgccctttatccgcacttcccagctcacagcactgacaaccggtatcatctccaggctctccggcacctctatgtgctggccgcggagcccaggcttctagtgcctgtggatgtggacacaaacacgccctgctatgccctcttagaagttacctacaagggcactcagtggtatgaacaaaccaaagaagaattgatggctcctacccttcttccagaactccatcttttaaagcagattaaagtaaaaggcccaagatactgggaactgctcatagatttaagcaaaggaacacaacacttgaagtccatcctttccaaggatggggttttatatgttaaactccgggcgggtcagctctcctacaaagaagatccaatgggatggcaaagtttgttggctcagactgttgctaacaggaactctgaagcccgggctttcaagccagaaacaatctcagcattcacttctgatccagcacttctgtcatttgctgaatatttctgcaagccaactgtgaacatgggtcagaaacaggaaattctggatctcttttcttcagtactctatgaatgtgttacccaggagaccccagagatgttgcctgcatacatcgcaatggatcaggctataagaagacttgggagaagagaaatgtctgagacttctgaactttggcagataaagttggtgttagagtttttcagctcccgaagccatcaggagcggctgcagaaccaccctaagcgggggctctttatgaactcggaattcctccctgttgtgaagtgcaccattgataataccctggaccagtggctacaagtcgggggtgatatgtgtgtgcacgcctacctcagcgggcagcccttggaggaatcacagctgagcatgctggcctgcttcctcgtctaccactctgtgccagctccacagcacctgccacctataggactagaaggtcttctgaaggacctagcaggagactcaggttgaaaccctacagaacctcgccgtgtgccgcccagtcttccttgaataaggccattttctcaccctttgtctagtaactagctgactccacagctcatggtaaggggcatgtctcagctcagggggtctcctgacatcccagaggaagcaataaggtgggggtctttcatctctcagcctgatgatctgtgcacacccacttgatgggaggccagggtgcctgtgggcagatgggtcagagtgtgggccaggatttggagtagaagccagagcatgtgaaaatccaaaccaggaagacttcgttgcctcccgcatgtggggttgaaggcctctcttctgtggtctcccatcctcatgctgatcaaattgggggggaatgtctcactgtgtgaggatcaccccaattaagctgtgggggaggacacagaatctgatcccctctgtatccttagcgcatgctacctccagccaccaggggaaagaagcagaggtgaggtgggagaggtggccactctggacggtgtaactgggctggctgcctctcagcgcccacgagcaccccacagatatccacgctagtgtacaaaggttcccaagtggtggccttttcctgcttccaagggctgcccgggttcccccctctctgaaatagattggttgcttctcattacgtcacaagctgcag

SEQ ID NO: 3662 - protein, 1430 aa, Homo sapiens
MLVLEGSGNLVLYTGVVRVGKVFIPGLPAPSLTMSNTMPRPSTPLDGVSTPKPLSKLLGSLDEVVLLSPVPELRDSSKLHDSLYNEDCTFQQLGTYIHSIRDPVHNRVTLELSNGSMVRITIPEIATSELVQTCLQAIKFILPKEIAVQMLVKWYNVHSAPGGPSYHSEWNLFVTCLMNMMGYNTDRLAWTRNFDFEGSLSPVIAPKKARPSETGSDDDWEYLLNSDYHQNVESHLLNRSLCLSPSEASQMKDEDFSQNLSLDSSTLLFTHIPAIFFVLHLVYEELKLNTLMGEGICSLVELLVQLARDLKLGPYVDHYYRDYPTLVRTTGQVCTIDPGQTGFMHHPSFFTSEPPSIYQWVSSCLKGEGMPPYPYLPGICERSRLVVLSIALYILGDESLVSDESSQYLTRITIAPQKLQVEQEENRFSFRHSTSVSSLAERLVVWMTNVGFTLRDLETLPFGIALPIRDAIYHCREQPASDWPEAVCLLIGRQDLSKQACEGNLPKGKSVLSSDVPSGTETEEEDDGMNDMNHEVMSLIWSEDLRVQDVRRLLQSAHPVRVNVVQYPELSDHEFIEEKENRLLQLCQRTMALPVGRGMFTLFSYHPVPTEPLPIPKLNLTGRAPPRNTTVDLNSGNIDVPPNMTSWASFHNGVAAGLKIAPASQIDSAWIVYNKPKHAELANEYAGFLMALGLNGHLTKLATLNIHDYLTKGHEMTSIGLLLGVSAAKLGTMDMSITRLLSIHIPALLPPTSTELDVPHNVQVAAVVGIGLVYQGTAHRHTAEVLLAEIGRPPGPEMEYCTDRESYSLAAGLALGMVCLGHGSNLIGMSDLNVPEQLYQYMVGGHRRFQTGMHREKHKSPSYQIKEGDTINVDVTCPGATLALAMIYLKTNNRSIADWLRAPDTMYLLDFVKPEFLLLRTLARCLILWDDILPNSKWVDSNVPQIIRENSISLSEIELPCSEDLNLETLSQAHVYIIAGACLSLGFRFAGSENLSAFNCLHKFAKDFMTYLSAPNASVTGPHNLETCLSVVLLSLAMVMAGSGNLKVLQLCRFLHMKTGGEMNYGFHLAHHMALGLLFLGGGRYSLSTSNSSIAALLCALYPHFPAHSTDNRYHLQALRHLYVLAAEPRLLVPVDVDTNTPCYALLEVTYKGTQWYEQTKEELMAPTLLPELHLLKQIKVKGPRYWELLIDLSKGTQHLKSILSKDGVLYVKLRAGQLSYKEDPMGWQSLLAQTVANRNSEARAFKPETISAFTSDPALLSFAEYFCKPTVNMGQKQEILDLFSSVLYECVTQETPEMLPAYIAMDQAIRRLGRREMSETSELWQIKLVLEFFSSRSHQERLQNHPKRGLFMNSEFLPVVKCTIDNTLDQWLQVGGDMCVHAYLSGQPLEESQLSMLACFLVYHSVPAPQHLPPIGLEGLLKDLAGDSG

SEQ ID NO: 3663 - DNA, 2064 bp, Homo sapiens
ctcagtctagcttgtcagagtagcctcaataccggctatagaacctgctttatatatgctgagcgttcaataagttcttgatgaaaaagtaatagaagatatttcttgtgcctctcagttctgtcatcagttggttccgttccatttgtttctctcacagtcgggggtgatatgtgtgtgcacgcctacctcagcgggcagcccttggaggaatcacagctgagcatgctggcctgcttcctcgtctaccactctgtgccagctccacagcacctgccacctataggactagaagggagcacaagctttgctgaactgctcttcaaatttaagcagctaaaaatgccagtgcgagctttgctgagattggctcctttgcttcttggaaatccacagccaatggtgatgtgaccgtgtctggcggtgaacctaccctgaaacgtgacttctgcacaacaaacgtgaccaaacatcaaagctaaagcaatgtttataaagttttatggtataactagggggaaatgagctgcacaaacctcaatgtattttaaatctgttgctgtcatcattaacggtatatgacatataaaagcaagttaaaatttacttttgtaaataaagtttttggtttgtttccaaaactcttgatgattgctttagttttggacttagagaatagagcaggggttgctggagtgaatattgatttttaaagtctttgaactgtggtggtataggtgaagtgactatgcccaaaaatgccaagttttaaaagaagctatgtcataaagttttactttctgtggcaaaagagcgctttagcatttcctcagatgtcacagttgtcctgtctaaaataagtttgtacttctggtgacaatgccagacactcttatgatgtgatcaccttaaacaggagaaggagatttttgccctcagttgctcaacatgaagtactgtggactgaattgtgtcctcccagaattatatattgaggccctaatccctgtgtgactgtattaggcaatagggcatataggagattactaaggttaagtgaggtcatcataagggtggggccttaattcagtagaattggtggcctcctaagcagaggaagagagatttttctttctctctctgccatgtgaagacagtgaggagtcggccgtctgcaagccaagaagagcccttatcaggaacagacttggctagcaccttcatcgtggacctccagcctccagaattgcaagaaaatacatttccgtcgttgaaaccacccagtctgtggtattttgttatggcagcccaggcagactaatacgtgaagcctgctctaaatagataaaataagaaattactacagagggctctttagaaattgtatttaaaaacaagacaatccatatttacctaagatttacagaatgtatgtctataaaaggagggatttctggactagatgatgatgaaaaatgttcatataaaggcacctccagcttcgagttgccaacacaggaggaagaatgctccctgctgttcagatgctgatatgtgtcctgtgcttcctggatggccagtgggatcataagctggtagaagcaagaccttcatccactgacttcatatttcttccacatcctgaactgtggtgtttgactttaaaaataaattaaagcaaatagaaatgtttccattgagattttggcaaaaacccacatgacatttgcgtctgcagagtagacttggaaggcatgcacctggaggccaagtggtattctctggactctctgtccttgcatttgcgtggctgccccgaggactcgcttcttcctggatgtgaagcagaggcacgatggggctgactgagaggctgaaatgtgcttctcttcacagttacatagttttcttctaattaaaaataaattttaagtggtagattatgaaaattccatttgaatcaagattttaaaaattcaatatcaaaccagttgttactgtcttcactctccgttgtttacgattgtgtgcttttcctgaataaagaatgactggagagacatt

SEQ ID NO: 3664 - protein, 79 aa, Homo sapiens [sequence omitted]

SEQ ID NO: 3665 - DNA, 4177 bp, Homo sapiens
gtggctggcttgagtgatattcttttttccttaccttttcagtaacaattctagtttctggtaggctttttaattagtcagtgaaggagggaaaagccttttttggatgagttgtgtaaacaggaagacctgtttgttattggccttttgataaattagtagctcatgttaacttgtgcaaaagcttcttgtaacttcttagcagaacaggttgatgaggcaagtttgcatcatctgggattttttgggaatgttgggtgacaaaggggaggtagagttgttagaactgtgtgtattacagtttaagcgtaaggaaaataatcttttgttgtcttatactgttgtggttgtttgtttttttagccagaaacaatctcagcattcacttctgatccagcacttctgtcatttgctgaatatttctgcaagccaactgtgaacatgggtcaggtatatattctatggtttgccgagccccaggactagaatttgttattatttctatgcatgggtcacccaaaacatctctactatctatatctatctttgagattgatgacatgcgtcagtcacattggatgacttttgcttggcacgtatagatttgcatagcctaaaactattaaattcagcaactttctaccttgatagaagaaacaacttaaaatttataagacatcagttttgacagatgatagtttctgtcatctacaagaatgatacccatccatattctgctttatgttttcagtgtttaccacctttctcttatttttatgtaatttcattaactgtttcctctgtatattataaccctgctttttattgttcatacacctgttaccttcaagattccaagggtgcttagcagatttttctttatttttttgttttttgttttttgagacagggtcggttttttctgttgcccaggctggagtgcagtgacgtgatcatggctcactgcatccttgacctcccggagtgaagccatccttccacctcagcctcctgagtagctgggactacaggcatgtagccaccatgcctggctacttttttaaaaaaattttttgtagcgatggagtctcactatattgcccaggctggtcttgaacttctgggctcaaatgatcctcccaccttggactcccaaagtgctgggattataggcacgagccactgtgcctggcccagatctttgacttaatccaccatagagacaaggaaagattggatgcatatatggccttcagaaaatttctcaacctctccaaaatgtagtttcctcatttctaaaagtgattataatagaacctaccttacagtattgttttgaggattaagtgaaataaccttcccctctcttttttattgaatctttactatacatgggacactctgctaatacttaaatgtcatttaattatgaccctgagaataggtattttatcattctgggcttacagatgaggaaactgccactgagagatgtcacatgcccaagatctcacagctagtaagagctgggctgtgcactccaggtcacgggtctctaataaagcccatgcccacccttaaccccagctggacttgactctgccgcctcccctaaacttgttctggacagtgttttttttcttgcagctttgttactctgtttcctttctggatcctactcttcccagcccaacccaaggcatagctctgtgatgtcctatctactcattttgtcctagtttggtccattcctctcttctgtagcacttactatccttaactgtctcttgggacttaattttttttttttaattaatgtttaatgttacatgtgctgtggcttttttaaaagattgtagtgttacttttatgtcattcattataaaacttaagaatgggccatagtagtgctatacaattcgtttttgaattgattttggaatatactttgtgctacaaaacttctgattttctgcagaaacaggaaattctggatctcttttcttcagtactctatgaatgtgttacccaggagaccccagagatgttgcctgcatacatcgcaatggatcaggctataagaagacttgggagaagagaaatgtctgagacttctgaactttggcagataaagttggtgttagagtttttcagctcccgaagccatcaggagcggctgcagaaccaccctaagcgggggctctttatgaactcggaattcctccctgttgtgaagtgcaccattgataataccctggaccagtggctacaagtcgggggtgatatgtgtgtgcacgcctacctcagcgggcagcccttggaggaatcacagctgagcatgctggcctgcttcctcgtctaccactctgtgccagctccacagcacctgccacctataggactagaagggagcacaagctttgctgaactgctcttcaaatttaagcagctaaaaatgccagtgcgagctttgctgagattggctcctttgcttcttggaaatccacagccaatggtgatgtgaccgtgtctggcggtgaacctaccctgaaacgtgacttctgcacaacaaacgtgaccaaacatcaaagctaaagcaatgtttataaagttttatggtataactagggggaaatgagctgcacaaacctcaatgtattttaaatctgttgctgtcatcattaacggtatatgacatataaaagcaagttaaaatttacttttgtaaataaagtttttggtttgtttccaaaactcttgatgattgctttagttttggacttagagaatagagcaggggttgctggagtgaatattgatttttaaagtctttgaactgtggtggtataggtgaagtgactatgcccaaaaatgccaagttttaaaagaagctatgtcataaagttttactttctgtggcaaaagagcgctttagcatttcctcagatgtcacagttgtcctgtctaaaataagtttgtacttctggtgacaatgccagacactcttatgatgtgatcaccttaaacaggagaaggagatttttgccctcagttgctcaacatgaagtactgtggactgaattgtgtcctcccagaattatatattgaggccctaatccctgtgtgactgtattaggcaatagggcatataggagattactaaggttaagtgaggtcatcataagggtggggccttaattcagtagaattggtggcctcctaagcagaggaagagagatttttctttctctctctgccatgtgaagacagtgaggagtcggccgtctgcaagccaagaagagcccttatcaggaacagacttggctagcaccttcatcgtggacctccagcctccagaattgcaagaaaatacatttccgtcgttgaaaccacccagtctgtggtattttgttatggcagcccaggcagactaatacgtgaagcctgctctaaatagataaaataagaaattactacagagggctctttagaaattgtatttaaaaacaagacaatccatatttacctaagatttacagaatgtatgtctataaaaggagggatttctggactagatgatgatgaaaaatgttcatataaaggcacctccagcttcgagttgccaacacaggaggaagaatgctccctgctgttcagatgctgatatgtgtcctgtgcttcctggatggccagtgggatcataagctggtagaagcaagaccttcatccactgacttcatatttcttccacatcctgaactgtggtgtttgactttaaaaataaattaaagcaaatagaaatgtttccattgagattttggcaaaaacccacatgacatttgcgtctgcagagtagacttggaaggcatgcacctggaggccaagtggtattctctggactctctgtccttgcatttgcgtggctgccccgaggactcgcttcttcctggatgtgaagcagaggcacgatggggctgactgagaggctgaaatgtgcttctcttcacagttacatagttttcttctaattaaaaataaattttaagtggtagattatgaaaattccatttgaatcaagattttaaaaattcaatatcaaaccagttgttactgtcttcactctccgttgtttacgattgtgtgcttttcctgaataaagaatgactggagagacatt

SEQ ID NO: 3666 - protein, 209 aa, Homo sapiens [sequence omitted]

SEQ ID NO: 3667 - DNA, 8249 bp, Homo sapiens
gggattacaggcgcgagtggccgctggggttcttaacttgggtctttgaatcgccttaagaagtgtctctgaatctgggaattgcaagcaacgtttctgtgaggaccttcacacagttcatccactcttcgaagagtatggaccgaaaaaggcatagagcattcactgcacgtagagaaaatcagcaacccctgctccccaccctcagcctgaggtgcctacctccacgtggggtcaggaggcggaagcgaaaccagaagaaaaaaccctgagatctataaggcagttcaggtccctagtgacatgagctaaagagaacttggacgccaggactgtagcagacagagtccggcttcggggttcgcatcagtcgcacggaaggtggaaatagcccccaagttgtaacccgccgcggtcttccctcaacagcgcaggcgccaggactgctaggacgccgcgcacctcccgcgatgccccgccccggcgcgaggcaagacgggaaagtcaagatggacgcgtccatttgaacgtctcgcacgccttcctgccattagcactcgagcccgctgctgttgcccgttcttcctccagaataggggagggagagggaatgagaagctgctgcggcccaagagtcactgtgaaggaccccgccgctgccctcgggcctcctcggcccctgcgcctccggggagcagccggggctcgccgcgcctgacgcgtcccgagttatacagaaataatgttgatatttggaacccatgtcgaacttctatgaagaaaggacaacgatgattgcagcaagggatttgcaggaatttgttccttttggtcgagaccactgcaagcaccaccctaatgctttgaaccttcaacttcgccagctgcagccagcttctgaattatggtcttctgatggtgctgctggcttggtgggatcccttcaggaggttacaatccacgagaaacagaaggaaagctggcagttaaggaaaggagtaagtgaaattggagaagatgtggactatgatgaggaactctatgttgctggaaatatggtgatatggagcaaaggaagtaaaagccaggcattggcagtttataaagcatttacagttgacagtcctgttcagcaggcattgtggtgtgacttcattatatcacaggataagtctgaaaaggcctacagtagcaatgaagtagaaaaatgcatatgtatattgcaaagctcatgtattaacatgcatagcatagaaggaaaggattacatagcttcattaccatttcaggttgcaaatgtttggcccactaaatatggattgctgtttgaacgaagcgcttcttcacatgaagtacctccaggttcacccagagaacctttacctactatgttcagcatgctgcacccactagatgaaataactccacttgtttgtaaatctggaagtctttttggttcatcacgggtgcaatatgttgtagatcatgcaatgaaaattgttttcctcaatactgacccctctattgtaatgacttatgatgctgttcaaaatgtgcattctgtgtggactctccggagagtcaaatcagaggaagagaatgttgttttaaagttctctgaacaggggggaaccccacagaatgtggccactagcagctccctcacagcacatctcagaagcctctccaaaggagattcccctgtgacttcacctttccagaattactcctccattcacagccagagtcgctcaacctcatcacccagtctacattctcgctcaccttctatttccaacatggcagctctaagtcgtgctcattctcctgcgttaggagtgcactctttttcaggggtgcaaaggttcaacatttcaagccataatcagtctccaaagagacatagtatttctcattctccaaatagtaattctaatggctcctttcttgcaccagaaacggagccaattgttcctgaactgtgtattgaccatttgtggacagaaacgattactaatataagagagaaaaattcacaagcctcaaaagtgtttattacatctgacctatgtgggcaaaagttcctgtgctttttagtagagtcccagctccagttacgctgtgtaaagtttcaagagagtaatgataaaacccagctcatctttggttcagtgaccaacataccagcaaaggatgcagcaccagtggagaaaatagacaccatgctggtcttggaaggcagtggaaacctggtgctatacacaggagtggttcgggtgggaaaggtttttattcctggactgccagctccctctctgacgatgtccaacacaatgcctcggcccagtactccactagatggcgttagtactccaaagcctcttagtaaactccttggatcattggacgaggttgttctgttgtccccagttccagaactgagggattcttcaaaacttcatgattctctctataatgaggattgtactttccaacagcttggaacttacattcattctatcagagatcctgtccataacagagtcaccctggaactgagtaatggctccatggttaggatcactattcctgaaattgccacctctgagttagtacaaacgtgtttgcaagcaattaagtttatcctgccaaaagaaatagcagttcagatgcttgtcaagtggtacaatgtccacagtgctccaggaggacccagttatcactcagagtggaatttatttgtgacttgtctcatgaacatgatgggttataacacagaccgcttagcatggactagaaattttgactttgaaggatcactttctcctgtcattgcgcccaaaaaagcaaggccttccgagactggatctgatgatgactgggaatatttactaaattcagactaccaccagaatgttgagtctcatcttttgaacagatctttatgtctgagtccttcagaagcttcacagatgaaggatgaggatttttcacagaatctcagtctggattcttctacacttctctttactcacatacctgcaatttttttcgttcttcaccttgtgtatgaggagcttaagttgaatactctaatgggagaaggaatttgttcacttgttgaacttctcgttcagttggcaagggacttaaaattggggccttatgtagatcattactatagagactacccaacgcttgtcagaactactggacaagtgtgcacaattgatccaggtcaaacaggatttatgcatcatccatcattttttacgtctgagccaccaagtatttatcagtgggtgagttcttgtctgaagggtgaaggaatgccaccttatccttacctccctggaatctgtgaaagaagcagacttgtagtcttgagtattgcactgtacatacttggtgatgagagcttggtttctgatgaatcctcacagtatttaaccagaataactatagccccccagaagttgcaagtagaacaagaggaaaacaggtttagtttcaggcattctacatctgtttctagtctagctgaaagattggttgtctggatgactaatgtaggattcactttaagagatttggaaactcttccctttggaattgctcttcccatcagagatgcaatttatcactgtcgtgagcagcctgcctcagactggccagaagctgtctgtctcttgattggacgtcaggatctttccaagcaggcctgcgaaggaaacttacccaaagggaagtctgtgctctcatcagatgttccttcaggaacagaaactgaggaggaagatgacggcatgaatgacatgaatcacgaggtcatgtcattaatatggagtgaagatttaagggtgcaggatgtgcgaaggcttcttcagagtgcgcatcctgtccgtgtcaacgtagtgcagtacccagagctcagtgaccacgagttcatcgaggaaaaggaaaacagattgctccaattgtgtcagcgaactatggctcttcctgtaggacgaggaatgtttaccttgttttcgtaccatcctgttccaacagagccattgcctattcctaaattgaatctgactgggcgtgcccctcctcggaacacaacagtagaccttaatagtggaaacatcgatgtgcctcccaacatgacaagctgggccagctttcataatggtgtggctgctggcctgaagatagctcctgcctcccagatcgactcagcttggattgtttacaataagcccaagcatgctgagttggccaatgagtatgctggctttctcatggctctgggtttgaatgggcaccttaccaagctggcgactctcaatatccatgactacttgaccaagggccatgaaatgacaagcattggactgctacttggtgtttctgctgcaaaactaggcaccatggatatgtctattactcggcttcttagcattcacattcctgctctcttacccccaacgtccacagagctggatgttcctcacaatgtccaagtggctgcagtggttggcattggccttgtatatcaagggacagctcacagacatactgcagaagtcctgttggctgagataggacggcctcctggtcctgaaatggaatactgcactgacagagagtcatactccttagctgctggcttggccctgggcatggtctgcttggggcatggcagcaatttgataggtatgtctgatctcaatgtgcctgagcagctctatcagtacatggttggaggacataggcgctttcaaacaggaatgcatagggagaaacataaatcaccaagttatcaaatcaaagaaggagataccataaatgtggatgtgacttgtccaggtgctactctagctttggctatgatctacttaaaaaccaataacagatctattgcagattggctccgagcccctgacaccatgtatttgttggactttgtgaagccagaatttctcttgcttaggacacttgctcgatgcctgattttgtgggatgatattttaccaaattccaagtgggttgacagcaatgttcctcaaattataagagaaaatagtatctctctcagtgaaatcgaattgccgtgctcagaggatttgaatttggaaactttgtcccaagcacatgtctacataattgcaggagcctgcttgtctctgggttttcgatttgctggctcagaaaacttatcagcatttaactgtttgcataaatttgccaaagattttatgacttatttgtccgcacctaatgcttctgttacaggtcctcataacctagaaacttgtctgagcgtggtgctgctgtctctcgccatggtcatggctggctcaggaaacctaaaggttttgcagctttgtcgcttcttacacatgaaaacgggtggtgaaatgaactatggttttcacttagcccaccacatggcccttggacttctatttttgggaggaggaaggtactctttgagcacatcaaattcttccattgccgctcttctctgtgccctttatccgcacttcccagctcacagcactgacaaccggtatcatctccaggctctccggcacctctatgtgctggccgcggagcccaggcttctagtgcctgtggatgtggacacaaacacgccctgctatgccctcttagaagttacctacaagggcactcagtggtatgaacaaaccaaagaagaattgatggctcctacccttcttccagaactccatcttttaaagcagattaaagtaaaaggcccaagatactgggaactgctcatagatttaagcaaaggaacacaacacttgaagtccatcctttccaaggatggggttttatatgttaaactccgggcgggtcagctctcctacaaagaagatccaatgggatggcaaagtttgttggctcagactgttgctaacaggaactctgaagcccgggctttcaagccagaaacaatctcagcattcacttctgatccagcacttctgtcatttgctgaatatttctgcaagccaactgtgaacatgggtcagaaacaggaaattctggatctcttttcttcagtactctatgaatgtgttacccaggagaccccagagatgttgcctgcatacatcgcaatggatcaggctataagaagacttgggagaagagaaatgtctgagacttctgaactttggcagataaagttggtgttagagtttttcagctcccgaagccatcaggagcggctgcagaaccaccctaagcgggggctctttatgaactcggaattcctccctgttgtgaagtgcaccattgataataccctggaccagtggctacaagtcgggggtgatatgtgtgtgcacgcctacctcagcgggcagcccttggaggaatcacagctgagcatgctggcctgcttcctcgtctaccactctgtgccagctccacagcacctgccacctataggactagaagggagcacaagctttgctgaactgctcttcaaatttaagcagctaaaaatgccagtgcgagctttgctgagattggctcctttgcttcttggaaatccacagccaatggtgatgtgaccgtgtctggcggtgaacctaccctgaaacgtgacttctgcacaacaaacgtgaccaaacatcaaagctaaagcaatgtttataaagttttatggtataactagggggaaatgagctgcacaaacctcaatgtattttaaatctgttgctgtcatcattaacggtatatgacatataaaagcaagttaaaatttacttttgtaaataaagtttttggtttgtttccaaaactcttgatgattgctttagttttggacttagagaatagagcaggggttgctggagtgaatattgatttttaaagtctttgaactgtggtggtataggtgaagtgactatgcccaaaaatgccaagttttaaaagaagctatgtcataaagttttactttctgtggcaaaagagcgctttagcatttcctcagatgtcacagttgtcctgtctaaaataagtttgtacttctggtgacaatgccagacactcttatgatgtgatcaccttaaacaggagaaggagatttttgccctcagttgctcaacatgaagtactgtggactgaattgtgtcctcccagaattatatattgaggccctaatccctgtgtgactgtattaggcaatagggcatataggagattactaaggttaagtgaggtcatcataagggtggggccttaattcagtagaattggtggcctcctaagcagaggaagagagatttttctttctctctctgccatgtgaagacagtgaggagtcggccgtctgcaagccaagaagagcccttatcaggaacagacttggctagcaccttcatcgtggacctccagcctccagaattgcaagaaaatacatttccgtcgttgaaaccacccagtctgtggtattttgttatggcagcccaggcagactaatacgtgaagcctgctctaaatagataaaataagaaattactacagagggctctttagaaattgtatttaaaaacaagacaatccatatttacctaagatttacagaatgtatgtctataaaaggagggatttctggactagatgatgatgaaaaatgttcatataaaggcacctccagcttcgagttgccaacacaggaggaagaatgctccctgctgttcagatgctgatatgtgtcctgtgcttcctggatggccagtgggatcataagctggtagaagcaagaccttcatccactgacttcatatttcttccacatcctgaactgtggtgtttgactttaaaaataaattaaagcaaatagaaatgtttccattgagattttggcaaaaacccacatgacatttgcgtctgcagagtagacttggaaggcatgcacctggaggccaagtggtattctctggactctctgtccttgcatttgcgtggctgccccgaggactcgcttcttcctggatgtgaagcagaggcacgatggggctgactgagaggctgaaatgtgcttctcttcacagttacatagttttcttctaattaaaaataaattttaagtggtagattatgaaaattccatttgaatcaagattttaaaaattcaatatcaaaccagttgttactgtcttcactctccgttgtttacgattgtgtgcttttcctgaataaagaatgactggagagacatt

SEQ ID NO: 3668 - protein, 1944 aa, Homo sapiens; identical to SEQ ID NO: 311

SEQ ID NO: 3669 - DNA, 598 bp, Homo sapiens
agaacctgctttatatatgctgagcgttcaataagttcttgatgaaaaagtaatagaagatatttcttgtgcctctcagttctgtcatcagttggttccgttccatttgtttctctcacagtcgggggtgatatgtgtgtgcacgcctacctcagcgggcagcccttggaggaatcacagctgagcatgctggcctgcttcctcgtctaccactctgtgccagctccacagcacctgccacctataggactagaagggagcacaagctttgctgaactgctcttcaaatttaagcagctaaaaatgccagtgcgagctttgctgagattggctcctttgcttcttggaaatccacagccaatggtgatgtgaccgtgtctggcggtgaacctaccctgaaacgtgacttctgcacaacaaacgtgaccaaacatcaaagctaaagcaatgtttataaagttttatggtataactagggggaaatgagctgcacaaacctcaatgtattttaaatctgttgctgtcatcattaacggtatatgacatataaaagcaagttaaaatttacttttgtaaataaagtttttggtttgtttcc

SEQ ID NO: 3670 - protein, 79 aa, Homo sapiens [sequence omitted]

SEQ ID NO: 3671 - DNA, 2750 bp, Homo sapiens
gtggctggcttgagtgatattcttttttccttaccttttcagtaacaattctagtttctggtaggctttttaattagtcagtgaaggagggaaaagccttttttggatgagttgtgtaaacaggaagacctgtttgttattggccttttgataaattagtagctcatgttaacttgtgcaaaagcttcttgtaacttcttagcagaacaggttgatgaggcaagtttgcatcatctgggattttttgggaatgttgggtgacaaaggggaggtagagttgttagaactgtgtgtattacagtttaagcgtaaggaaaataatcttttgttgtcttatactgttgtggttgtttgtttttttagccagaaacaatctcagcattcacttctgatccagcacttctgtcatttgctgaatatttctgcaagccaactgtgaacatgggtcaggtatatattctatggtttgccgagccccaggactagaatttgttattatttctatgcatgggtcacccaaaacatctctactatctatatctatctttgagattgatgacatgcgtcagtcacattggatgacttttgcttggcacgtatagatttgcatagcctaaaactattaaattcagcaactttctaccttgatagaagaaacaacttaaaatttataagacatcagttttgacagatgatagtttctgtcatctacaagaatgatacccatccatattctgctttatgttttcagtgtttaccacctttctcttatttttatgtaatttcattaactgtttcctctgtatattataaccctgctttttattgttcatacacctgttaccttcaagattccaagggtgcttagcagatttttctttatttttttgttttttgttttttgagacagggtcggttttttctgttgcccaggctggagtgcagtgacgtgatcatggctcactgcatccttgacctcccggagtgaagccatccttccacctcagcctcctgagtagctgggactacaggcatgtagccaccatgcctggctacttttttaaaaaaattttttgtagcgatggagtctcactatattgcccaggctggtcttgaacttctgggctcaaatgatcctcccaccttggactcccaaagtgctgggattataggcacgagccactgtgcctggcccagatctttgacttaatccaccatagagacaaggaaagattggatgcatatatggccttcagaaaatttctcaacctctccaaaatgtagtttcctcatttctaaaagtgattataatagaacctaccttacagtattgttttgaggattaagtgaaataaccttcccctctcttttttattgaatctttactatacatgggacactctgctaatacttaaatgtcatttaattatgaccctgagaataggtattttatcattctgggcttacagatgaggaaactgccactgagagatgtcacatgcccaagatctcacagctagtaagagctgggctgtgcactccaggtcacgggtctctaataaagcccatgcccacccttaaccccagctggacttgactctgccgcctcccctaaacttgttctggacagtgttttttttcttgcagctttgttactctgtttcctttctggatcctactcttcccagcccaacccaaggcatagctctgtgatgtcctatctactcattttgtcctagtttggtccattcctctcttctgtagcacttactatccttaactgtctcttgggacttaattttttttttttaattaatgtttaatgttacatgtgctgtggcttttttaaaagattgtagtgttacttttatgtcattcattataaaacttaagaatgggccatagtagtgctatacaattcgtttttgaattgattttggaatatactttgtgctacaaaacttctgattttctgcagaaacaggaaattctggatctcttttcttcagtactctatgaatgtgttacccaggagaccccagagatgttgcctgcatacatcgcaatggatcaggctataagaagacttgggagaagagaaatgtctgagacttctgaactttggcagataaagttggtgttagagtttttcagctcccgaagccatcaggagcggctgcagaaccaccctaagcgggggctctttatgaactcggaattcctccctgttgtgaagtgcaccattgataataccctggaccagtggctacaagtcgggggtgatatgtgtgtgcacgcctacctcagcgggcagcccttggaggaatcacagctgagcatgctggcctgcttcctcgtctaccactctgtgccagctccacagcacctgccacctataggactagaagggagcacaagctttgctgaactgctcttcaaatttaagcagctaaaaatgccagtgcgagctttgctgagattggctcctttgcttcttggaaatccacagccaatggtgatgtgaccgtgtctggcggtgaacctaccctgaaacgtgacttctgcacaacaaacgtgaccaaacatcaaagctaaagcaatgtttataaagttttatggtataactagggggaaatgagctgcacaaacctcaatgtattttaaatctgttgctgtcatcattaacggtatatgacatataaaagcaagttaaaatttacttttgtaaataaagtttttggtttgtttcc

SEQ ID NO: 3672 - protein, 209 aa, Homo sapiens [sequence omitted]

SEQ ID NO: 3673 - DNA, 6822 bp, Homo sapiens
gggattacaggcgcgagtggccgctggggttcttaacttgggtctttgaatcgccttaagaagtgtctctgaatctgggaattgcaagcaacgtttctgtgaggaccttcacacagttcatccactcttcgaagagtatggaccgaaaaaggcatagagcattcactgcacgtagagaaaatcagcaacccctgctccccaccctcagcctgaggtgcctacctccacgtggggtcaggaggcggaagcgaaaccagaagaaaaaaccctgagatctataaggcagttcaggtccctagtgacatgagctaaagagaacttggacgccaggactgtagcagacagagtccggcttcggggttcgcatcagtcgcacggaaggtggaaatagcccccaagttgtaacccgccgcggtcttccctcaacagcgcaggcgccaggactgctaggacgccgcgcacctcccgcgatgccccgccccggcgcgaggcaagacgggaaagtcaagatggacgcgtccatttgaacgtctcgcacgccttcctgccattagcactcgagcccgctgctgttgcccgttcttcctccagaataggggagggagagggaatgagaagctgctgcggcccaagagtcactgtgaaggaccccgccgctgccctcgggcctcctcggcccctgcgcctccggggagcagccggggctcgccgcgcctgacgcgtcccgagttatacagaaataatgttgatatttggaacccatgtcgaacttctatgaagaaaggacaacgatgattgcagcaagggatttgcaggaatttgttccttttggtcgagaccactgcaagcaccaccctaatgctttgaaccttcaacttcgccagctgcagccagcttctgaattatggtcttctgatggtgctgctggcttggtgggatcccttcaggaggttacaatccacgagaaacagaaggaaagctggcagttaaggaaaggagtaagtgaaattggagaagatgtggactatgatgaggaactctatgttgctggaaatatggtgatatggagcaaaggaagtaaaagccaggcattggcagtttataaagcatttacagttgacagtcctgttcagcaggcattgtggtgtgacttcattatatcacaggataagtctgaaaaggcctacagtagcaatgaagtagaaaaatgcatatgtatattgcaaagctcatgtattaacatgcatagcatagaaggaaaggattacatagcttcattaccatttcaggttgcaaatgtttggcccactaaatatggattgctgtttgaacgaagcgcttcttcacatgaagtacctccaggttcacccagagaacctttacctactatgttcagcatgctgcacccactagatgaaataactccacttgtttgtaaatctggaagtctttttggttcatcacgggtgcaatatgttgtagatcatgcaatgaaaattgttttcctcaatactgacccctctattgtaatgacttatgatgctgttcaaaatgtgcattctgtgtggactctccggagagtcaaatcagaggaagagaatgttgttttaaagttctctgaacaggggggaaccccacagaatgtggccactagcagctccctcacagcacatctcagaagcctctccaaaggagattcccctgtgacttcacctttccagaattactcctccattcacagccagagtcgctcaacctcatcacccagtctacattctcgctcaccttctatttccaacatggcagctctaagtcgtgctcattctcctgcgttaggagtgcactctttttcaggggtgcaaaggttcaacatttcaagccataatcagtctccaaagagacatagtatttctcattctccaaatagtaattctaatggctcctttcttgcaccagaaacggagccaattgttcctgaactgtgtattgaccatttgtggacagaaacgattactaatataagagagaaaaattcacaagcctcaaaagtgtttattacatctgacctatgtgggcaaaagttcctgtgctttttagtagagtcccagctccagttacgctgtgtaaagtttcaagagagtaatgataaaacccagctcatctttggttcagtgaccaacataccagcaaaggatgcagcaccagtggagaaaatagacaccatgctggtcttggaaggcagtggaaacctggtgctatacacaggagtggttcgggtgggaaaggtttttattcctggactgccagctccctctctgacgatgtccaacacaatgcctcggcccagtactccactagatggcgttagtactccaaagcctcttagtaaactccttggatcattggacgaggttgttctgttgtccccagttccagaactgagggattcttcaaaacttcatgattctctctataatgaggattgtactttccaacagcttggaacttacattcattctatcagagatcctgtccataacagagtcaccctggaactgagtaatggctccatggttaggatcactattcctgaaattgccacctctgagttagtacaaacgtgtttgcaagcaattaagtttatcctgccaaaagaaatagcagttcagatgcttgtcaagtggtacaatgtccacagtgctccaggaggacccagttatcactcagagtggaatttatttgtgacttgtctcatgaacatgatgggttataacacagaccgcttagcatggactagaaattttgactttgaaggatcactttctcctgtcattgcgcccaaaaaagcaaggccttccgagactggatctgatgatgactgggaatatttactaaattcagactaccaccagaatgttgagtctcatcttttgaacagatctttatgtctgagtccttcagaagcttcacagatgaaggatgaggatttttcacagaatctcagtctggattcttctacacttctctttactcacatacctgcaatttttttcgttcttcaccttgtgtatgaggagcttaagttgaatactctaatgggagaaggaatttgttcacttgttgaacttctcgttcagttggcaagggacttaaaattggggccttatgtagatcattactatagagactacccaacgcttgtcagaactactggacaagtgtgcacaattgatccaggtcaaacaggatttatgcatcatccatcattttttacgtctgagccaccaagtatttatcagtgggtgagttcttgtctgaagggtgaaggaatgccaccttatccttacctccctggaatctgtgaaagaagcagacttgtagtcttgagtattgcactgtacatacttggtgatgagagcttggtttctgatgaatcctcacagtatttaaccagaataactatagccccccagaagttgcaagtagaacaagaggaaaacaggtttagtttcaggcattctacatctgtttctagtctagctgaaagattggttgtctggatgactaatgtaggattcactttaagagatttggaaactcttccctttggaattgctcttcccatcagagatgcaatttatcactgtcgtgagcagcctgcctcagactggccagaagctgtctgtctcttgattggacgtcaggatctttccaagcaggcctgcgaaggaaacttacccaaagggaagtctgtgctctcatcagatgttccttcaggaacagaaactgaggaggaagatgacggcatgaatgacatgaatcacgaggtcatgtcattaatatggagtgaagatttaagggtgcaggatgtgcgaaggcttcttcagagtgcgcatcctgtccgtgtcaacgtagtgcagtacccagagctcagtgaccacgagttcatcgaggaaaaggaaaacagattgctccaattgtgtcagcgaactatggctcttcctgtaggacgaggaatgtttaccttgttttcgtaccatcctgttccaacagagccattgcctattcctaaattgaatctgactgggcgtgcccctcctcggaacacaacagtagaccttaatagtggaaacatcgatgtgcctcccaacatgacaagctgggccagctttcataatggtgtggctgctggcctgaagatagctcctgcctcccagatcgactcagcttggattgtttacaataagcccaagcatgctgagttggccaatgagtatgctggctttctcatggctctgggtttgaatgggcaccttaccaagctggcgactctcaatatccatgactacttgaccaagggccatgaaatgacaagcattggactgctacttggtgtttctgctgcaaaactaggcaccatggatatgtctattactcggcttcttagcattcacattcctgctctcttacccccaacgtccacagagctggatgttcctcacaatgtccaagtggctgcagtggttggcattggccttgtatatcaagggacagctcacagacatactgcagaagtcctgttggctgagataggacggcctcctggtcctgaaatggaatactgcactgacagagagtcatactccttagctgctggcttggccctgggcatggtctgcttggggcatggcagcaatttgataggtatgtctgatctcaatgtgcctgagcagctctatcagtacatggttggaggacataggcgctttcaaacaggaatgcatagggagaaacataaatcaccaagttatcaaatcaaagaaggagataccataaatgtggatgtgacttgtccaggtgctactctagctttggctatgatctacttaaaaaccaataacagatctattgcagattggctccgagcccctgacaccatgtatttgttggactttgtgaagccagaatttctcttgcttaggacacttgctcgatgcctgattttgtgggatgatattttaccaaattccaagtgggttgacagcaatgttcctcaaattataagagaaaatagtatctctctcagtgaaatcgaattgccgtgctcagaggatttgaatttggaaactttgtcccaagcacatgtctacataattgcaggagcctgcttgtctctgggttttcgatttgctggctcagaaaacttatcagcatttaactgtttgcataaatttgccaaagattttatgacttatttgtccgcacctaatgcttctgttacaggtcctcataacctagaaacttgtctgagcgtggtgctgctgtctctcgccatggtcatggctggctcaggaaacctaaaggttttgcagctttgtcgcttcttacacatgaaaacgggtggtgaaatgaactatggttttcacttagcccaccacatggcccttggacttctatttttgggaggaggaaggtactctttgagcacatcaaattcttccattgccgctcttctctgtgccctttatccgcacttcccagctcacagcactgacaaccggtatcatctccaggctctccggcacctctatgtgctggccgcggagcccaggcttctagtgcctgtggatgtggacacaaacacgccctgctatgccctcttagaagttacctacaagggcactcagtggtatgaacaaaccaaagaagaattgatggctcctacccttcttccagaactccatcttttaaagcagattaaagtaaaaggcccaagatactgggaactgctcatagatttaagcaaaggaacacaacacttgaagtccatcctttccaaggatggggttttatatgttaaactccgggcgggtcagctctcctacaaagaagatccaatgggatggcaaagtttgttggctcagactgttgctaacaggaactctgaagcccgggctttcaagccagaaacaatctcagcattcacttctgatccagcacttctgtcatttgctgaatatttctgcaagccaactgtgaacatgggtcagaaacaggaaattctggatctcttttcttcagtactctatgaatgtgttacccaggagaccccagagatgttgcctgcatacatcgcaatggatcaggctataagaagacttgggagaagagaaatgtctgagacttctgaactttggcagataaagttggtgttagagtttttcagctcccgaagccatcaggagcggctgcagaaccaccctaagcgggggctctttatgaactcggaattcctccctgttgtgaagtgcaccattgataataccctggaccagtggctacaagtcgggggtgatatgtgtgtgcacgcctacctcagcgggcagcccttggaggaatcacagctgagcatgctggcctgcttcctcgtctaccactctgtgccagctccacagcacctgccacctataggactagaagggagcacaagctttgctgaactgctcttcaaatttaagcagctaaaaatgccagtgcgagctttgctgagattggctcctttgcttcttggaaatccacagccaatggtgatgtgaccgtgtctggcggtgaacctaccctgaaacgtgacttctgcacaacaaacgtgaccaaacatcaaagctaaagcaatgtttataaagttttatggtataactagggggaaatgagctgcacaaacctcaatgtattttaaatctgttgctgtcatcattaacggtatatgacatataaaagcaagttaaaatttacttttgtaaataaagtttttggtttgtttcc

SEQ ID NO: 3674 - protein, 1944 aa, Homo sapiens; identical to SEQ ID NO: 311

SEQ ID NO: 3675 - DNA, 282 bp, Homo sapiens
cccctcacccctgccccaattctaaagccatcatctttgtatttcagttgactggtatgcaatattatgaccctgttactgatttagaatatacttacgtcttcctgtttatatttgttcagccctgggtgacagagtgagagaccctgtctccaaaaaaaacaacaacaacaaaaaagaaacaacttttttttgtgagtgaagcttgcttgtaataggtcatttaaaaggttaaaaatattgtgtagagtaacatctccatttcatttggaaaaaatatgt

SEQ ID NO: 3676 - protein, 39 aa, Homo sapiens
FRIYLRLPVYICSALGDRVRDPVSKKNNNNKKETTFFCE

SEQ ID NO: 3677 - DNA, 753 bp, Homo sapiens
cgttaactccttatagtcacatacaccattacccactgatcctggtaaccactaattctccatcttgataatttggcatttgtgaatgttatataaatgggctcatacagtatgtaaacttctgagattgtctttttctgttcagtataatacttttaatacccatacaggttgttgcatgtatcaagtttcttttttattttattatttagctgtgtaaagtttcaagagagtaatgataaaacccagctcatctttggttcagtgaccaacataccagcaaaggatgcagcaccagtggagaaaatagacaccatgctggtcttggaaggcagtggaaacctggtgctatacacaggagtggttcgggtaagcaataagtagcacttcatgcctttagtaggacttcaggctgcctgcatgaatatttgtaatgttactttagattgatattttaaatttgttatgttcctgtctgcacaatttggcagaagaattttgttaataattctcagtgaagcttcctatttaggtgggtcctaatttggagggctatggctcactgctgttaaatgcattggtactctaaacctgtcacagatgggaaaccttcaatgagtataggtagatttttttttttttttaaagttaaagttttgaaattgaagcatgggtacctttggtaagtactaaagttttggtaaagtttcactatattaaatgtggtatatgttagctgtatttttttgagac

SEQ ID NO: 3678 - protein, 44 aa, Homo sapiens
MLYKWAHTVCKLLRLSFSVQYNTFNTHTGCCMYQVSFLFYYLAV

SEQ ID NO: 3679 - DNA, 850 bp, Homo sapiens
aaggaaagctggcagttaaggaaaggagtaagtgaaattggagaagatgtggactatgatgaggaactctatgttgctggaaatatggtgatatggagcaaaggaagtaaaagccaggcattggcagtttataaagcatttacagttgacagtcctgttcagcaggcattgtggtgtgacttcattatatcacaggataagtctgaaaaggcctacagtagcaatgaagtagaaaaatgcatatgtatattgcaaagctcatgtattaacatgcatagcatagaaggaaaggattacatagcttcattaccatttcaggtaaacaagtgtttcaaattttgggggggttttgttggagaacatttttgaattaattggttttagaggcatgtcttatgtctcatgtttcgtagtagtcaaaaatgttatttttactcaaaataactaaattttggcagctttagtggcttaccatttttctgtacttcacaagaaaataagttatttagtgaagtaaattaggaagtcttctgtggtatgtgtttgttggtttaaatgatacctaagaacttttggttatattaaataaggcatatgaataacaccagtctttttttgttactcatcgtctttttaatgcctagggctattgttaacacattgtcattttgttactgatcctggccagtggcaggaatttcacattgaacaactcctctttattagatttgattttatcttagagttgcttatttgtattactttttaagaaaataccgtatttaatgattatgttactttgtaaagctattactaaattggaaaataaaacattctgtaatgtttcttt

SEQ ID NO: 3680 - protein, 94 aa, Homo sapiens
MVIWSKGSKSQALAVYKAFTVDSPVQQALWCDFIISQDKSEKAYSSNEVEKCICILQSSCINMHSIEGKDYIASLPFQVNKCFKFWGGFVGEHF

SEQ ID NO: 3681 - DNA, 765 bp, Homo sapiens
ttgccagaaattgaggacggactcccgccctggtcgactgagctcccacaggagcgcctctgctgcgtctcggggctgagtgtggacgcgccgcgcgcggccccgccagggctggtagtttgcagaccgtccctgccgcggcccgctcggcggcggccctgcggctcccgcggcggcggccccgggcgcgatccagcccaggtagccgcgccgcaggctcggggcgtcgcgacctcgcgcctcgggccgcgtgggcacggcggccggcgggtgctcccggctgctgctgctgcccaacaaggaggcaatgggaaaacagtaagaggcagaccaacagtgatccagggctctgaaagctaattgcttcaagatcctgctaccattttcttttgggccgcttgcaaagaagaatcctttgactgaagcataatggaagtgaggaaaggcaaccagctgacacaggagccagagtgagaccagcagactctcacactcaacctacaccatgaatttgtgtctatcttctacgcgttaagagccaaggacaggtgaagttgccagagagcaatggctctcttcactccgtggaagttgtcctctcagaagctgggctttttcctggtgacttttggcttcatttggggtatgatgcttctgcactttaccatccagcagcgaactcagcctgaaagcagctccatgctgcgcgagcagatcctggacctcagcaaaaggtacatcaaggcactggcagaagaaaacagg

SEQ ID NO: 3682 - protein, 65 aa, Homo sapiens
MALFTPWKLSSQKLGFFLVTFGFIWGMMLLHFTIQQRTQPESSSMLREQILDLSKRYIKALAEEN

SEQ ID NO: 3683 - DNA, 5165 bp, Homo sapiens
taatactcctttattccctgttttaaaaatttttttaaatttgatacaataattatacataataatggagtaccatgtgagattcaatccacatatacattgtgaaatgatcaaattaggatagttagcatgcacatcacccccaaataattattacttttgtggtgagaacacttaaaattgtctcttttagaaatatacgttattattaaccatagtcaccttgctgtgcaatagaacaccagaacttattcctcctaaatgtaactttttacccattgaccactccctcctcatccccctctctcctccccacccctggtaaccactgttctgttatctcctatgatagcaactttttagcttctgcatgtgagattgtacggtagttgcctttctgtgcctggattatttcatttagcataatgtccttcgggtatatccctgttgctgcaaaagacaggatttctctctctttttctggttgaatagtattccattgtcagagaagtgttgtaagactaggaaaggaacactgcaggctggagccctggggaaagtggtctgaggcaggtggtgggactagagctggggtctggcaaacaggctgggtttgattgtcagcataatagagagcactcatgtgccagctgggtgggaggagcagccgagtgaagaaggggaagcctctcaggaagcatgtgcagggtttatggtaatgagcagaccagcaggtacgtagtgggagaggggtgtgatggggcagaggaacttacgttatgatagtacaagacagaggttgagcctcattttaataggcattgtggtgggtgttgaatagtgatggaatgtatgggtctggaatcaggctgcctggtcaagggctctgaaacatgagtgtgcatcagaatcacctcgaggcttgttaaaggataggctgtggaccacatctcctcagttgctgattcagtgggtgtgggtggggcctgagaattcacatttctcactggtgatgctgctgttactgagtttgggaccacatttggagaaccactggtctagaattgagaggttggcaaaccttctctgttaagaggtagatagtaaatattttaggccttctgggctacaaagagtatctgttacatattttttattgcttttcatgacccattaagcatatatatatcattctctgccatatacaaacaggctgttgggggagtgaggatgatgtagggaaggtggggcatggtttaataacccctgggccatgcctagatgatcagtcctctgccacatagctggctgacctttgccaagttaatcaccttttacctttattttctcatgtttctaataaaacagagacgataatattcatacttcttaccatatagaacttctgaggattcagtgagcaaagccacaaaagatggtatgtcacaatatctgggatatagctagaatttataatttatttttactctgttgataggcaatgggaaaacagtaagaggcagaccaacagtgatccagggctctgaaagctaattgcttcaagatcctgctaccattttcttttgggccgcttgcaaagaagaatcctttgactgaagcatgtatgtacactctgaagtacagcctgggttagtctcttataagggatcggatcattgctcagcctctcccttgagtggcacttagaaaatggcgctattcgtaagctgactggtattgggcccaggactctggctgaaggggtgggcatgctggtaaccatttgcaacctatgctcaggtcctacttgttgggaagccctgattgagaagagtggcctggtctgtgctggcattagataggatctggctgcattaatattgaaactactctgccttttaatgtctcattttgcctcatggtgggagtgaaagtgagaaccacagaaaatctgcctgccaggtgttccacatttcttgtgctacagcatgcaagtgagcagtgaggtgtaccttttcctcatgtagctgggaaagcaatacccctgcttgtacctctggcatatcttctctgtgctggtgcacctagagaggttgcctggtggccctgagagagccatctcatcactaaacactgatggtgaaagctggccatgctcaaataagatgtagcaatctacctcttctttgtctagttacccccaagggggcatccactttcttgctcacctcaccagttgcatgttctagtccttgccagaagcacataataatgactttgtaagcttaagttacaggcacacaaaagggcctgatggtgatatgactccaccctccccgtttttgctgacattccgccaaatatccttctgtctcctccccaccttgcaaaacaaacttcctgttttgaatttggtccaggctggaacagccccactacacctgttaacacacgcagacgcacacttcccccttcataattgcttagcttcttgttgcctagccagatttcccctcagcttacagttcctgaatcataagatattgaaccagcaaatttaagagttgacattttacttagaggtattcaagtgaaaacatggcttctggtttattttgctgtattgtgccatgaccacttggctaattcttctcctccttcacagcagaatggaagtgaggaaaggcaaccagctgacacaggagccagagtgagaccagcagactctcacactcaacctacaccatgaatttgtgtctatcttctacgcgttaagagccaaggacaggtgaagttgccagagagcaatggctctcttcactccgtggaagttgtcctctcagaagctgggctttttcctggtgacttttggcttcatttggggtatgatgcttctgcactttaccatccagcagcgaactcagcctgaaagcagctccatgctgcgcgagcagatcctggacctcagcaaaaggtacatcaaggcactggcagaagaaaacaggaatgtggtggatgggccatacgctggagtcatgacagcttatgatctgaagaaaacccttgctgtgttattagataacattttgcagcgcattggcaagttggagtcgaaggtggacaatcttgttgtcaatggcaccggaacaaactcaaccaactccactacagctgttcccagcttggttgcacttgagaaaattaatgtggcagatatcattaacggagctcaagaaaaatgtgtattgcctcctatggacggctaccctcactgtgagggaaagatcaagtggatgaaagacatgtggcgttcagatccctgctacgcagactatggagtggatggatccacctgctctttttttatttacctcagtgaggttgaaaattggtgtcctcatttaccttggagagcaaaaaatccctacgaagaagctgatcataattcattggcggaaattcgtacagattttaatattctctacagtatgatgaaaaagcatgaagaattccggtggatgagactacggatccggcgaatggctgacgcatggatccaagcaatcaagtccctggcagaaaagcagaaccttgaaaagagaaagcggaagaaagtcctcgttcacctgggactcctgaccaaggaatctggatttaagattgcagagacagctttcagtggtggccctcttggtgaattagttcaatggagtgatttaattacatctctgtacttactgggccatgacattaggatttcagcttcactggctgagctcaaggaaatcatgaagaaggttgtaggaaaccgatctggctgcccaactgtaggagacagaattgttgagctcatttacattgatattgtaggacttgctcaattcaagaaaactcttggaccatcctgggttcattaccagtgcatgctccgagtccttgattcatttggtactgaacccgaatttaatcatgcaaattatgcccaatcgaaaggccacaagaccccttggggaaaatggaatctgaaccctcagcagttttataccatgttccctcataccccagacaacagctttctggggtttgtggttgagcagcacctgaactccagtgatatccaccacattaatgaaatcaaaaggcagaaccagtcccttgtgtatggcaaagtggatagcttctggaagaataagaagatctacttggacattattcacacatacatggaagtgcatgcaactgtttatggctccagcacaaagaatattcccagttacgtgaaaaaccatggtatcctcagtggacgggacctgcagttccttcttcgagaaaccaagttgtttgttggacttgggttcccttacgagggcccagctcccctggaagctatcgcaaatggatgtgcttttctgaatcccaagttcaacccacccaaaagcagcaaaaacacagactttttcattggcaagccaactctgagagagctgacatcccagcatccttacgctgaagttttcatcgggcggccacatgtgtggactgttgacctcaacaatcaggaggaagtagaggatgcagtgaaagcaattttaaatcagaagattgagccatacatgccatatgaatttacgtgcgaggggatgctacagagaatcaatgctttcattgaaaaacaggacttctgccatgggcaagtgatgtggccacccctcagcgccctacaggtcaagcttgctgagcccgggcagtcctgcaagcaggtgtgccaggagagccagctcatctgcgagccttctttcttccagcacctcaacaaggacaaggacatgctgaagtacaaggtgacctgccaaagctcagagctggccaaggacatcctggtgccctcctttgaccctaagaataagcactgtgtgtttcaaggtgacctcctgctcttcagctgtgcaggcgcccaccccaggcaccagagggtctgcccctgccgggacttcatcaagggccaggtggctctctgcaaagactgcctatagcagctacctgctcagccctgcaccatgctgctggggaagacagtggccccagccccgtcaggcagggccagggacagaagtcatgcagggactctggcaagagcctgaactttttcgtagaaggttctgaat

SEQ ID NO: 3684 - protein, 741 aa, Homo sapiens; identical to SEQ ID NO: 313

SEQ ID NO: 3685 - DNA, 1745 bp, Homo sapiens
tcagactgctgtgctagcaatcagcgagactccctgtgagtaggaccctccgagccaggtgcggcttataatctcgtggtgcgccgttttttaagccggtcggaaaagcgcagtattcgggtgggagtgacccgattttccagggatggaagaagatacttggaaaaatcagggaagagtgaagaagatacttcaaaaaatcggggaagattttcatcataaggtccaagcaaagattcctgagcctgagtctactgacaaatataccacatccccagagtaagttggagtctcttaaaattgtcttgctggcatctagcggagattgtccccacaagcatgttccttatgacggatgcctgggtcagaacacataatacattcctttttataagcacaaagattctgagaagcactgcccctcccacgtgtcacactctggggagagattattggaatgcctcttggatcaggtatctttggtgatcattccacctagttaagatgaagctggtgatagcctttggcttgtttcaggtaatgtaaccagattttccagtgacttgtgaattaacaggctaaaaactagttttcagtttctggagaagggttcccaatctcatttgaggctattggaggaaaaatcccttcagaaaataaagcatgacagtaagattttagtatgcaggaagtaaattcagttcctttggagatcagcatgcctctattcaatcctctccttaatcccttatgagtcagatctagtagagggttggaccaggaaattgagtgtagggttataggtgataagatgaggagaggcactcccctcaggagttaagatgcaggaaatttggtttgcactttagccagtacaaggcatttcaccaggatggagaatatgtgctctcttgcacagaaatccgtgccagcagtaagtgatgtggaaggatttagtgaaattttgccaataaccccaggcttactgcttaatgaacagaacattctcctgggacttgaagaggtcctatgaaataagggacataaatgatgtactttcttttctgttaggcttaagaaattctgttctgagtgcaaatagagggaatgatttccgactttcctattagatagcagatatctttgcatcttggatacatttagaaagaatagaaatgtgaatgattgaaacctagtcagtcaattgatttattagaattcctggaagaagtctgagtaaacacaatctcattctctttctttttctctctgtcagttcttcttcttgggttcctatactatgggatataaatgaaacagtgcaatgtaaaactagtataatgatggtcgagagtaggtccccaataaatcttggttattactgttattggagagaatgatgaaatttaaagctagtgggggaaaaagaatcgtacaaactggaaatgaattggaatgagtgttgcttcaggttgccctcaatttggtatcagtaccctcagtaaatcagagttgctgtgacctgggctttgatgtaagggtagcagaatgatttagaaaaaacagcattagattaaaagccagagacatattatagtcctagttctttcgcttactagagatttgaccttgaaaagcttaatttgtttaaatcccgtttcctcatctgaaaaatgaagactgatgatatctgtcctaactccatcttgtgatgatccaatggaataaagtgctgtcaaaatgtg

SEQ ID NO: 3686 - protein, 48 aa, Homo sapiens
MFLMTDAWVRTHNTFLFISTKILRSTAPPTCHTLGRDYWNASWIRYLW

SEQ ID NO: 3687 - DNA, 8795 bp, Homo sapiens
taccctaaccatcttggatgctgggctttgttatgctgtaattcataaggctctgttttatcagagattatggagcaagaaaactgaagccaagccacatcaaggtttgacagggatgagatacctgtcaaggattcatagtagagtggcttactgggaaaggagcaaagaatctcttctagggatattgtaagaataaatgagataattcacagaagggacctggagcttttccggaaaaaggtgctgtgactatctaaggtaattcgtatgcaagaagctacacgtaattaaatgtgcaggatgaaaagatggcacaggcactgttggtacccccaggacctgaaagcttccgcctttttactagagaatctcttgctgctatcgaaaaacgtgctgcagaagagaaagccaagaagcccaaaaaggaacaagataatgatgatgagaacaaaccaaagccaaatagtgacttggaagctggaaagaaccttccatttatttatggagacattcctccagagatggtgtcagagcccctggaggacctggatccctactatatcaataagaaaacttttatagtaatgaataaaggaaaggcaattttccgattcagtgccacctctgccttgtatattttaactccactaaaccctgttaggaaaattgctatcaagattttggtacattctttattcagcatgcttatcatgtgcactattttgaccaactgtgtatttatgaccttgagcaaccctcctgactggacaaagaatgtagagtacacattcactggaatctatacctttgagtcacttataaaaatcttggcaagagggttttgcttagaagattttacgtttcttcgtgatccatggaactggctggatttcagtgtcattgtgatggcgtatgtaacagaatttgtaagcctaggcaatgtttcagcccttcgaactttcagagtcttgagagctctgaaaactatttctgtaattccaggtttaaagaccattgtgggggccctgatccagtcggtaaagaagctttctgatgtgatgatcctgactgtgttctgtctgagcgtgtttgctctcattgggctgcagctgttcatgggcaatctgaggaataaatgtttgcagtggcccccaagcgattctgcttttgaaaccaacaccacttcctactttaatggcacaatggattcaaatgggacatttgttaatgtaacaatgagcacatttaactggaaggattacattggagatgacagtcacttttatgttttggatgggcaaaaagaccctttactctgtggaaatggctcagatgcaggccagtgtccagaaggatacatctgtgtgaaggctggtcgaaaccccaactatggctacacaagctttgacacctttagctgggctttcctgtctctatttcgactcatgactcaagactactgggaaaatctttaccagttgacattacgtgctgctgggaaaacatacatgatattttttgtcctggtcattttcttgggctcattttatttggtgaatttgatcctggctgtggtggccatggcctatgaggagcagaatcaggccaccttggaagaagcagaacaaaaagaggccgaatttcagcagatgctcgaacagcttaaaaagcaacaggaagaagctcaggcagttgcggcagcatcagctgcttcaagagatttcagtggaataggtgggttaggagagctgttggaaagttcttcagaagcatcaaagttgagttccaaaagtgctaaagaatggaggaaccgaaggaagaaaagaagacagagagagcaccttgaaggaaacaacaaaggagagagagacagctttcccaaatccgaatctgaagacagcgtcaaaagaagcagcttccttttctccatggatggaaacagactgaccagtgacaaaaaattctgctcccctcatcagtctctcttgagtatccgtggctccctgttttccccaagacgcaatagcaaaacaagcattttcagtttcagaggtcgggcaaaggatgttggatctgaaaatgactttgctgatgatgaacacagcacatttgaagacagcgaaagcaggagagactcactgtttgtgccgcacagacatggagagcgacgcaacagtaacggcaccaccacagaaacggaagtcagaaagagaaggttaagctcttaccagatttcaatggagatgctggaggattcctctggaaggcaaagagccgtgagcatagccagcattctgaccaacacaatggaagaacttgaagaatctagacagaaatgtccgccatgctggtatagatttgccaatgtgttcttgatctgggactgctgtgatgcatggttaaaagtaaaacatcttgtgaatttaattgttatggatccatttgttgatcttgccatcactatttgcattgtcttaaataccctctttatggccatggagcactaccccatgactgagcaattcagtagtgtgttgactgtaggaaacctggtctttactgggattttcacagcagaaatggttctcaagatcattgccatggatccttattactatttccaagaaggctggaatatctttgatggaattattgtcagcctcagtttaatggagcttggtctgtcaaatgtggagggattgtctgtactgcgatcattcagactgcttagagttttcaagttggcaaaatcctggcccacactaaatatgctaattaagatcattggcaattctgtgggggctctaggaaacctcaccttggtgttggccatcatcgtcttcatttttgctgtggtcggcatgcagctctttggtaagagctacaaagaatgtgtctgcaagatcaatgatgactgtacgctcccacggtggcacatgaacgacttcttccactccttcctgattgtgttccgcgtgctgtgtggagagtggatagagaccatgtgggactgtatggaggtcgctggccaaaccatgtgccttattgttttcatgttggtcatggtcattggaaaccttgtggttctgaacctctttctggccttattgttgagttcatttagctcagacaaccttgctgctactgatgatgacaatgaaatgaataatctgcagattgcagtaggaagaatgcaaaagggaattgattatgtgaaaaataagatgcgggagtgtttccaaaaagccttttttagaaagccaaaagttatagaaatccatgaaggcaataagatagacagctgcatgtccaataatactggaattgaaataagcaaagagcttaattatcttagagatgggaatggaaccaccagtggtgtaggtactggaagcagtgttgaaaaatacgtaatcgatgaaaatgattatatgtcattcataaacaaccccagcctcaccgtcacagtgccaattgctgttggagagtctgactttgaaaacttaaatactgaagagttcagcagtgagtcagaactagaagaaagcaaagagaaattaaatgcaaccagctcatctgaaggaagcacagttgatgttgttctaccccgagaaggtgaacaagctgaaactgaacccgaagaagaccttaaaccggaagcttgttttactgaaggatgtattaaaaagtttccattctgtcaagtaagtacagaagaaggcaaagggaagatctggtggaatcttcgaaaaacctgctacagtattgttgagcacaactggtttgagactttcattgtgttcatgatccttctcagtagtggtgcattggcctttgaagatatatacattgaacagcgaaagactatcaaaaccatgctagaatatgctgacaaagtctttacctatatattcattctggaaatgcttctcaaatgggttgcttatggatttcaaacatatttcactaatgcctggtgctggctagatttcttgatcgttgatgtttctttggttagcctggtagccaatgctcttggctactcagaactcggtgccatcaaatcattacggacattaagagctttaagacctctaagagccttatcccggtttgaaggcatgagggtggttgtgaatgctcttgttggagcaattccctctatcatgaatgtgctgttggtctgtctcatcttctggttgatctttagcatcatgggtgtgaatttgtttgctggcaagttctaccactgtgttaacatgacaacgggtaacatgtttgacattagtgatgttaacaatttgagtgactgtcaggctcttggcaagcaagctcggtggaaaaacgtgaaagtaaactttgataatgttggcgctggctatcttgcactgcttcaagtggccacatttaaaggctggatggatattatgtatgcagctgttgattcacgagatgttaaacttcagcctgtatatgaagaaaatctgtacatgtatttatactttgtcatctttatcatctttgggtcattcttcactctgaatctattcattggtgtcatcatagataacttcaaccagcagaaaaagaagataagaggtcaagacatctttatgacagaggaacagaaaaaatattacaatgcaatgaagaaacttggatccaagaaacctcagaaacccatacctcgcccagcaaacaaattccaaggaatggtctttgattttgtaaccagacaagtctttgatatcagcatcatgatcctcatctgcctcaacatggtcaccatgatggtggaaacggatgaccagggcaaatacatgaccctagttttgtcccggatcaacctagtgttcattgttctgttcactggagaatttgtgctgaagctcgtctccctcagacactactacttcactataggctggaacatctttgactttgtggtggtgattctctccattgtaggtatgtttctggctgagatgatagaaaagtattttgtgtcccctaccttgttccgagtgatccgtcttgccaggattggccgaatcctacgtctgatcaaaggagcaaaggggatccgcacgctgctctttgctttgatgatgtcccttcctgcgttgtttaacatcggcctcctgctcttcctggtcatgtttatctatgccatctttgggatgtccaactttgcctatgttaaaaaggaagctggaattgatgacatgttcaactttgagacctttggcaacagcatgatctgcttgttccaaattacaacctctgctggctgggatggattgctagcacctattcttaatagtgcaccacccgactgtgaccctgacacaattcaccctggcagctcagttaagggagactgtgggaacccatctgttgggattttcttttttgtcagttacatcatcatatccttcctggttgtggtgaacatgtacatcgcggtcatcctggagaacttcagtgttgctactgaagaaagtgcagagcccctgagtgaggatgactttgagatgttctatgaggtttgggaaaagtttgatcccgatgcgacccagtttatagagttctctaaactctctgattttgcagctgccctggatcctcctcttctcatagcaaaacccaacaaagtccagcttattgccatggatctgcccatggtcagtggtgaccggatccactgtcttgatattttatttgcctttacaaagcgtgttttgggtgagagtggagagatggatgcccttcgaatacagatggaagacaggtttatggcatcaaacccctccaaagtctcttatgagcctattacaaccactttgaaacgtaaacaagaggaggtgtctgccgctatcattcagcgtaatttcagatgttatcttttaaagcaaaggttaaaaaatatatcaagtaactataacaaagaggcaattaaagggaggattgacttacctataaaacaagacatgattattgacaaactaaatgggaactccactccagaaaaaacagatgggagttcctctaccacctctcctccttcctatgatagtgtaacaaaaccagacaaggaaaagtttgagaaagacaaaccagaaaaagaaagcaaaggaaaagaggtcagagaaaatcaaaagtaaaaagaaacaaagaattatctttgtgatcaattgtttacagcctatgaaggtaaagtatatgtgtcaactggacttcaagaggaggtccatgccaaactgactgttttaacaaatactcatagtcagtgcctatacaagacagtgaagtgacctctctgtcactgcaactctgtgaagcagggtatcaacattgacaagaggttgctgtttttattaccagctgacactgctgaggagaaacccaatggctacctagactatagggatagttgtgcaaagtgaacattgtaactacaccaaacacctttagtacagtccttgcatccattctatttttaacttccatatctgccatatttttacaaaatttgttctagtgcatttccatggtccccaattcatagtttattcataatgctatgtcactatttttgtaaatgaggtttacgttgaagaaacagtatacaagaaccctgtctctcaaatgatcagacaaaggtgttttgccagagagataaaatttttgctcaaaaccagaaaaagaattgtaatggctacagtttcagttacttccattttctagatggctttaattttgaaagtattttagtctgttatgtttgtttctatctgaacagttatgtgcctgtaaagtctcctctaatatttaaaggattatttttatgcaaagtattctgtttcagcaagtgcaaattttattctaagtttcagagctctatatttaatttaggtcaaatgctttccaaaaagtaatctaataaatccattctagaaaaatatatctaaagtattgctttagaatagttgttccactttctgctgcagtattgctttgccatcttctgctctcagcaaagctgatagtctatgtcaattaaataccctatgttatgtaaatagttattttatcctgtggtgcatgtttgggcaaatatatatatagcctgataaacaacttctattaaatcaaatatgtaccacagtgtatgtgtcttttgcaagcttccaacagggatgtatcctgtatcattcattaaacatagtttaaaggctatcactaatgcatgttaatattgcctatgctgctctattttactcaatccattcttcacaagtcttggttaaagaatgtcacatattggtgatagaatgaattcaacctgctctgtccattatgtcaagcagaataatttgaagctatttacaaacacctttacttttgcacttttaattcaacatgagtatcatatggtatctctctagatttcaaggaaacacactggatactgcctactgacaaaacctattcttcatattttgctaaaaatatgtctaaaacttgtttaaatataaataatgtaaaaatataatcaactttatttgtcagcattttgtacataagaaaattattttcaggttgatgacatcacaatttattttactttatgcttttgcttttgatttttaatcacaattccaaacttttgaatccataagatttttcaatggataatttcctaaaataaaagttagataatgggttttatggatttctttgttataatatattttctaccattccaataggagatacattggtcaaacactcaaacctagatcattttctaccaactatggttgcctcaatataaccttttattcatagatgtttttttttattcaacttttgtagtatttacgtatgcagactagtcttatttttttaattcctgctgcactaaagctattacaaatataacatggactttgttctttttagccatgaacaaagtggcaaagttgtgcaattacctaacatgatataaatttttgttttttgcacaaaccaaaagtttaatgttaattctttttacaaaactatttactgtagtgtattgaagaactgcatgcagggaattgctattgctaaaaagaatggtgagctacgtcattattgagccaaaagaataaatttcattttttattgcatttcacttattggcctctggggttttttgtttttgttttttgctgttggcagtttaaaatatatataattaataaaacctgtgcttgatctgacatttgtatacataaaagtttacatgaattttacaacaaactagtgcatgattcaccaagcagtactacagaacaaaggcaaattaaaagcagctttgtgaacttttatgtgtgcaaaggatcaagttcacatgttccaactttcaggtttgataataatagtagtaaccacctacaatagctttcaatttcaattaactcccttggctataagcatctaaactcatcttctttcaatataattgatgctatctcctaattacttggtggctaataaatgttacattctttgttacttaaatgcattatataaactcctatgtatacataaggtattaatgatatagttattgagaatttatattaacttttttttcaagaacccttggatttatgtgaggtcaaaaccaaactcttattctcagtggaaaactccagttgtaatgcatatttttaaagacaatttggatctaaatatgtatttcataattctcccataataaattatataaggtggctaattgg

SEQ ID NO: 3688 - protein, 1951 aa, Homo sapiens
MAQALLVPPGPESFRLFTRESLAAIEKRAAEEKAKKPKKEQDNDDENKPKPNSDLEAGKNLPFIYGDIPPEMVSEPLEDLDPYYINKKTFIVMNKGKAIFRFSATSALYILTPLNPVRKIAIKILVHSLFSMLIMCTILTNCVFMTLSNPPDWTKNVEYTFTGIYTFESLIKILARGFCLEDFTFLRDPWNWLDFSVIVMAYVTEFVSLGNVSALRTFRVLRALKTISVIPGLKTIVGALIQSVKKLSDVMILTVFCLSVFALIGLQLFMGNLRNKCLQWPPSDSAFETNTTSYFNGTMDSNGTFVNVTMSTFNWKDYIGDDSHFYVLDGQKDPLLCGNGSDAGQCPEGYICVKAGRNPNYGYTSFDTFSWAFLSLFRLMTQDYWENLYQLTLRAAGKTYMIFFVLVIFLGSFYLVNLILAVVAMAYEEQNQATLEEAEQKEAEFQQMLEQLKKQQEEAQAVAAASAASRDFSGIGGLGELLESSSEASKLSSKSAKEWRNRRKKRRQREHLEGNNKGERDSFPKSESEDSVKRSSFLFSMDGNRLTSDKKFCSPHQSLLSIRGSLFSPRRNSKTSIFSFRGRAKDVGSENDFADDEHSTFEDSESRRDSLFVPHRHGERRNSNGTTTETEVRKRRLSSYQISMEMLEDSSGRQRAVSIASILTNTMEELEESRQKCPPCWYRFANVFLIWDCCDAWLKVKHLVNLIVMDPFVDLAITICIVLNTLFMAMEHYPMTEQFSSVLTVGNLVFTGIFTAEMVLKIIAMDPYYYFQEGWNIFDGIIVSLSLMELGLSNVEGLSVLRSFRLLRVFKLAKSWPTLNMLIKIIGNSVGALGNLTLVLAIIVFIFAVVGMQLFGKSYKECVCKINDDCTLPRWHMNDFFHSFLIVFRVLCGEWIETMWDCMEVAGQTMCLIVFMLVMVIGNLVVLNLFLALLLSSFSSDNLAATDDDNEMNNLQIAVGRMQKGIDYVKNKMRECFQKAFFRKPKVIEIHEGNKIDSCMSNNTGIEISKELNYLRDGNGTTSGVGTGSSVEKYVIDENDYMSFINNPSLTVTVPIAVGESDFENLNTEEFSSESELEESKEKLNATSSSEGSTVDVVLPREGEQAETEPEEDLKPEACFTEGCIKKFPFCQVSTEEGKGKIWWNLRKTCYSIVEHNWFETFIVFMILLSSGALAFEDIYIEQRKTIKTMLEYADKVFTYIFILEMLLKWVAYGFQTYFTNAWCWLDFLIVDVSLVSLVANALGYSELGAIKSLRTLRALRPLRALSRFEGMRVVVNALVGAIPSIMNVLLVCLIFWLIFSIMGVNLFAGKFYHCVNMTTGNMFDISDVNNLSDCQALGKQARWKNVKVNFDNVGAGYLALLQVATFKGWMDIMYAAVDSRDVKLQPVYEENLYMYLYFVIFIIFGSFFTLNLFIGVIIDNFNQQKKKIRGQDIFMTEEQKKYYNAMKKLGSKKPQKPIPRPANKFQGMVFDFVTRQVFDISIMILICLNMVTMMVETDDQGKYMTLVLSRINLVFIVLFTGEFVLKLVSLRHYYFTIGWNIFDFVVVILSIVGMFLAEMIEKYFVSPTLFRVIRLARIGRILRLIKGAKGIRTLLFALMMSLPALFNIGLLLFLVMFIYAIFGMSNFAYVKKEAGIDDMFNFETFGNSMICLFQITTSAGWDGLLAPILNSAPPDCDPDTIHPGSSVKGDCGNPSVGIFFFVSYIIISFLVVVNMYIAVILENFSVATEESAEPLSEDDFEMFYEVWEKFDPDATQFIEFSKLSDFAAALDPPLLIAKPNKVQLIAMDLPMVSGDRIHCLDILFAFTKRVLGESGEMDALRIQMEDRFMASNPSKVSYEPITTTLKRKQEEVSAAIIQRNFRCYLLKQRLKNISSNYNKEAIKGRIDLPIKQDMIIDKLNGNSTPEKTDGSSSTTSPPSYDSVTKPDKEKFEKDKPEKESKGKEVRENQK

SEQ ID NO: 3689 - DNA, 9017 bp, Homo sapiens
ttttttttttcctcaaagctgttttctgatatatgttgggtaccatagagtgaatctcagaacaggaagcggaggcataagcagagaggattctggaaaggtctctttgttttcttatccacagagaaagaaagaaaaaaaattgtaactaatttgtaaacctctgtggtcaaaaaaaaaaaaaaaaaaaaaagctgaacagctgcagaggaagacacgttataccctaaccatcttggatgctgggctttgttatgctgtaattcataaggctctgttttatcagagattatggagcaagaaaactgaagccaagccacatcaaggtttgacagggatgagatacctgtcaaggattcatagtagagtggcttactgggaaaggagcaaagaatctcttctagggatattgtaagaataaatgagataattcacagaagggacctggagcttttccggaaaaaggtgctgtgactatctaaggtaattcgtatgcaagaagctacacgtaattaaatgtgcaggatgaaaagatggcacaggcactgttggtacccccaggacctgaaagcttccgcctttttactagagaatctcttgctgctatcgaaaaacgtgctgcagaagagaaagccaagaagcccaaaaaggaacaagataatgatgatgagaacaaaccaaagccaaatagtgacttggaagctggaaagaaccttccatttatttatggagacattcctccagagatggtgtcagagcccctggaggacctggatccctactatatcaataagaaaacttttatagtaatgaataaaggaaaggcaattttccgattcagtgccacctctgccttgtatattttaactccactaaaccctgttaggaaaattgctatcaagattttggtacattctttattcagcatgcttatcatgtgcactattttgaccaactgtgtatttatgaccttgagcaaccctcctgactggacaaagaatgtagagtacacattcactggaatctatacctttgagtcacttataaaaatcttggcaagagggttttgcttagaagattttacgtttcttcgtgatccatggaactggctggatttcagtgtcattgtgatggcatatgtgacagagtttgtggacctgggcaatgtctcagcgttgagaacattcagagttctccgagcactgaaaacaatttcagtcattccaggtttaaagaccattgtgggggccctgatccagtcggtaaagaagctttctgatgtgatgatcctgactgtgttctgtctgagcgtgtttgctctcattgggctgcagctgttcatgggcaatctgaggaataaatgtttgcagtggcccccaagcgattctgcttttgaaaccaacaccacttcctactttaatggcacaatggattcaaatgggacatttgttaatgtaacaatgagcacatttaactggaaggattacattggagatgacagtcacttttatgttttggatgggcaaaaagaccctttactctgtggaaatggctcagatgcaggccagtgtccagaaggatacatctgtgtgaaggctggtcgaaaccccaactatggctacacaagctttgacacctttagctgggctttcctgtctctatttcgactcatgactcaagactactgggaaaatctttaccagttgacattacgtgctgctgggaaaacatacatgatattttttgtcctggtcattttcttgggctcattttatttggtgaatttgatcctggctgtggtggccatggcctatgaggagcagaatcaggccaccttggaagaagcagaacaaaaagaggccgaatttcagcagatgctcgaacagcttaaaaagcaacaggaagaagctcaggcagttgcggcagcatcagctgcttcaagagatttcagtggaataggtgggttaggagagctgttggaaagttcttcagaagcatcaaagttgagttccaaaagtgctaaagaatggaggaaccgaaggaagaaaagaagacagagagagcaccttgaaggaaacaacaaaggagagagagacagctttcccaaatccgaatctgaagacagcgtcaaaagaagcagcttccttttctccatggatggaaacagactgaccagtgacaaaaaattctgctcccctcatcagtctctcttgagtatccgtggctccctgttttccccaagacgcaatagcaaaacaagcattttcagtttcagaggtcgggcaaaggatgttggatctgaaaatgactttgctgatgatgaacacagcacatttgaagacagcgaaagcaggagagactcactgtttgtgccgcacagacatggagagcgacgcaacagtaacggcaccaccacagaaacggaagtcagaaagagaaggttaagctcttaccagatttcaatggagatgctggaggattcctctggaaggcaaagagccgtgagcatagccagcattctgaccaacacaatggaagaacttgaagaatctagacagaaatgtccgccatgctggtatagatttgccaatgtgttcttgatctgggactgctgtgatgcatggttaaaagtaaaacatcttgtgaatttaattgttatggatccatttgttgatcttgccatcactatttgcattgtcttaaataccctctttatggccatggagcactaccccatgactgagcaattcagtagtgtgttgactgtaggaaacctggtctttactgggattttcacagcagaaatggttctcaagatcattgccatggatccttattactatttccaagaaggctggaatatctttgatggaattattgtcagcctcagtttaatggagcttggtctgtcaaatgtggagggattgtctgtactgcgatcattcagactgcttagagttttcaagttggcaaaatcctggcccacactaaatatgctaattaagatcattggcaattctgtgggggctctaggaaacctcaccttggtgttggccatcatcgtcttcatttttgctgtggtcggcatgcagctctttggtaagagctacaaagaatgtgtctgcaagatcaatgatgactgtacgctcccacggtggcacatgaacgacttcttccactccttcctgattgtgttccgcgtgctgtgtggagagtggatagagaccatgtgggactgtatggaggtcgctggccaaaccatgtgccttattgttttcatgttggtcatggtcattggaaaccttgtggttctgaacctctttctggccttattgttgagttcatttagctcagacaaccttgctgctactgatgatgacaatgaaatgaataatctgcagattgcagtaggaagaatgcaaaagggaattgattatgtgaaaaataagatgcgggagtgtttccaaaaagccttttttagaaagccaaaagttatagaaatccatgaaggcaataagatagacagctgcatgtccaataatactggaattgaaataagcaaagagcttaattatcttagagatgggaatggaaccaccagtggtgtaggtactggaagcagtgttgaaaaatacgtaatcgatgaaaatgattatatgtcattcataaacaaccccagcctcaccgtcacagtgccaattgctgttggagagtctgactttgaaaacttaaatactgaagagttcagcagtgagtcagaactagaagaaagcaaagagaaattaaatgcaaccagctcatctgaaggaagcacagttgatgttgttctaccccgagaaggtgaacaagctgaaactgaacccgaagaagaccttaaaccggaagcttgttttactgaaggatgtattaaaaagtttccattctgtcaagtaagtacagaagaaggcaaagggaagatctggtggaatcttcgaaaaacctgctacagtattgttgagcacaactggtttgagactttcattgtgttcatgatccttctcagtagtggtgcattggcctttgaagatatatacattgaacagcgaaagactatcaaaaccatgctagaatatgctgacaaagtctttacctatatattcattctggaaatgcttctcaaatgggttgcttatggatttcaaacatatttcactaatgcctggtgctggctagatttcttgatcgttgatgtttctttggttagcctggtagccaatgctcttggctactcagaactcggtgccatcaaatcattacggacattaagagctttaagacctctaagagccttatcccggtttgaaggcatgagggtggttgtgaatgctcttgttggagcaattccctctatcatgaatgtgctgttggtctgtctcatcttctggttgatctttagcatcatgggtgtgaatttgtttgctggcaagttctaccactgtgttaacatgacaacgggtaacatgtttgacattagtgatgttaacaatttgagtgactgtcaggctcttggcaagcaagctcggtggaaaaacgtgaaagtaaactttgataatgttggcgctggctatcttgcactgcttcaagtggccacatttaaaggctggatggatattatgtatgcagctgttgattcacgagatgttaaacttcagcctgtatatgaagaaaatctgtacatgtatttatactttgtcatctttatcatctttgggtcattcttcactctgaatctattcattggtgtcatcatagataacttcaaccagcagaaaaagaagataagaggtcaagacatctttatgacagaggaacagaaaaaatattacaatgcaatgaagaaacttggatccaagaaacctcagaaacccatacctcgcccagcaaacaaattccaaggaatggtctttgattttgtaaccagacaagtctttgatatcagcatcatgatcctcatctgcctcaacatggtcaccatgatggtggaaacggatgaccagggcaaatacatgaccctagttttgtcccggatcaacctagtgttcattgttctgttcactggagaatttgtgctgaagctcgtctccctcagacactactacttcactataggctggaacatctttgactttgtggtggtgattctctccattgtaggtatgtttctggctgagatgatagaaaagtattttgtgtcccctaccttgttccgagtgatccgtcttgccaggattggccgaatcctacgtctgatcaaaggagcaaaggggatccgcacgctgctctttgctttgatgatgtcccttcctgcgttgtttaacatcggcctcctgctcttcctggtcatgtttatctatgccatctttgggatgtccaactttgcctatgttaaaaaggaagctggaattgatgacatgttcaactttgagacctttggcaacagcatgatctgcttgttccaaattacaacctctgctggctgggatggattgctagcacctattcttaatagtgcaccacccgactgtgaccctgacacaattcaccctggcagctcagttaagggagactgtgggaacccatctgttgggattttcttttttgtcagttacatcatcatatccttcctggttgtggtgaacatgtacatcgcggtcatcctggagaacttcagtgttgctactgaagaaagtgcagagcccctgagtgaggatgactttgagatgttctatgaggtttgggaaaagtttgatcccgatgcgacccagtttatagagttctctaaactctctgattttgcagctgccctggatcctcctcttctcatagcaaaacccaacaaagtccagcttattgccatggatctgcccatggtcagtggtgaccggatccactgtcttgatattttatttgcctttacaaagcgtgttttgggtgagagtggagagatggatgcccttcgaatacagatggaagacaggtttatggcatcaaacccctccaaagtctcttatgagcctattacaaccactttgaaacgtaaacaagaggaggtgtctgccgctatcattcagcgtaatttcagatgttatcttttaaagcaaaggttaaaaaatatatcaagtaactataacaaagaggcaattaaagggaggattgacttacctataaaacaagacatgattattgacaaactaaatgggaactccactccagaaaaaacagatgggagttcctctaccacctctcctccttcctatgatagtgtaacaaaaccagacaaggaaaagtttgagaaagacaaaccagaaaaagaaagcaaaggaaaagaggtcagagaaaatcaaaagtaaaaagaaacaaagaattatctttgtgatcaattgtttacagcctatgaaggtaaagtatatgtgtcaactggacttcaagaggaggtccatgccaaactgactgttttaacaaatactcatagtcagtgcctatacaagacagtgaagtgacctctctgtcactgcaactctgtgaagcagggtatcaacattgacaagaggttgctgtttttattaccagctgacactgctgaggagaaacccaatggctacctagactatagggatagttgtgcaaagtgaacattgtaactacaccaaacacctttagtacagtccttgcatccattctatttttaacttccatatctgccatatttttacaaaatttgttctagtgcatttccatggtccccaattcatagtttattcataatgctatgtcactatttttgtaaatgaggtttacgttgaagaaacagtatacaagaaccctgtctctcaaatgatcagacaaaggtgttttgccagagagataaaatttttgctcaaaaccagaaaaagaattgtaatggctacagtttcagttacttccattttctagatggctttaattttgaaagtattttagtctgttatgtttgtttctatctgaacagttatgtgcctgtaaagtctcctctaatatttaaaggattatttttatgcaaagtattctgtttcagcaagtgcaaattttattctaagtttcagagctctatatttaatttaggtcaaatgctttccaaaaagtaatctaataaatccattctagaaaaatatatctaaagtattgctttagaatagttgttccactttctgctgcagtattgctttgccatcttctgctctcagcaaagctgatagtctatgtcaattaaataccctatgttatgtaaatagttattttatcctgtggtgcatgtttgggcaaatatatatatagcctgataaacaacttctattaaatcaaatatgtaccacagtgtatgtgtcttttgcaagcttccaacagggatgtatcctgtatcattcattaaacatagtttaaaggctatcactaatgcatgttaatattgcctatgctgctctattttactcaatccattcttcacaagtcttggttaaagaatgtcacatattggtgatagaatgaattcaacctgctctgtccattatgtcaagcagaataatttgaagctatttacaaacacctttacttttgcacttttaattcaacatgagtatcatatggtatctctctagatttcaaggaaacacactggatactgcctactgacaaaacctattcttcatattttgctaaaaatatgtctaaaacttgtttaaatataaataatgtaaaaatataatcaactttatttgtcagcattttgtacataagaaaattattttcaggttgatgacatcacaatttattttactttatgcttttgcttttgatttttaatcacaattccaaacttttgaatccataagatttttcaatggataatttcctaaaataaaagttagataatgggttttatggatttctttgttataatatattttctaccattccaataggagatacattggtcaaacactcaaacctagatcattttctaccaactatggttgcctcaatataaccttttattcatagatgtttttttttattcaacttttgtagtatttacgtatgcagactagtcttatttttttaattcctgctgcactaaagctattacaaatataacatggactttgttctttttagccatgaacaaagtggcaaagttgtgcaattacctaacatgatataaatttttgttttttgcacaaaccaaaagtttaatgttaattctttttacaaaactatttactgtagtgtattgaagaactgcatgcagggaattgctattgctaaaaagaatggtgagctacgtcattattgagccaaaagaataaatttcattttttattgcatttcacttattggcctctggggttttttgtttttgttttttgctgttggcagtttaaaatatatataattaataaaacctgtgcttgatctgacatttgtatacataaaagtttacatgaattttacaacaaactagtgcatgattcaccaagcagtactacagaacaaaggcaaattaaaagcagctttgtgaacttttatgtgtgcaaaggatcaagttcacatgttccaactttcaggtttgataataatagtagtaaccacctacaatagctttcaatttcaattaactcccttggctataagcatctaaactcatcttctttcaatataattgatgctatctcctaattacttggtggctaataaatgttacattctttgttacttaaatgcattatataaactcctatgtatacataaggtattaatgatatagttattgagaatttatattaacttttttttcaagaacccttggatttatgtgaggtcaaaaccaaactcttattctcagtggaaaactccagttgtaatgcatatttttaaagacaatttggatctaaatatgtatttcataattctcccataataaattatataaggtggctaattgg

SEQ ID NO: 3690 - protein, 1951 aa, Homo sapiens
MAQALLVPPGPESFRLFTRESLAAIEKRAAEEKAKKPKKEQDNDDENKPKPNSDLEAGKNLPFIYGDIPPEMVSEPLEDLDPYYINKKTFIVMNKGKAIFRFSATSALYILTPLNPVRKIAIKILVHSLFSMLIMCTILTNCVFMTLSNPPDWTKNVEYTFTGIYTFESLIKILARGFCLEDFTFLRDPWNWLDFSVIVMAYVTEFVDLGNVSALRTFRVLRALKTISVIPGLKTIVGALIQSVKKLSDVMILTVFCLSVFALIGLQLFMGNLRNKCLQWPPSDSAFETNTTSYFNGTMDSNGTFVNVTMSTFNWKDYIGDDSHFYVLDGQKDPLLCGNGSDAGQCPEGYICVKAGRNPNYGYTSFDTFSWAFLSLFRLMTQDYWENLYQLTLRAAGKTYMIFFVLVIFLGSFYLVNLILAVVAMAYEEQNQATLEEAEQKEAEFQQMLEQLKKQQEEAQAVAAASAASRDFSGIGGLGELLESSSEASKLSSKSAKEWRNRRKKRRQREHLEGNNKGERDSFPKSESEDSVKRSSFLFSMDGNRLTSDKKFCSPHQSLLSIRGSLFSPRRNSKTSIFSFRGRAKDVGSENDFADDEHSTFEDSESRRDSLFVPHRHGERRNSNGTTTETEVRKRRLSSYQISMEMLEDSSGRQRAVSIASILTNTMEELEESRQKCPPCWYRFANVFLIWDCCDAWLKVKHLVNLIVMDPFVDLAITICIVLNTLFMAMEHYPMTEQFSSVLTVGNLVFTGIFTAEMVLKIIAMDPYYYFQEGWNIFDGIIVSLSLMELGLSNVEGLSVLRSFRLLRVFKLAKSWPTLNMLIKIIGNSVGALGNLTLVLAIIVFIFAVVGMQLFGKSYKECVCKINDDCTLPRWHMNDFFHSFLIVFRVLCGEWIETMWDCMEVAGQTMCLIVFMLVMVIGNLVVLNLFLALLLSSFSSDNLAATDDDNEMNNLQIAVGRMQKGIDYVKNKMRECFQKAFFRKPKVIEIHEGNKIDSCMSNNTGIEISKELNYLRDGNGTTSGVGTGSSVEKYVIDENDYMSFINNPSLTVTVPIAVGESDFENLNTEEFSSESELEESKEKLNATSSSEGSTVDVVLPREGEQAETEPEEDLKPEACFTEGCIKKFPFCQVSTEEGKGKIWWNLRKTCYSIVEHNWFETFIVFMILLSSGALAFEDIYIEQRKTIKTMLEYADKVFTYIFILEMLLKWVAYGFQTYFTNAWCWLDFLIVDVSLVSLVANALGYSELGAIKSLRTLRALRPLRALSRFEGMRVVVNALVGAIPSIMNVLLVCLIFWLIFSIMGVNLFAGKFYHCVNMTTGNMFDISDVNNLSDCQALGKQARWKNVKVNFDNVGAGYLALLQVATFKGWMDIMYAAVDSRDVKLQPVYEENLYMYLYFVIFIIFGSFFTLNLFIGVIIDNFNQQKKKIRGQDIFMTEEQKKYYNAMKKLGSKKPQKPIPRPANKFQGMVFDFVTRQVFDISIMILICLNMVTMMVETDDQGKYMTLVLSRINLVFIVLFTGEFVLKLVSLRHYYFTIGWNIFDFVVVILSIVGMFLAEMIEKYFVSPTLFRVIRLARIGRILRLIKGAKGIRTLLFALMMSLPALFNIGLLLFLVMFIYAIFGMSNFAYVKKEAGIDDMFNFETFGNSMICLFQITTSAGWDGLLAPILNSAPPDCDPDTIHPGSSVKGDCGNPSVGIFFFVSYIIISFLVVVNMYIAVILENFSVATEESAEPLSEDDFEMFYEVWEKFDPDATQFIEFSKLSDFAAALDPPLLIAKPNKVQLIAMDLPMVSGDRIHCLDILFAFTKRVLGESGEMDALRIQMEDRFMASNPSKVSYEPITTTLKRKQEEVSAAIIQRNFRCYLLKQRLKNISSNYNKEAIKGRIDLPIKQDMIIDKLNGNSTPEKTDGSSSTTSPPSYDSVTKPDKEKFEKDKPEKESKGKEVRENQK

SEQ ID NO: 3691 - DNA, 9164 bp, Homo sapiens
ttttttttttcctcaaagctgttttctgatatatgttgggtaccatagagtgaatctcagaacaggaagcggaggcataagcagagaggattctggaaaggtctctttgttttcttatccacagagaaagaaagaaaaaaaattgtaactaatttgtaaacctctgtggtcaaaaaaaaaaaaaaaaaaaaaagctgaacagctgcagaggaagacacgttataccctaaccatcttggatgctgggctttgttatgctgtaattcataaggctctgttttatcagagattatggagcaagaaaactgaagccaagccacatcaaggtttgacagggatgagatacctgtcaaggattcatagtagagtggcttactgggaaaggagcaaagaatctcttctagggatattgtaagaataaatgagataattcacagaagggacctggagcttttccggaaaaaggtgctgtgactatctaaggtaattcgtatgcaagaagctacacgtaattaaatgtgcaggatgaaaagatggcacaggcactgttggtacccccaggacctgaaagcttccgcctttttactagagaatctcttgctgctatcgaaaaacgtgctgcagaagagaaagccaagaagcccaaaaaggaacaagataatgatgatgagaacaaaccaaagccaaatagtgacttggaagctggaaagaaccttccatttatttatggagacattcctccagagatggtgtcagagcccctggaggacctggatccctactatatcaataagaaaacttttatagtaatgaataaaggaaaggcaattttccgattcagtgccacctctgccttgtatattttaactccactaaaccctgttaggaaaattgctatcaagattttggtacattctttattcagcatgcttatcatgtgcactattttgaccaactgtgtatttatgaccttgagcaaccctcctgactggacaaagaatgtagagtacacattcactggaatctatacctttgagtcacttataaaaatcttggcaagagggttttgcttagaagattttacgtttcttcgtgatccatggaactggctggatttcagtgtcattgtgatggcatatgtgacagagtttgtggacctgggcaatgtctcagcgttgagaacattcagagttctccgagcactgaaaacaatttcagtcattccaggtttaaagaccattgtgggggccctgatccagtcggtaaagaagctttctgatgtgatgatcctgactgtgttctgtctgagcgtgtttgctctcattgggctgcagctgttcatgggcaatctgaggaataaatgtttgcagtggcccccaagcgattctgcttttgaaaccaacaccacttcctactttaatggcacaatggattcaaatgggacatttgttaatgtaacaatgagcacatttaactggaaggattacattggagatgacagtcacttttatgttttggatgggcaaaaagaccctttactctgtggaaatggctcagatgcaggccagtgtccagaaggatacatctgtgtgaaggctggtcgaaaccccaactatggctacacaagctttgacacctttagctgggctttcctgtctctatttcgactcatgactcaagactactgggaaaatctttaccagttgacattacgtgctgctgggaaaacatacatgatattttttgtcctggtcattttcttgggctcattttatttggtgaatttgatcctggctgtggtggccatggcctatgaggagcagaatcaggccaccttggaagaagcagaacaaaaagaggccgaatttcagcagatgctcgaacagcttaaaaagcaacaggaagaagctcaggcagttgcggcagcatcagctgcttcaagagatttcagtggaataggtgggttaggagagctgttggaaagttcttcagaagcatcaaagttgagttccaaaagtgctaaagaatggaggaaccgaaggaagaaaagaagacagagagagcaccttgaaggaaacaacaaaggagagagagacagctttcccaaatccgaatctgaagacagcgtcaaaagaagcagcttccttttctccatggatggaaacagactgaccagtgacaaaaaattctgctcccctcatcagtctctcttgagtatccgtggctccctgttttccccaagacgcaatagcaaaacaagcattttcagtttcagaggtcgggcaaaggatgttggatctgaaaatgactttgctgatgatgaacacagcacatttgaagacagcgaaagcaggagagactcactgtttgtgccgcacagacatggagagcgacgcaacagtaacgttagtcaggccagtatgtcatccaggatggtgccagggcttccagcaaatgggaagatgcacagcactgtggattgcaatggtgtggtttccttggtgggtggaccttcagctctaacgtcacctactggacaacttcccccagagggcaccaccacagaaacggaagtcagaaagagaaggttaagctcttaccagatttcaatggagatgctggaggattcctctggaaggcaaagagccgtgagcatagccagcattctgaccaacacaatggaagaacttgaagaatctagacagaaatgtccgccatgctggtatagatttgccaatgtgttcttgatctgggactgctgtgatgcatggttaaaagtaaaacatcttgtgaatttaattgttatggatccatttgttgatcttgccatcactatttgcattgtcttaaataccctctttatggccatggagcactaccccatgactgagcaattcagtagtgtgttgactgtaggaaacctggtctttactgggattttcacagcagaaatggttctcaagatcattgccatggatccttattactatttccaagaaggctggaatatctttgatggaattattgtcagcctcagtttaatggagcttggtctgtcaaatgtggagggattgtctgtactgcgatcattcagactgcttagagttttcaagttggcaaaatcctggcccacactaaatatgctaattaagatcattggcaattctgtgggggctctaggaaacctcaccttggtgttggccatcatcgtcttcatttttgctgtggtcggcatgcagctctttggtaagagctacaaagaatgtgtctgcaagatcaatgatgactgtacgctcccacggtggcacatgaacgacttcttccactccttcctgattgtgttccgcgtgctgtgtggagagtggatagagaccatgtgggactgtatggaggtcgctggccaaaccatgtgccttattgttttcatgttggtcatggtcattggaaaccttgtggttctgaacctctttctggccttattgttgagttcatttagctcagacaaccttgctgctactgatgatgacaatgaaatgaataatctgcagattgcagtaggaagaatgcaaaagggaattgattatgtgaaaaataagatgcgggagtgtttccaaaaagccttttttagaaagccaaaagttatagaaatccatgaaggcaataagatagacagctgcatgtccaataatactggaattgaaataagcaaagagcttaattatcttagagatgggaatggaaccaccagtggtgtaggtactggaagcagtgttgaaaaatacgtaatcgatgaaaatgattatatgtcattcataaacaaccccagcctcaccgtcacagtgccaattgctgttggagagtctgactttgaaaacttaaatactgaagagttcagcagtgagtcagaactagaagaaagcaaagagaaattaaatgcaaccagctcatctgaaggaagcacagttgatgttgttctaccccgagaaggtgaacaagctgaaactgaacccgaagaagaccttaaaccggaagcttgttttactgaaggatgtattaaaaagtttccattctgtcaagtaagtacagaagaaggcaaagggaagatctggtggaatcttcgaaaaacctgctacagtattgttgagcacaactggtttgagactttcattgtgttcatgatccttctcagtagtggtgcattggcctttgaagatatatacattgaacagcgaaagactatcaaaaccatgctagaatatgctgacaaagtctttacctatatattcattctggaaatgcttctcaaatgggttgcttatggatttcaaacatatttcactaatgcctggtgctggctagatttcttgatcgttgatgtttctttggttagcctggtagccaatgctcttggctactcagaactcggtgccatcaaatcattacggacattaagagctttaagacctctaagagccttatcccggtttgaaggcatgagggtggttgtgaatgctcttgttggagcaattccctctatcatgaatgtgctgttggtctgtctcatcttctggttgatctttagcatcatgggtgtgaatttgtttgctggcaagttctaccactgtgttaacatgacaacgggtaacatgtttgacattagtgatgttaacaatttgagtgactgtcaggctcttggcaagcaagctcggtggaaaaacgtgaaagtaaactttgataatgttggcgctggctatcttgcactgcttcaagtggccacatttaaaggctggatggatattatgtatgcagctgttgattcacgagatgttaaacttcagcctgtatatgaagaaaatctgtacatgtatttatactttgtcatctttatcatctttgggtcattcttcactctgaatctattcattggtgtcatcatagataacttcaaccagcagaaaaagaagataagaggtcaagacatctttatgacagaggaacagaaaaaatattacaatgcaatgaagaaacttggatccaagaaacctcagaaacccatacctcgcccagcaaacaaattccaaggaatggtctttgattttgtaaccagacaagtctttgatatcagcatcatgatcctcatctgcctcaacatggtcaccatgatggtggaaacggatgaccagggcaaatacatgaccctagttttgtcccggatcaacctagtgttcattgttctgttcactggagaatttgtgctgaagctcgtctccctcagacactactacttcactataggctggaacatctttgactttgtggtggtgattctctccattgtaggtatgtttctggctgagatgatagaaaagtattttgtgtcccctaccttgttccgagtgatccgtcttgccaggattggccgaatcctacgtctgatcaaaggagcaaaggggatccgcacgctgctctttgctttgatgatgtcccttcctgcgttgtttaacatcggcctcctgctcttcctggtcatgtttatctatgccatctttgggatgtccaactttgcctatgttaaaaaggaagctggaattgatgacatgttcaactttgagacctttggcaacagcatgatctgcttgttccaaattacaacctctgctggctgggatggattgctagcacctattcttaatagtgcaccacccgactgtgaccctgacacaattcaccctggcagctcagttaagggagactgtgggaacccatctgttgggattttcttttttgtcagttacatcatcatatccttcctggttgtggtgaacatgtacatcgcggtcatcctggagaacttcagtgttgctactgaagaaagtgcagagcccctgagtgaggatgactttgagatgttctatgaggtttgggaaaagtttgatcccgatgcgacccagtttatagagttctctaaactctctgattttgcagctgccctggatcctcctcttctcatagcaaaacccaacaaagtccagcttattgccatggatctgcccatggtcagtggtgaccggatccactgtcttgatattttatttgcctttacaaagcgtgttttgggtgagagtggagagatggatgcccttcgaatacagatggaagacaggtttatggcatcaaacccctccaaagtctcttatgagcctattacaaccactttgaaacgtaaacaagaggaggtgtctgccgctatcattcagcgtaatttcagatgttatcttttaaagcaaaggttaaaaaatatatcaagtaactataacaaagaggcaattaaagggaggattgacttacctataaaacaagacatgattattgacaaactaaatgggaactccactccagaaaaaacagatgggagttcctctaccacctctcctccttcctatgatagtgtaacaaaaccagacaaggaaaagtttgagaaagacaaaccagaaaaagaaagcaaaggaaaagaggtcagagaaaatcaaaagtaaaaagaaacaaagaattatctttgtgatcaattgtttacagcctatgaaggtaaagtatatgtgtcaactggacttcaagaggaggtccatgccaaactgactgttttaacaaatactcatagtcagtgcctatacaagacagtgaagtgacctctctgtcactgcaactctgtgaagcagggtatcaacattgacaagaggttgctgtttttattaccagctgacactgctgaggagaaacccaatggctacctagactatagggatagttgtgcaaagtgaacattgtaactacaccaaacacctttagtacagtccttgcatccattctatttttaacttccatatctgccatatttttacaaaatttgttctagtgcatttccatggtccccaattcatagtttattcataatgctatgtcactatttttgtaaatgaggtttacgttgaagaaacagtatacaagaaccctgtctctcaaatgatcagacaaaggtgttttgccagagagataaaatttttgctcaaaaccagaaaaagaattgtaatggctacagtttcagttacttccattttctagatggctttaattttgaaagtattttagtctgttatgtttgtttctatctgaacagttatgtgcctgtaaagtctcctctaatatttaaaggattatttttatgcaaagtattctgtttcagcaagtgcaaattttattctaagtttcagagctctatatttaatttaggtcaaatgctttccaaaaagtaatctaataaatccattctagaaaaatatatctaaagtattgctttagaatagttgttccactttctgctgcagtattgctttgccatcttctgctctcagcaaagctgatagtctatgtcaattaaataccctatgttatgtaaatagttattttatcctgtggtgcatgtttgggcaaatatatatatagcctgataaacaacttctattaaatcaaatatgtaccacagtgtatgtgtcttttgcaagcttccaacagggatgtatcctgtatcattcattaaacatagtttaaaggctatcactaatgcatgttaatattgcctatgctgctctattttactcaatccattcttcacaagtcttggttaaagaatgtcacatattggtgatagaatgaattcaacctgctctgtccattatgtcaagcagaataatttgaagctatttacaaacacctttacttttgcacttttaattcaacatgagtatcatatggtatctctctagatttcaaggaaacacactggatactgcctactgacaaaacctattcttcatattttgctaaaaatatgtctaaaacttgtttaaatataaataatgtaaaaatataatcaactttatttgtcagcattttgtacataagaaaattattttcaggttgatgacatcacaatttattttactttatgcttttgcttttgatttttaatcacaattccaaacttttgaatccataagatttttcaatggataatttcctaaaataaaagttagataatgggttttatggatttctttgttataatatattttctaccattccaataggagatacattggtcaaacactcaaacctagatcattttctaccaactatggttgcctcaatataaccttttattcatagatgtttttttttattcaacttttgtagtatttacgtatgcagactagtcttatttttttaattcctgctgcactaaagctattacaaatataacatggactttgttctttttagccatgaacaaagtggcaaagttgtgcaattacctaacatgatataaatttttgttttttgcacaaaccaaaagtttaatgttaattctttttacaaaactatttactgtagtgtattgaagaactgcatgcagggaattgctattgctaaaaagaatggtgagctacgtcattattgagccaaaagaataaatttcattttttattgcatttcacttattggcctctggggttttttgtttttgttttttgctgttggcagtttaaaatatatataattaataaaacctgtgcttgatctgacatttgtatacataaaagtttacatgaattttacaacaaactagtgcatgattcaccaagcagtactacagaacaaaggcaaattaaaagcagctttgtgaacttttatgtgtgcaaaggatcaagttcacatgttccaactttcaggtttgataataatagtagtaaccacctacaatagctttcaatttcaattaactcccttggctataagcatctaaactcatcttctttcaatataattgatgctatctcctaattacttggtggctaataaatgttacattctttgttacttaaatgcattatataaactcctatgtatacataaggtattaatgatatagttattgagaatttatattaacttttttttcaagaacccttggatttatgtgaggtcaaaaccaaactcttattctcagtggaaaactccagttgtaatgcatatttttaaagacaatttggatctaaatatgtatttcataattctcccataataaattatataaggtggctaattgg

SEQ ID NO: 3692 - protein, 2000 aa, Homo sapiens
MAQALLVPPGPESFRLFTRESLAAIEKRAAEEKAKKPKKEQDNDDENKPKPNSDLEAGKNLPFIYGDIPPEMVSEPLEDLDPYYINKKTFIVMNKGKAIFRFSATSALYILTPLNPVRKIAIKILVHSLFSMLIMCTILTNCVFMTLSNPPDWTKNVEYTFTGIYTFESLIKILARGFCLEDFTFLRDPWNWLDFSVIVMAYVTEFVDLGNVSALRTFRVLRALKTISVIPGLKTIVGALIQSVKKLSDVMILTVFCLSVFALIGLQLFMGNLRNKCLQWPPSDSAFETNTTSYFNGTMDSNGTFVNVTMSTFNWKDYIGDDSHFYVLDGQKDPLLCGNGSDAGQCPEGYICVKAGRNPNYGYTSFDTFSWAFLSLFRLMTQDYWENLYQLTLRAAGKTYMIFFVLVIFLGSFYLVNLILAVVAMAYEEQNQATLEEAEQKEAEFQQMLEQLKKQQEEAQAVAAASAASRDFSGIGGLGELLESSSEASKLSSKSAKEWRNRRKKRRQREHLEGNNKGERDSFPKSESEDSVKRSSFLFSMDGNRLTSDKKFCSPHQSLLSIRGSLFSPRRNSKTSIFSFRGRAKDVGSENDFADDEHSTFEDSESRRDSLFVPHRHGERRNSNVSQASMSSRMVPGLPANGKMHSTVDCNGVVSLVGGPSALTSPTGQLPPEGTTTETEVRKRRLSSYQISMEMLEDSSGRQRAVSIASILTNTMEELEESRQKCPPCWYRFANVFLIWDCCDAWLKVKHLVNLIVMDPFVDLAITICIVLNTLFMAMEHYPMTEQFSSVLTVGNLVFTGIFTAEMVLKIIAMDPYYYFQEGWNIFDGIIVSLSLMELGLSNVEGLSVLRSFRLLRVFKLAKSWPTLNMLIKIIGNSVGALGNLTLVLAIIVFIFAVVGMQLFGKSYKECVCKINDDCTLPRWHMNDFFHSFLIVFRVLCGEWIETMWDCMEVAGQTMCLIVFMLVMVIGNLVVLNLFLALLLSSFSSDNLAATDDDNEMNNLQIAVGRMQKGIDYVKNKMRECFQKAFFRKPKVIEIHEGNKIDSCMSNNTGIEISKELNYLRDGNGTTSGVGTGSSVEKYVIDENDYMSFINNPSLTVTVPIAVGESDFENLNTEEFSSESELEESKEKLNATSSSEGSTVDVVLPREGEQAETEPEEDLKPEACFTEGCIKKFPFCQVSTEEGKGKIWWNLRKTCYSIVEHNWFETFIVFMILLSSGALAFEDIYIEQRKTIKTMLEYADKVFTYIFILEMLLKWVAYGFQTYFTNAWCWLDFLIVDVSLVSLVANALGYSELGAIKSLRTLRALRPLRALSRFEGMRVVVNALVGAIPSIMNVLLVCLIFWLIFSIMGVNLFAGKFYHCVNMTTGNMFDISDVNNLSDCQALGKQARWKNVKVNFDNVGAGYLALLQVATFKGWMDIMYAAVDSRDVKLQPVYEENLYMYLYFVIFIIFGSFFTLNLFIGVIIDNFNQQKKKIRGQDIFMTEEQKKYYNAMKKLGSKKPQKPIPRPANKFQGMVFDFVTRQVFDISIMILICLNMVTMMVETDDQGKYMTLVLSRINLVFIVLFTGEFVLKLVSLRHYYFTIGWNIFDFVVVILSIVGMFLAEMIEKYFVSPTLFRVIRLARIGRILRLIKGAKGIRTLLFALMMSLPALFNIGLLLFLVMFIYAIFGMSNFAYVKKEAGIDDMFNFETFGNSMICLFQITTSAGWDGLLAPILNSAPPDCDPDTIHPGSSVKGDCGNPSVGIFFFVSYIIISFLVVVNMYIAVILENFSVATEESAEPLSEDDFEMFYEVWEKFDPDATQFIEFSKLSDFAAALDPPLLIAKPNKVQLIAMDLPMVSGDRIHCLDILFAFTKRVLGESGEMDALRIQMEDRFMASNPSKVSYEPITTTLKRKQEEVSAAIIQRNFRCYLLKQRLKNISSNYNKEAIKGRIDLPIKQDMIIDKLNGNSTPEKTDGSSSTTSPPSYDSVTKPDKEKFEKDKPEKESKGKEVRENQK

SEQ ID NO: 3693 - DNA, 1750 bp, Homo sapiens
agaacagaaagctaaggcaaaggagggaggatgctgtggtcatcctttcttgtttttttcttctttaatgaggatagagcacatgtgagattttactttctactccagtaaaaattctgaagaattgcattggagactgttatattcaacacatacgtggattctgtgttatgatttacatttttctttatttcagcactttcttatgcaaggagctaaacagtgattaaaggagcaggatgaaaagatggcacagtcagtgctggtaccgccaggacctgacagcttccgcttctttaccagggaatcccttgctgctattgaacaacgcattgcagaagagaaagctaagagacccaaacaggaacgcaaggatgaggatgatgaaaatggcccaaagccaaacagtgacttggaagcaggaaaatctcttccatttatttatggagacattcctccagagatggtgtcagtgcccctggaggatctggacccctactatatcaataagaaaacgtttatagtattgaataaagggaaagcaatctctcgattcagtgccacccctgccctttacattttaactcccttcaaccctattagaaaattagctattaagattttggtacattctttattcaatatgctcattatgtgcacgattcttaccaactgtgtatttatgaccatgagtaaccctccagactggacaaagaatgtggagtatacctttacaggaatttatacttttgaatcacttattaaaatacttgcaaggggcttttgtttagaagatttcacatttttacgggatccatggaattggttggatttcacagtcattacttttgcatatgtgacagagtttgtggacctgggcaatgtctcagcgttgagaacattcagagttctccgagcattgaaaacaatttcagtcattccaggcctgaagaccattgtgggggccctgatccagtcagtgaagaagctttctgatgtcatgatcttgactgtgttctgtctaagcgtgtttgcgctaataggattgcagttgttcatgggcaacctacgaaataaatgtttgcaatggcctccagataattcttcctttgaaataaatatcacttccttctttaacaattcattggatgggaatggtactactttcaataggacagtgagcatatttaactgggatgaatatattgaggataaaagtcacttttattttttagaggggcaaaatgatgctctgctttgtggcaacagctcagatgcaggccagtgtcctgaaggatacatctgtgtgaaggctggtagaaaccccaactatggctacacgagctttgacacctttagttgggcctttttgtccttatttcgtctcatgactcaagacttctgggaaaacctttatcaactgacactacgtgctgctgggaaaacgtacatgatattttttgtgctggtcattttcttgggctcattctatctaataaatttgatcttggctgtggtggccatggcctatgaggaacagaatcaggccacattggaagaggctgaacagaaggaagctgaatttcagcagatgctcgaacagttgaaaaagcaacaagaagaagctcaggcggcagctgcagccgcatctgctgaatcaagagacttcagtggtgctggtgggataggagttttttcagagagttcttcagtagcatctaagttgagctccaaaagtgaaaaagagctg

SEQ ID NO: 3694 - protein, 500 aa, Homo sapiens
MAQSVLVPPGPDSFRFFTRESLAAIEQRIAEEKAKRPKQERKDEDDENGPKPNSDLEAGKSLPFIYGDIPPEMVSVPLEDLDPYYINKKTFIVLNKGKAISRFSATPALYILTPFNPIRKLAIKILVHSLFNMLIMCTILTNCVFMTMSNPPDWTKNVEYTFTGIYTFESLIKILARGFCLEDFTFLRDPWNWLDFTVITFAYVTEFVDLGNVSALRTFRVLRALKTISVIPGLKTIVGALIQSVKKLSDVMILTVFCLSVFALIGLQLFMGNLRNKCLQWPPDNSSFEINITSFFNNSLDGNGTTFNRTVSIFNWDEYIEDKSHFYFLEGQNDALLCGNSSDAGQCPEGYICVKAGRNPNYGYTSFDTFSWAFLSLFRLMTQDFWENLYQLTLRAAGKTYMIFFVLVIFLGSFYLINLILAVVAMAYEEQNQATLEEAEQKEAEFQQMLEQLKKQQEEAQAAAAAASAESRDFSGAGGIGVFSESSSVASKLSSKSEKE

SEQ ID NO: 3695 - DNA, 2397 bp, Homo sapiens
gcagagttttgaggcagagctgatcaagggaacctcaacaaacaaccccagccatggaggcggcggtgtctttgaagaccccatgagagcatcaaacaagggagagagcctggaacaaatcatggtagtaaaatggcggcagagagctagtaatgtgtctgcaattggtgggttcttggtcgcactgacttcaagaatgaagccgcggaccctcacggtggtgtctttggtggctgttcacccttccacagtaaacatgcttgggaagcaactttgccaaaagccttcggacagtccagcgtcaacaccgcaagccaagtggaggagaaaaatctgcgcctctttctctcaagggatactttgtctctggggtactttctgacccagtggacccctggcagaagtaagcgtggactgtggctgcaggaccacgcagagtcaacacgaaccgaagccaggccttggccacggcagctctggggtccaaccacttgatcaatgcaggaaatgctttgatggcagaattcttccatggccagcttctcatattctctgggacagacacaaaccaagaaaaatgagtgtggcgcagaatctgatgtgtccttccttaccccgtgctggtagcaaaaagtatgtcttgaacttttctttgttacacacagtctgggtaataacagactgaaggaaaactaaagaagcttgggaggctaagttcaatgacaaatgaagaactaaggcagagaaaaaagagaattgagaaagtgtctgggtgtctggagaggttgggggaatagagagggaggagatataattggccagataacttgagagtgggagaggagtgcaaacattatttttgaggcgctttgttggatatttaaaatgcactcctacctttggcattttctcaaaaggcaagaaagatttgttttcaattctatttttctgctggactgaaccagtgccaagactggaccatgtaggatcctgggtttatttcagttacataagcaaacgttgctgtgatttggaatagtcaaagtcatgaatgtttctcaacttccattttgtcagctgcttgagtttctattctgagaggtgctaactgtgaacattgttattcacttgtgttccctaaatcacttttaattagttttaatttgaaccaagaatgttctactgttgaaactatgtcaagaatgatcaaaaatgaaattaataaagaattcgcgtcaaaaaaaatttgcactaatattacagtattttataatgtctatctcagcagagtcacagataatttagaatttttaattttgtttttaagtgattttcctcaaagctataatagccttggtaaagagtttagttaaacattatttttcacctctcacgcattttgtgtaatgaaatttttctatcatcttccagtggaattaattgcattggtgcaaaaaatgcaatcaaatcgatgactgaatttagcctttgaaacctcacgtctagctgggatagttactatattcattacatactgaaaaatgataagcagtaagcttttctgctaaaaaactgccaaagataagtttttcaaggctctcaaaatatcctaaagctgacaatacaagaaatgttaaaatattgttggaatttttaacggaatcttccttctcttcttttcctgtttaagacaatagtagttagttgtccactaatcgttaatacacgattttctaacaaagacttgcatatccttttggctaaaaagtggccaaatatcagagagctagaagtttgggagacagcctttagtcttttccaaagcatgtaagcccttttgaatcattttgggtaaatggcgaagattaaacagaattcataaagggtttctgatacataagtggaatgtgcctgtgaggacactacacatgacaataatctaagcatgctctcttttagtcccaaaacgtgtagagtaatgtcacatgaaatttacaggaggccattgacttggactgagctcctgcaccaggcctaacagaccaaaccaaaatggagtcactcatgctgaagttcacaccaccaagccaaaactgagttgtttatccgatcttccaagaaatcaagaaagacagggagataacagcccaatccccaaacaggccagtttttgctggcatgataggaaggcccctctgcttcaaactttccaaagaaagtaacttggaaacaaccaatctgctttttgttctccgtttctgctttcctcaaccattttctgaccataaaaccaacatcctttgctcggctcatgggaacattcattctattttgtagaatgaggtgttgcccgatattctagatttgcaaataaaagccaattaagatctttaaatt

SEQ ID NO: 3696 - protein, 99 aa, Homo sapiens
MRASNKGESLEQIMVVKWRQRASNVSAIGGFLVALTSRMKPRTLTVVSLVAVHPSTVNMLGKQLCQKPSDSPASTPQAKWRRKICASFSQGILCLWGTF

SEQ ID NO: 3697 - DNA, 1643 bp, Homo sapiens
agaatgaatagaatgagggctagagatgggagggttcctgatgagagagggtcaaaaagtgagttttagtgaaggactaggtctgaaatagttacgttattgaatttaaaaatttaacatttcaaatatgtctttctttgacaaaactttacagagacactgaagtccaggatcttttgtccagaatgtaaaatatttgtcaggaattgacaaaagaagctactgctcacaatgtactcttttaagaggagagtaagagtccctgtttctgtaaaggctgatagatgactgctggcaatacctgtactgcagtttcttcaggaacaggaaacagaagaaaacaatctagctgttttgtgggatatatttgaagtggaggggccccttctttaaccatttgatcctggtgacacattgctaaggcattttccatacctgtaggggatcctgacgcttttaagctcattggtggccccaggtcgatgactgcacatgggctccctccagtggcgaacttctcacattacagaatcatcactgttaaccatagtcatttcacaggacccgggatacagagggatctttgaaaaaatctagtatagttcttttgttttaaggacaaggaggctgaagcccagaaaaactgaatgacttaccccaaatcacattgataattcaaagacagagttttatgcttgcctcctggacaataattctcatgcatggatttcttttttatgttaggtttttatcgacactatcccaaatatcatgtttttctccacaatgaaaagaccatccagagaaaagcaagacaaaaagatttttacagaagacattgatatctctgacatttctggaaagccagggcctccacccatgggcttccactctcccctgatcaaacaccccgaggtgaaaagtgccatcgagggcatcaagtacatcgcagagaccatgaagtcagaccaggagtctaacaatgcggcggcagagtggaagtacgttgcaatggtgatggaccacatactcctcggagtcttcatgcttgtttgcatcatcggaaccctagccgtgtttgcaggtcgactcattgaattaaatcagcaaggatgagcagaaaatgagctgagcttagctctgccctggaacctaccagagcagagaagggcaggagaggaagatttgtctacttgctccactcgcacttatcaaacgtgttatattccatacttattattgatgataagatttacctttatgtaagtttatggccttgaagtgttttcatattgcttctccctttagttctgctgtctccctgaagagtgaaccctctttagtaaatgaaactaatcactaaaaaaagtgttcatttccagtgtctggaagagtttttgccaggataaccgaggttttctgttgcattgtcattgctgttatatttatatatttacttattttgtctaaccacgagaccactagggagttgctgatgttctaaatgaagtgtattctttgcttaagagtcagttttgtacctactaagaaaaccccatctaccagtcctaaagagataaggcatttgatttggagagagaggaagcagtagaaatgaaataaactaaaatgcaaactgcatc

SEQ ID NO: 3698 - protein, 114 aa, Homo sapiens
MFFSTMKRPSREKQDKKIFTEDIDISDISGKPGPPPMGFHSPLIKHPEVKSAIEGIKYIAETMKSDQESNNAAAEWKYVAMVMDHILLGVFMLVCIIGTLAVFAGRLIELNQQG

SEQ ID NO: 3699 - DNA, 1806 bp, Homo sapiens
cacaagctccggtagcccatggagccctggcctctcctcctgctctttagcctttgctcagctggcctcgtcctgggctccgaacatgagacccgtctggtggcaaagctatttaaagactacagcagcgtggtgcggccagtggaagaccaccgccaggtcgtggaggtcaccgtgggcctgcagctgatacagctcatcaatgtggatgaagtaaatcagatcgtgacaaccaatgtgcgtctgaaacagtgcagatggtgactttgctattgtcaagttcaccaaagtgctcctgcagtacactggccacatcacgtggacacctccagccatctttaaaagctactgtgagatcatcgtcacccactttccctttgatgaacagaactgcagcatgaagctgggcacctggacctacgacggctctgtcgtggccatcaacccggaaagcgaccagccagacctgagcaacttcatggagagcggggagtgggtgatcaaggagtcccggggctggaagcactccgtgacctattcctgctgccccgacaccccctacctggacatcacctaccacttcgtcatgcagcgcctgcccctctacttcatcgtcaacgtcatcatcccctgcctgctcttctccttcttaactggcctggtattctacctgcccacagactcaggggagaagatgactctgagcatctctgtcttactgtctttgactgtgttccttctggtcatcgtggagctgatcccctccacgtccagtgctgtgcccttgattggaaaatacatgctgttcaccatggtgttcgtcattgcctccatcatcatcactgtcatcgtcatcaacacacaccaccgctcacccagcacccatgtcatgcccaactgggtgcggaaggtttttatcgacactatcccaaatatcatgtttttctccacaatgaaaagaccatccagagaaaagcaagacaaaaagatttttacagaagacattgatatctctgacatttctggaaagccagggcctccacccatgggcttccactctcccctgatcaaacaccccgaggtgaaaagtgccatcgagggcatcaagtacatcgcagagaccatgaagtcagaccaggagtctaacaatgcggcggcagagtggaagtacgttgcaatggtgatggaccacatactcctcggagtcttcatgcttgtttgcatcatcggaaccctagccgtgtttgcaggtcgactcattgaattaaatcagcaaggatgagcagaaaatgagctgagcttagctctgccctggaacctaccagagcagagaagggcaggagaggaagatttgtctacttgctccactcgcacttatcaaacgtgttatattccatacttattattgatgataagatttacctttatgtaagtttatggccttgaagtgttttcatattgcttctccctttagttctgctgtctccctgaagagtgaaccctctttagtaaatgaaactaatcactaaaaaaagtgttcatttccagtgtctggaagagtttttgccaggataaccgaggttttctgttgcattgtcattgctgttatatttatatatttacttattttgtctaaccacgagaccactagggagttgctgatgttctaaatgaagtgtattctttgcttaagagtcagttttgtacctactaagaaaaccccatctaccagtcctaaagagataaggcatttgatttggagagagaggaagcagtagaaatgaaataaactaaaatgcaaactgc

SEQ ID NO: 3700 - protein, 294 aa, Homo sapiens
MKLGTWTYDGSVVAINPESDQPDLSNFMESGEWVIKESRGWKHSVTYSCCPDTPYLDITYHFVMQRLPLYFIVNVIIPCLLFSFLTGLVFYLPTDSGEKMTLSISVLLSLTVFLLVIVELIPSTSSAVPLIGKYMLFTMVFVIASIIITVIVINTHHRSPSTHVMPNWVRKVFIDTIPNIMFFSTMKRPSREKQDKKIFTEDIDISDISGKPGPPPMGFHSPLIKHPEVKSAIEGIKYIAETMKSDQESNNAAAEWKYVAMVMDHILLGVFMLVCIIGTLAVFAGRLIELNQQG

SEQ ID NO: 3701 - DNA, 1670 bp, Homo sapiens
cacaagctccggtagcccatggagccctggcctctcctcctgctctttagcctttgctcagctggcctcgtcctgggctccgaacatgagacccgtctggtggcaaagctatttaaagactacagcagcgtggtgcggccagtggaagaccaccgccaggtcgtggaggtcaccgtgggcctgcagctgatacagctcatcaatgtggatgaagtaaatcagatcgtgacaaccaatgtgcgtctgaaacagaactgcagcatgaagctgggcacctggacctacgacggctctgtcgtggccatcaacccggaaagcgaccagccagacctgagcaacttcatggagagcggggagtgggtgatcaaggagtcccggggctggaagcactccgtgacctattcctgctgccccgacaccccctacctggacatcacctaccacttcgtcatgcagcgcctgcccctctacttcatcgtcaacgtcatcatcccctgcctgctcttctccttcttaactggcctggtattctacctgcccacagactcaggggagaagatgactctgagcatctctgtcttactgtctttgactgtgttccttctggtcatcgtggagctgatcccctccacgtccagtgctgtgcccttgattggaaaatacatgctgttcaccatggtgttcgtcattgcctccatcatcatcactgtcatcgtcatcaacacacaccaccgctcacccagcacccatgtcatgcccaactgggtgcggaaggtttttatcgacactatcccaaatatcatgtttttctccacaatgaaaagaccatccagagaaaagcaagacaaaaagatttttacagaagacattgatatctctgacatttctggaaagccagggcctccacccatgggcttccactctcccctgatcaaacaccccgaggtgaaaagtgccatcgagggcatcaagtacatcgcagagaccatgaagtcagaccaggagtctaacaatgcggcggcagagtggaagtacgttgcaatggtgatggaccacatactcctcggagtcttcatgcttgtttgcatcatcggaaccctagccgtgtttgcaggtcgactcattgaattaaatcagcaaggatgagcagaaaatgagctgagcttagctctgccctggaacctaccagagcagagaagggcaggagaggaagatttgtctacttgctccactcgcacttatcaaacgtgttatattccatacttattattgatgataagatttacctttatgtaagtttatggccttgaagtgttttcatattgcttctccctttagttctgctgtctccctgaagagtgaaccctctttagtaaatgaaactaatcactaaaaaaagtgttcatttccagtgtctggaagagtttttgccaggataaccgaggttttctgttgcattgtcattgctgttatatttatatatttacttattttgtctaaccacgagaccactagggagttgctgatgttctaaatgaagtgtattctttgcttaagagtcagttttgtacctactaagaaaaccccatctaccagtcctaaagagataaggcatttgatttggagagagaggaagcagtagaaatgaaataaactaaaatgcaaactgc

SEQ ID NO: 3702 - protein, 375 aa, Homo sapiens
MEPWPLLLLFSLCSAGLVLGSEHETRLVAKLFKDYSSVVRPVEDHRQVVEVTVGLQLIQLINVDEVNQIVTTNVRLKQNCSMKLGTWTYDGSVVAINPESDQPDLSNFMESGEWVIKESRGWKHSVTYSCCPDTPYLDITYHFVMQRLPLYFIVNVIIPCLLFSFLTGLVFYLPTDSGEKMTLSISVLLSLTVFLLVIVELIPSTSSAVPLIGKYMLFTMVFVIASIIITVIVINTHHRSPSTHVMPNWVRKVFIDTIPNIMFFSTMKRPSREKQDKKIFTEDIDISDISGKPGPPPMGFHSPLIKHPEVKSAIEGIKYIAETMKSDQESNNAAAEWKYVAMVMDHILLGVFMLVCIIGTLAVFAGRLIELNQQG

SEQ ID NO: 3703 - DNA, 2026 bp, Homo sapiens
gtgagaagcacaggccaccactctgccctggtccacacaagctccggtagcccatggagccctggcctctcctcctgctctttagcctttgctcagctggcctcgtcctgggctccgaacatgagacccgtctggtggcaaagctatttaaagactacagcagcgtggtgcggccagtggaagaccaccgccaggtcgtggaggtcaccgtgggcctgcagctgatacagctcatcaatgtggatgaagtaaatcagatcgtgacaaccaatgtgcgtctgaaacagggtgacatggtagatctgccacgccccagctgcgtgactttgggagttcctttgttttctcatctgcagaatgagcaatgggtggattacaacctaaaatggaatccagatgactatggcggtgtgaaaaaaattcacattccttcagaaaagatctggcgcccagaccttgttctctataacaatgcagatggtgactttgctattgtcaagttcaccaaagtgctcctgcagtacactggccacatcacgtggacacctccagccatctttaaaagctactgtgagatcatcgtcacccactttccctttgatgaacagaactgcagcatgaagctgggcacctggacctacgacggctctgtcgtggccatcaacccggaaagcgaccagccagacctgagcaacttcatggagagcggggagtgggtgatcaaggagtcccggggctggaagcactccgtgacctattcctgctgccccgacaccccctacctggacatcacctaccacttcgtcatgcagcgcctgcccctctacttcatcgtcaacgtcatcatcccctgcctgctcttctccttcttaactggcctggtattctacctgcccacagactcaggggagaagatgactctgagcatctctgtcttactgtctttgactgtgttccttctggtcatcgtggagctgatcccctccacgtccagtgctgtgcccttgattggaaaatacatgctgttcaccatggtgttcgtcattgcctccatcatcatcactgtcatcgtcatcaacacacaccaccgctcacccagcacccatgtcatgcccaactgggtgcggaaggtttttatcgacactatcccaaatatcatgtttttctccacaatgaaaagaccatccagagaaaagcaagacaaaaagatttttacagaagacattgatatctctgacatttctggaaagccagggcctccacccatgggcttccactctcccctgatcaaacaccccgaggtgaaaagtgccatcgagggcatcaagtacatcgcagagaccatgaagtcagaccaggagtctaacaatgcggcggcagagtggaagtacgttgcaatggtgatggaccacatactcctcggagtcttcatgcttgtttgcatcatcggaaccctagccgtgtttgcaggtcgactcattgaattaaatcagcaaggatgagcagaaaatgagctgagcttagctctgccctggaacctaccagagcagagaagggcaggagaggaagatttgtctacttgctccactcgcacttatcaaacgtgttatattccatacttattattgatgataagatttacctttatgtaagtttatggccttgaagtgttttcatattgcttctccctttagttctgctgtctccctgaagagtgaaccctctttagtaaatgaaactaatcactaaaaaaagtgttcatttccagtgtctggaagagtttttgccaggataaccgaggttttctgttgcattgtcattgctgttatatttatatatttacttattttgtctaaccacgagaccactagggagttgctgatgttctaaatgaagtgtattctttgcttaagagtcagttttgtacctactaagaaaaccccatctaccagtcctaaagagataaggcatttgatttggagagagaggaagcagtagaaatgaaataaactaaaatgcaaactgc

SEQ ID NO: 3704 - protein, 482 aa, Homo sapiens; identical to SEQ ID NO: 325

SEQ ID NO: 3705 - DNA, 1720 bp, Homo sapiens
agagtgccagtgagaagcacaggccaccactctgccctggtccacacaagctccggtagcccatggagccctggcctctcctcctgctctttagcctttgctcagctggcctcgtcctgggctccgaacatgagacccgtctggtggcaaagctatttaaagactacagcagcgtggtgcggccagtggaagaccaccgccaggtcgtggaggtcaccgtgggcctgcagctgatacagctcatcaatgtggatgaagtaaatcagatcgtgacaaccaatgtgcgtctgaaacagcaatgggtggattacaacctaaaatggaatccagatgactatggcggtgtgaaaaaaattcacattccttcagaaaagatctggcgcccagaccttgttctctataacaatgcagatggtgactttgctattgtcaagttcaccaaagtgctcctgcagtacactggccacatcacgtggacacctccagccatctttaaaagctactgtgagatcatcgtcacccactttccctttgatgaacagaactgcagcatgaagctgggcacctggacctacgacggctctgtcgtggccatcaacccggaaagcgaccagccagacctgagcaacttcatggagagcggggagtgggtgatcaaggagtcccggggctggaagcactccgtgacctattcctgctgccccgacaccccctacctggacatcacctaccacttcgtcatgcagcgcctgcccctctacttcatcgtcaacgtcatcatcccctgcctgctcttctccttcttaactggcctggtattctacctgcccacagactcaggggagaagatgactctgagcatctctgtcttactgtctttgactgtgttccttctggtcatcgtggagctgatcccctccacgtccagtgctgtgcccttgattggaaaatacatgctgttcaccatggtgttcgtcattgcctccatcatcatcactgtcatcgtcatcaacacacaccaccgctcacccagcacccatgtcatgcccaactgggtgcggaaggcggcggcagagtggaagtacgttgcaatggtgatggaccacatactcctcggagtcttcatgcttgtttgcatcatcggaaccctagccgtgtttgcaggtcgactcattgaattaaatcagcaaggatgagcagaaaatgagctgagcttagctctgccctggaacctaccagagcagagaagggcaggagaggaagatttgtctacttgctccactcgcacttatcaaacgtgttatattccatacttattattgatgataagatttacctttatgtaagtttatggccttgaagtgttttcatattgcttctccctttagttctgctgtctccctgaagagtgaaccctctttagtaaatgaaactaatcactaaaaaaagtgttcatttccagtgtctggaagagtttttgccaggataaccgaggttttctgttgcattgtcattgctgttatatttatatatttacttattttgtctaaccacgagaccactagggagttgctgatgttctaaatgaagtgtattctttgcttaagagtcagttttgtacctactaagaaaaccccatctaccagtcctaaagagataaggcatttgatttggagagagaggaagcagtagaaatgaaataaactaaaatgcaaactgc

SEQ ID NO: 3706 - protein, 377 aa, Homo sapiens
MEPWPLLLLFSLCSAGLVLGSEHETRLVAKLFKDYSSVVRPVEDHRQVVEVTVGLQLIQLINVDEVNQIVTTNVRLKQQWVDYNLKWNPDDYGGVKKIHIPSEKIWRPDLVLYNNADGDFAIVKFTKVLLQYTGHITWTPPAIFKSYCEIIVTHFPFDEQNCSMKLGTWTYDGSVVAINPESDQPDLSNFMESGEWVIKESRGWKHSVTYSCCPDTPYLDITYHFVMQRLPLYFIVNVIIPCLLFSFLTGLVFYLPTDSGEKMTLSISVLLSLTVFLLVIVELIPSTSSAVPLIGKYMLFTMVFVIASIIITVIVINTHHRSPSTHVMPNWVRKAAAEWKYVAMVMDHILLGVFMLVCIIGTLAVFAGRLIELNQQG

SEQ ID NO: 3707 - DNA, 1960 bp, Homo sapiens
agagtgccagtgagaagcacaggccaccactctgccctggtccacacaagctccggtagcccatggagccctggcctctcctcctgctctttagcctttgctcagctggcctcgtcctgggctccgaacatgagacccgtctggtggcaaagctatttaaagactacagcagcgtggtgcggccagtggaagaccaccgccaggtcgtggaggtcaccgtgggcctgcagctgatacagctcatcaatgtggatgaagtaaatcagatcgtgacaaccaatgtgcgtctgaaacagcaatgggtggattacaacctaaaatggaatccagatgactatggcggtgtgaaaaaaattcacattccttcagaaaagatctggcgcccagaccttgttctctataacaatgcagatggtgactttgctattgtcaagttcaccaaagtgctcctgcagtacactggccacatcacgtggacacctccagccatctttaaaagctactgtgagatcatcgtcacccactttccctttgatgaacagaactgcagcatgaagctgggcacctggacctacgacggctctgtcgtggccatcaacccggaaagcgaccagccagacctgagcaacttcatggagagcggggagtgggtgatcaaggagtcccggggctggaagcactccgtgacctattcctgctgccccgacaccccctacctggacatcacctaccacttcgtcatgcagcgcctgcccctctacttcatcgtcaacgtcatcatcccctgcctgctcttctccttcttaactggcctggtattctacctgcccacagactcaggggagaagatgactctgagcatctctgtcttactgtctttgactgtgttccttctggtcatcgtggagctgatcccctccacgtccagtgctgtgcccttgattggaaaatacatgctgttcaccatggtgttcgtcattgcctccatcatcatcactgtcatcgtcatcaacacacaccaccgctcacccagcacccatgtcatgcccaactgggtgcggaaggtttttatcgacactatcccaaatatcatgtttttctccacaatgaaaagaccatccagagaaaagcaagacaaaaagatttttacagaagacattgatatctctgacatttctggaaagccagggcctccacccatgggcttccactctcccctgatcaaacaccccgaggtgaaaagtgccatcgagggcatcaagtacatcgcagagaccatgaagtcagaccaggagtctaacaatgcggcggcagagtggaagtacgttgcaatggtgatggaccacatactcctcggagtcttcatgcttgtttgcatcatcggaaccctagccgtgtttgcaggtcgactcattgaattaaatcagcaaggatgagcagaaaatgagctgagcttagctctgccctggaacctaccagagcagagaagggcaggagaggaagatttgtctacttgctccactcgcacttatcaaacgtgttatattccatacttattattgatgataagatttacctttatgtaagtttatggccttgaagtgttttcatattgcttctccctttagttctgctgtctccctgaagagtgaaccctctttagtaaatgaaactaatcactaaaaaaagtgttcatttccagtgtctggaagagtttttgccaggataaccgaggttttctgttgcattgtcattgctgttatatttatatatttacttattttgtctaaccacgagaccactagggagttgctgatgttctaaatgaagtgtattctttgcttaagagtcagttttgtacctactaagaaaaccccatctaccagtcctaaagagataaggcatttgatttggagagagaggaagcagtagaaatgaaataaactaaaatgcaaactgc

SEQ ID NO: 3708 - protein, 457 aa, Homo sapiens; identical to SEQ ID NO: 323

SEQ ID NO: 3709 - DNA, 1575 bp, Homo sapiens
agagtgccagtgagaagcacaggccaccactctgccctggtccacacaagctccggtagcccatggagccctggcctctcctcctgctctttagcctttgctcagctggcctcgtcctgggctccgaacatgagacccgtctggtggcaaagctatttaaagactacagcagcgtggtgcggccagtggaagaccaccgccaggtcgtggaggtcaccgtgggcctgcagctgatacagctcatcaatgtggatgaagtaaatcagatcgtgacaaccaatgtgcgtctgaaacagcaatgggtggattacaacctaaaatggaatccagatgactatggcggtgtgaaaaaaattcacattccttcagaaaagatctggcgcccagaccttgttctctataacaatgcagatggtgactttgctattgtcaagttcaccaaagtgctcctgcagtacactggccacatcacgtggacacctccagccatctttaaaagctactgtgagatcatcgtcacccactttccctttgatgaacagaactgcagcatgaagctgggcacctggacctacgacggctctgtcgtggccatcaacccggaaagcgaccagccagacctgagcaacttcatggagagcggggagtgggtgatcaaggagtcccggggctggaagcactccgtgacctattcctgctgccccgacaccccctacctggacatcacctaccacttcgtcatgcagcgcctgcccctctacttcatcgtcaacgtcatcatcccctgcctgctcttctccttcttaactggcctggtattctacctgcccacagactcaggtgggtgtggttgccatgactgctgctgctgacgctgatgggtctcgtgctgctattttggggaagccagaaataatcatgtgctaacaaacaggcagatcgacccgaaccatcatcattaggagggtgcatttgctgagtgggcgtgcgcagtggtgagagtcactgtgagtggagctcacagctggggcagacaccccgagcggcagggagttgaacatgaccctagagatgcacagtgtagcttaggctggttaaagtacattaaccaccaatacctatttgctgaataccaactgtgtgcccagaagtgtactgggtaaggcatgtgatcccagacacttctcatgccacttccacgatgaagtcactttctatgtactgactaatcctggtcttgcccctttacccactgctcaccacttgaaaatagattttgcatatctttttttccagatggtggcatcttcacacacaagaccctacttcccaagtggctgttctttctcacatatcagcctagacaacttacttacctcctactgagtaatcctatctgtgacataattttatcaaacaataacaatccaccagaaaggaggaaagggtacccatctgcctgccagcaagtcactattcataaacaacttatggcagacaagtttgaaaaaaagaaagatgctacagacagacctcaagcttatgacaggtagcaatttttatcaaaatgacttt

SEQ ID NO: 3710 - protein, 269 aa, Homo sapiens
MEPWPLLLLFSLCSAGLVLGSEHETRLVAKLFKDYSSVVRPVEDHRQVVEVTVGLQLIQLINVDEVNQIVTTNVRLKQQWVDYNLKWNPDDYGGVKKIHIPSEKIWRPDLVLYNNADGDFAIVKFTKVLLQYTGHITWTPPAIFKSYCEIIVTHFPFDEQNCSMKLGTWTYDGSVVAINPESDQPDLSNFMESGEWVIKESRGWKHSVTYSCCPDTPYLDITYHFVMQRLPLYFIVNVIIPCLLFSFLTGLVFYLPTDSGGCGCHDCCC

SEQ ID NO: 3711 - DNA, 588 bp, Homo sapiens
atgccgttacgaagaatccagaaatacgatgacctgcggcatacaacgactgagatctccgagatgaaccggaacatcagctggctccaggctgagattgagggtctcaaaggccagaaggcttccctggaggccgccgtcgcagatgctgagcagcgtggggagctggccattaaggatgccaacgccaagctgtccgagctggaggcggccctgcagcgggccaagcaagacatggcatggcagttgcatgagtaccaggagctgatgaacatcaagctggccctggatatggagatcgccacctacaggaagctgctggagggcaaggacagccggctggagtctgggatgcagaacatgagtatccatacgaagaccaccagcagctatgcaggtggtctgagctcggcctatgggggcctcacaagccccagcctcagctacggcctgggctccagctttggctctggcgtgggctccagctccttcagccacagcagctccaccagggccgtggttgtgaagaagatacagacccgcaatgggaagctggtgtccgagtcttctgacgtcctgcgcaagtga

SEQ ID NO: 3712 - protein, 195 aa, Homo sapiens
MPLRRIQKYDDLRHTTTEISEMNRNISWLQAEIEGLKGQKASLEAAVADAEQRGELAIKDANAKLSELEAALQRAKQDMAWQLHEYQELMNIKLALDMEIATYRKLLEGKDSRLESGMQNMSIHTKTTSSYAGGLSSAYGGLTSPSLSYGLGSSFGSGVGSSSFSHSSSTRAVVVKKIQTRNGKLVSESSDVLRK

SEQ ID NO: 3713 - DNA, 847 bp, Homo sapiens
caagtagctgggattacaggcatgtaccaccacacctggctaatttttatatatttttatttgttattttttgagttggagttttgtgcactctagcctgggttaacagagtgagactctatcacaaaaaaaaaaaaaaaaaaaggaaaaaaaagagtaggttaggctttgagtacatcaagaggctgggaaatgggttttgctagctaagaaagtaacaaagacattttctcttttctgtgactgtggctaagactagtcctgtcctgtctttgccataaactatgtgggaaatggctttccttcacaaaatgagtccctaaagagaagggagactgatggccatctctctccatgtggcctgaagagccaggaggtaggaataaggggagtcaagcaaggccttaaccagactctaatacgcaagctggccctgttgccttgggaagaatgtggctccggtgagtagcagcaggtagaggtgtataatctgggatatgtgcagctctgatgccttccgttttagaaaggactctgctttgctctggcctttaatttatgccacataggcacaggggctacataacatagtggtttacagcaaggatttgggatccagactggccagatttgaactccagcactattccttgatacctctgaaacttgggacaagtaacttagtcactatgtatgaaaagagataataatactagtaccttcctcatactacaagactacaagatgtggtcaagaccagaaatatataagcactgtaaaaacaatgtaaaaccaaatgaaaattcttcatttgtatcttccaaaaataaaaaaatagctatttggg

SEQ ID NO: 3714 - protein, 50 aa, Homo sapiens
MKRDNNTSTFLILQDYKMWSRPEIYKHCKNNVKPNENSSFVSSKNKKIAI

SEQ ID NO: 3715 - DNA, 1265 bp, Homo sapiens
atattgaactcgagttggaagaggcgagtccggtctcaaaatggaggtaaaaccgccgcccggtcgcccccagcccgactccggccgtcgccgtcgccgccggggggaggagggccatgatccaaaggaaccagagcagttgagaaaactgtttattggtggtctgagctttgaaactacagatgatagtttacgagaacattttgagaaatggggcacactcacagattgtgtggtaatgagagacccccaaacaaaacgttccaggggctttggttttgtgacttattcttgtgttgaagaggtggatgcagcaatgtgtgctcgaccacacaaggttgatgggcgtgtagtggaaccaaagagagctgtttctagagaggattctgtaaagcctggtgcccatctaacagtgaagaaaatttttgttggtggtattaaagaagatacagaagaatataatttgagagactactttgaaaagtatggcaagattgaaaccatagaagttatggaagacaggcagagtggaaaaaagagaggatttgcttttgtaacttttgatgatcatgatacagttgataaaattgttgttcagaaataccacactattaatgggcataattgtgaagtgaaaaaggccctttctaaacaagagatgcagtctgctggatcacagagaggtcgtggaggtggatctggcaattttatgggtcgcggagggaacttataatgattttggaaattatagtggacaacagcaatcaaattatggacccatgaaagggggcagttttggtggaagaagctcgggcagtccctatggtggtggttatggatctggtggtggaagtggtggatatggtagcagaaggttctaaaaacagcagaaaagggctacagttcttagcaggagagagagcgaggagttgtcaggaaagctgcaggttactttgagacagtcgtcccaaatgcattagaggaactgtaaaaatctgccacagaaggaacgatgatccatagtcagaaaagttactgcagcttaaacaggaaacccttcttgttcaggactgtcatagccacagtttgcaaaaagtgcagctattgattaatgcaatgtagtgtcaattagatgtacattcctgaggtcttttatctgttgtagctttgtctttttctttttcttttcattacatcaggtatattgccctgtaaattgtggtagtggtaccaggaataaaaaattaaggaatttttaacttttc

SEQ ID NO: 3716 - protein, 230 aa, Homo sapiens
MEVKPPPGRPQPDSGRRRRRRGEEGHDPKEPEQLRKLFIGGLSFETTDDSLREHFEKWGTLTDCVVMRDPQTKRSRGFGFVTYSCVEEVDAAMCARPHKVDGRVVEPKRAVSREDSVKPGAHLTVKKIFVGGIKEDTEEYNLRDYFEKYGKIETIEVMEDRQSGKKRGFAFVTFDDHDTVDKIVVQKYHTINGHNCEVKKALSKQEMQSAGSQRGRGGGSGNFMGRGGNL

SEQ ID NO: 3717 - DNA, 2667 bp, Homo sapiens
agggccatgatccaaaggaaccagagcagttgagaaaactgtttattggtggtctgagctttgaaactacagatgatagtttacgagaacattttgagaaatggggcacactcacagattgtgtggtaatgagagacccccaaacaaaacgttccaggggctttggttttgtgacttattcttgtgttgaagaggtggatgcagcaatgtgtgctcgaccacacaaggttgatgggcgtgtagtggaaccaaagagagctgtttctagagaggattctgtaaagcctggtgcccatctaacagtgaagaaaatttttgttggtggtattaaagaagatacagaagaatataatttgagagactactttgaaaagtatggcaagattgaaaccatagaagttatggaagacaggcagagtggaaaaaagagaggatttgcttttgtaacttttgatgatcatgatacagttgataaaattgttgttcagaaataccacactattaatgggcataattgtgaagtgaaaaaggccctttctaaacaagagatgcagtctgctggatcacagagaggtcgtggaggtggatctggcaattttatgggtcgcggagggaactttggagatggtggaggtggaggatatgatggttacaatgaaggaggaaattttggcggtggtaactatggtggtggtgggaactataatgattttggaaattatagtggacaacagcaatcaaattatggacccatgaaagggggcagttttggtggaagaagctcgggcagtccctatggtggtggttatggatctggtggtggaagtggtggatatggtagcagaaggttctaaaaacagcagaaaagggttgaatgagaaccctacttgcctaaatgaggaatgtctttcctaccatctaaaatacgaaggtttctggctgggtaaggtttgtagttgacagtaaaacctgatgacaccatttgtttccctgcaagtctacattacatatttcacaactttgtccctctctagtaggcacattggaaaaattcttcaactgaaaactaccttggtaccatgtcctacacgttttaaaccttagttttaaaaattcccctgcgaaatagccataagtattcatatcaagtcagttgtgactccttgtgtatacaattcattttttgtgtcttcagggtaaactcaatttttggtaaagtggtttcagcttttgtgaaaaccgttttggtgtgtaagcatgacacacaacagactcagtaagctgcccatcctcatactaggaaaacaccttcaaaggaacattaaaagttaccagggccaggcacagtggctcacgcctgtaatcccagcactttgggaggctgaggcagatggatcccaagtccaggaatttgagacgagcctgggcaacatagtgagagcctgtcaacaaaaaatagaaaaattagttgggcttggtgatacacatctgtagtcccagctatttgggaggctgccttgatatcaggcagtcgaggctgcagtgagctgactgccccactgtattccagcctgggtgaccccatctcaaagaagaaaagttaccagatgtcatgggtaaaggttggtcttcaagtggcctcataagttgtcttgcatttaaattcagggaattcattggaccaataggttacattttcgttccttttttgttttggttcatctgttaagcagtgggggcctaattactgctcctttgtaaaaacacattttcccaaagaacactgaattaccgttcaaactggttgttgatgggtaataagggctgtttttgctgccccaaaagggcttaacaatttagtcggatagtttacttaaaaaaaaaaatcctttggagacatactgaaaatgcaaactagtttctaaattatcaattccctacatgaagaagcagtttgccagagtttagtctcagaaaatgactggttggctctatttaaatcagaacccaatttctacgcgtgttgaataaggtaacagcctttgatgaatttccttcacaacatggttttagtgaagcaaacattttttttttaagggcattgttctttctagtttatttctttttatgaaataaaattattttatttaaacagttccattgtcgtttctgaaaactacagtattctcagaagttgtagcagcagtaaaaaaaaaaaagttgttatataagtgattggggcagatttaactgattttgttaaaccaatttgtaagttactgcttctaatattacacttctaaaaagctgaatttatactcatgtcctaaaggagaatatgtggtaataaagtatatttgttaagtaactaattgaaataggcttggttttaagagttccagtatataataatcacaaattgaaacctgacagtatcttgggagttccagtaatgtcacaaattagtgaataagcatgccagtgtgcaagggtaatgtaaggattgttagcctatctaaatattcaaaattactttaaaacttaagtatgttttctgatttttaagaattcagaagtgttctgtaatggattcagatgtttcatttgtagtataatgaaatgtttacagaaagataactttttcattaaaatatttttagaaatgtg

SEQ ID NO: 3718 - protein, 241 aa, Homo sapiens
MRDPQTKRSRGFGFVTYSCVEEVDAAMCARPHKVDGRVVEPKRAVSREDSVKPGAHLTVKKIFVGGIKEDTEEYNLRDYFEKYGKIETIEVMEDRQSGKKRGFAFVTFDDHDTVDKIVVQKYHTINGHNCEVKKALSKQEMQSAGSQRGRGGGSGNFMGRGGNFGDGGGGGYDGYNEGGNFGGGNYGGGGNYNDFGNYSGQQQSNYGPMKGGSFGGRSSGSPYGGGYGSGGGSGGYGSRRF

SEQ ID NO: 3719 - DNA, 955 bp, Homo sapiens
cactattaatgggcataattgtgaagtgaaaaaggccctttctaaacaagagatgcagtctgctggatcacagagaggtcgtggaggtggatctggcaattttatgggtcgcggagggaactttggaggtggtggaggtaattttggccgtggtggaaactttggtggaagaggaggctatggtggtggaggtggtggcagcagaggtagttatggaggaggtgatggtggatataatggatttggaggtgatggtggcaactatggcggtggtcctggttatagtagtagagggggctatggtggtggtggaccaggatatggaaaccaaggtggtggatatggtggaggtggaggatatgatggttacaatgaaggaggaaattttggcggtggtaactatggtggtggtgggaactataatgattttggaaattatagtggacaacagcaatcaaattatggacccatgaaagggggcagttttggtggaagaagctcgggcagtccctatggtggtggttatggatctggtggtggaagtggtggatatggtagcagaaggttctaaaaacagcagaaaagggctacagttcttagcaggagagagagcgaggagttgtcaggaaagctgcaggttactttgagacagtcgtcccaaatgcattagaggaactgtaaaaatctgccacagaaggaacgatgatccatagtcagaaaagttactgcagcttaaacaggaaacccttcttgttcaggactgtcatagccacagtttgcaaaaagtgcagctattgattaatgcaatgtagtgtcaattagatgtacattcctgaggtcttttatctgttgtagctttgtctttttctttttcttttcattacatcaggtatattgccctgtaaattgtggtagtggtaccaggaataaaaaattaaggaatttttaacttttc

SEQ ID NO: 3720 - protein, 172 aa, Homo sapiens
MQSAGSQRGRGGGSGNFMGRGGNFGGGGGNFGRGGNFGGRGGYGGGGGGSRGSYGGGDGGYNGFGGDGGNYGGGPGYSSRGGYGGGGPGYGNQGGGYGGGGGYDGYNEGGNFGGGNYGGGGNYNDFGNYSGQQQSNYGPMKGGSFGGRSSGSPYGGGYGSGGGSGGYGSRRF

SEQ ID NO: 3721 - DNA, 1222 bp, Homo sapiens
cttattttcattgatgtttgatattttaactttctttacttattgaaaattatttattacacttttctaattttagttaaaacttcagtggctaaatggttaaggtgtatttccaaactgtacatggaagaacaggaaccctttttcccctggagagacattagctgctctttttcagcaagtagtaggggttgagctagaattgttctattaagtctgagactatatttttcttagtgaaattttgtaaaatgaaaactgattttcttttttactatcagaagatgggttacacatttatttttcattcttactagtgcagatacttgatactctattattattaggtattaccaggcttcagagtgctaaatcaattcattggcttatttgccagtggcttaaatgtaatataaaaccagagttgagtaattctagctattcaggaggctgaggcagatggatcccaagtccaggaatttgagacgagcctgggcaacatagtgagagcctgtcaacaaaaaatagaaaaattagttgggcttggtgatacacatctgtagtcccagctatttgggaggctgccttgatatcaggcagtcgaggctgcagtgagctgactgccccactgtattccagcctgggtgaccccatctcaaagaagaaaagttaccagatgtcatgggtaaaggttggtcttcaagtggcctcataagttgtcttgcatttaaattcagggaattcattggaccaataggttacattttcgttccttttttgttttggttcatctgttaagcagtgggggcctaattactgctcctttgtaaaaacacattttcccaaagaacactgaattaccgttcaaactggttgttgatgggtaataagggctgtttttgctgccccaaaagggcttaacaatttagtcggatagtttacttaaaaaaaaaaatcctttggagacatactgaaaatgcaaactagtttctaaattatcaattccctacatgaagaagcagtttgccagagtttagtctcagaaaatgactggttggctctatttaaatcagaacccaatttctacgcgtgttgaataaggtaacagcctttgatgaatttccttcacaacatggttttagtgaagcaaacattttttttttaagggcattgttctttctagtttatttctttttatgaaataaaattattttatttaaac

SEQ ID NO: 3722 - protein, 38 aa, Homo sapiens
MGKGWSSSGLISCLAFKFREFIGPIGYIFVPFLFWFIC

SEQ ID NO: 3723 - DNA, 1736 bp, Homo sapiens
cttattttcattgatgtttgatattttaactttctttacttattgaaaattatttattacacttttctaattttagttaaaacttcagtggctaaatggttaaggtgtatttccaaactgtacatggaagaacaggaaccctttttcccctggagagacattagctgctctttttcagcaagtagtaggggttgagctagaattgttctattaagtctgagactatatttttcttagtgaaattttgtaaaatgaaaactgattttcttttttactatcagaagatgggttacacatttatttttcattcttactagtgcagatacttgatactctattattattaggtattaccaggcttcagagtgctaaatcaattcattggcttatttgccagtggcttaaatgtaatataaaaccagagttgagtaattctagctattcaggaggctgaggcagatggatcccaagtccaggaatttgagacgagcctgggcaacatagtgagagcctgtcaacaaaaaatagaaaaattagttgggcttggtgatacacatctgtagtcccagctatttgggaggctgccttgatatcaggcagtcgaggctgcagtgagctgactgccccactgtattccagcctgggtgaccccatctcaaagaagaaaagttaccagatgtcatgggtaaaggttggtcttcaagtggcctcataagttgtcttgcatttaaattcagggaattcattggaccaataggttacattttcgttccttttttgttttggttcatctgttaagcagtgggggcctaattactgctcctttgtaaaaacacattttcccaaagaacactgaattaccgttcaaactggttgttgatgggtaataagggctgtttttgctgccccaaaagggcttaacaatttagtcggatagtttacttaaaaaaaaaaatcctttggagacatactgaaaatgcaaactagtttctaaattatcaattccctacatgaagaagcagtttgccagagtttagtctcagaaaatgactggttggctctatttaaatcagaacccaatttctacgcgtgttgaataaggtaacagcctttgatgaatttccttcacaacatggttttagtgaagcaaacattttttttttaagggcattgttctttctagtttatttctttttatgaaataaaattattttatttaaacagttccattgtcgtttctgaaaactacagtattctcagaagttgtagcagcagtaaaaaaaaaaaagttgttatataagtgattggggcagatttaactgattttgttaaaccaatttgtaagttactgcttctaatattacacttctaaaaagctgaatttatactcatgtcctaaaggagaatatgtggtaataaagtatatttgttaagtaactaattgaaataggcttggttttaagagttccagtatataataatcacaaattgaaacctgacagtatcttgggagttccagtaatgtcacaaattagtgaataagcatgccagtgtgcaagggtaatgtaaggattgttagcctatctaaatattcaaaattactttaaaacttaagtatgttttctgatttttaagaattcagaagtgttctgtaatggattcagatgtttcatttgtagtataatgaaatgtttacagaaagataactttttcattaaaatatttttagaaatgtg

SEQ ID NO: 3724 - protein, 38 aa, Homo sapiens; identical to SEQ ID NO: 3722

SEQ ID NO: 3725 - DNA, 1832 bp, Homo sapiens
cttattttcattgatgtttgatattttaactttctttacttattgaaaattatttattacacttttctaattttagttaaaacttcagtggctaaatggttaaggtgtatttccaaactgtacatggaagaacaggaaccctttttcccctggagagacattagctgctctttttcagcaagtagtaggggttgagctagaattgttctattaagtctgagactatatttttcttagtgaaattttgtaaaatgaaaactgattttcttttttactatcagaagatgggttacacatttatttttcattcttactagtgcagatacttgatactctattattattaggtattaccaggcttcagagtgctaaatcaattcattggcttatttgccagtggcttaaatgtaatataaaaccagagttgagtaattctagctattcaggaggctgaggcagatggatcccaagtccaggaatttgagacgagcctgggcaacatagtgagagcctgtcaacaaaaaatagaaaaattagttgggcttggtgatacacatctgtagtcccagctatttgggaggctgccttgatatcaggcagtcgaggctgcagtgagctgactgccccactgtattccagcctgggtgaccccatctcaaagaagaaaagttaccagatgtcatgggtaaaggttggtcttcaagtggcctcataagttgtcttgcatttaaattcagggaattcattggaccaataggttacattttcgttccttttttgttttggttcatctgttaagcagtgggggcctaattactgctcctttgtaaaaacacattttcccaaagaacactgaattaccgttcaaactggttgttgatgggtaataagggctgtttttgctgccccaaaagggcttaacaatttagtcggatagtttacttaaaaaaaaaaatcctttggagacatactgaaaatgcaaactagtttctaaattatcaattccctacatgaagaagcagtttgccagagtttagtctcagaaaatgactggttggctctatttaaatcagaacccaatttctacgcgtgttgaataaggtaacagcctttgatgaatttccttcacaacatggttttagtgaagcaaacattttttttttaagggcattgttctttctagtttatttctttttatgaaataaaattattttatttaaacagttccattgtcgtttctgaaaactacagtattctcagaagttgtagcagcagtaaaaaaaaaaaagttgttatataagtgattggggcagatttaactgattttgttaaaccaatttgtaagttactgcttctaatattacacttctaaaaagctgaatttatactcatgtcctaaaggagaatatgtggtaataaagtatatttgttaagtaactaattgaaataggcttggttttaagagttccagtatataataatcacaaattgaaacctgacagtatcttgggagttccagtaatgtcacaaattagtgaataagcatgccagtgtgcaagggtaatgtaaggattgttagcctatctaaatattcaaaattactttaaaacttaagtatgttttctgatttttaagaattcagaagtgttctgtaatggattcagatgtttcatttgtagtataatgaaatgtttacagaaagataactttttcattaaaatatttttagaaatgtgtgtgttgttttgtcacttcacaatgttcatgtgacttaaacactataggtgaatattttgacttattttaccagtaagtaataaaacaacaggaaa

SEQ ID NO: 3726 - protein, 38 aa, Homo sapiens; identical to SEQ ID NO: 3722

SEQ ID NO: 3727 - DNA, 1250 bp, Homo sapiens
aattagatgtacattcctgaggtcttttatctgttgtagctttgtctttttctttttcttttcattacatcaggtatattgccctgtaaattgtggtagtggtaccaggaataaaaaattaaggaatttttaacttttcaatatttgtgtagttcagtttttctacattttagtacagaaactttaacaaaatgcagtttcgaaggtgtttccttgtgagttaacaagtaaagaagatcattgttaattactattttgtatgaattttgctaaagttaactgtaaagaaacacctgctgacttgcagtttaaggggaatctattctccccatttccaaaccatgatatgaatgggcgctgacatgtggagagaatagataatttgtgtgtttgcaatgtgtgttttagataaataggattgggtatttaaattagcatttgtgaatttaatagcattaagattaccttcaaatgaaaaaaaatctcaaaatttctatttggtttttgtgcattttcttttaaaatgtaatcatatgattttagtgtgttagacttgctgagtcctagctgtgtttagaacatctctattctacatttaccttggtcaaatttgaactgctgccataggttttgggtgtaaagaatgtttactgccctccatttaaattctgaaaagggatggtggatgttttccctctcctacgttagaaaccattcttaaaaacttttgaaaatatagaaccattaagcctgctatatctgagcaaattagtgggtaccttttttttcttatttaaagcacaagaggcccataaatcttgagttactttaaattcttttttttgatacaagttttcagagcaagagaataaaaatcatgtgttattaaacccctaactggctggcatgctttcctgttttatcttgggagttccagtaatgtcacaaattagtgaataagcatgccagtgtgcaagggtaatgtaaggattgttagcctatctaaatattcaaaattactttaaaacttaagtatgttttctgatttttaagaattcagaagtgttctgtaatggattcagatgtttcatttgtagtataatgaaatgtttacagaaagataactttttcattaaaatatttttagaaatgtgtgtgttgttttgtcacttcacaatgttcatgtgacttaaacactataggtgaatattttgacttattttaccagtaagtaataaaacaacaggaaa

SEQ ID NO: 3728 - protein, 33 aa, Homo sapiens
MNFAKVNCKETPADLQFKGNLFSPFPNHDMNGR

SEQ ID NO: 3729 - DNA, 580 bp, Homo sapiens
gagacggagtctcgctctgtctcccaggctggaatgcagtggcgcgatctctgcttactgcaagctccacctcccgggtccacgccattctcctgcctcagctacttgggaggctgaggcaggagaatcacttgaacctgggaagtgcgggttgcagtgagccaagattgtgccactgcactccatcgtgggtgacagagtgggactccatctcaagaaaaaaaaaaaatcttcacatttgaacccttagattcattagtccttgaagtcattttcaatcctgaactttaacagtgaaattctctagtaagctaatttgactggattcacttgtagccaaaaagcataatacaagaccaaaggaaattgacaaaacacccatcatttatgcaatgtttactatgagctaggcgcagtgctttttgtggggtgacccactgagtaccactctgctttatagatgagaaaatatgcttaagaggaggcaggagaatggcgtgaacccgggaggtggagcttgcagtgagccgagacagcgccaatgcactccagcctgggtgacagagcgagactctgtctc

SEQ ID NO: 3730 - protein, 35 aa, Homo sapiens
MLKRRQENGVNPGGGACSEPRQRQCTPAWVTERDS

SEQ ID NO: 3731 - DNA, 1270 bp, Homo sapiens
agaagttgacaattatcatttttactcatctataccctcaatggaaaaagaagtaggtaactgtagtccacattttcttaatgcttttgaggattccttcagcagcatcctctccacagaagaccccaaccagttgacagtgaactcattaaattcagatgccacagtcaacacagattttggtgatgaattttattctgctttcatagctgagcccagtatcagcaacagcatgccctcacctgctactttaagccattcactctctgaacttctaaatgggcccattgatgtttctgatctatcactttgcaaagctttcaaccaaaaccaccctgaaagcacagcagaattcaatgattctgactccggcatttcactaaacacaagtcccagtgtggcatcaccagaacactcagtggaatcttccagctatggagacacactacttggcctcagtgattctgaagtggaagagctagatagtgcccctggaagtgtcaaacagaatggtcctaaaacaccagtacattcttctggggatatggtacaacccttgtcaccatctcaggggcagagcactcacgtgcatgatgcccaatgtgagaacacaccagagaaagaattgcctgtaagtcctggtcatcggaaaaccccattcacaaaagacaaacattcaagccgcttggaggctcatctcacaagagatgaacttagggcaaaagctctccatatcccattccctgtagaaaaaatcattaacctccctgttgttgacttcaacgaaatgatgtccaaagagcagttcaatgaagctcaacttgcattaattcgggatatacgtaggaggggtaagaataaagtggtgctcatactttataagtaattctatgcaaaatcatagccaaaactagtatagaaaataatacgaaactttaaaaagcattggagtgtcagtatgttgaatcagtagtttcactttaactgtaaacaatttcttaggacaccatttgggctagtttctgtgtaagtgtaaatactacaaaaacttatttatactgttcttatgtcatttgttatattcatagatttatatgatgatatgacatctggctaaaaagaaattattgcaaaactaaccactatgtacttttttataaatactgtatggacaaaaaatggcattttttatattaaattgtttagctctggcaaaaaaaaaaaattttaagagctggtactaataaaggattattatgactgttaaatt

SEQ ID NO: 3732 - protein, 281 aa, Homo sapiens
MEKEVGNCSPHFLNAFEDSFSSILSTEDPNQLTVNSLNSDATVNTDFGDEFYSAFIAEPSISNSMPSPATLSHSLSELLNGPIDVSDLSLCKAFNQNHPESTAEFNDSDSGISLNTSPSVASPEHSVESSSYGDTLLGLSDSEVEELDSAPGSVKQNGPKTPVHSSGDMVQPLSPSQGQSTHVHDAQCENTPEKELPVSPGHRKTPFTKDKHSSRLEAHLTRDELRAKALHIPFPVEKIINLPVVDFNEMMSKEQFNEAQLALIRDIRRRGKNKVVLILYK

SEQ ID NO: 3733 - DNA, 1366 bp, Homo sapiens
attcattgaatggaattaactgtgctcttctagaacattggatctgtgttctcatttagattgtatttgtaatctccccacttcccaccatcaacagtggcataatgtgaattaatttatgtggtatctgtcatttaaaaaacatgagctctctccttcctttttttgtcttaaacataggacatggatttgattgacatactttggaggcaagatatagatcttggagtaagtcgagaagtatttgacttcagtcagcgacggaaagagtatgagctggaaaaacagaaaaaacttgaaaaggaaagacaagaacaactccaaaaggagcaagagaaagcctttttcgctcagttacaactagatgaagagacaggtgaatttctcccaattcagccagcccagcacatccagtcagaaaccagtggatctgccaactactcccaggttgcccacattcccaaatcagatgctttgtactttgatgactgcatgcagcttttggcgcagacattcccgtttgtagatgacaatgaggtgaggtataaaataacctggttaatagaaaaactccatcataactataaaataacaatctattctatgtaagtcccgtcaatgaatctccatttaaaagaataaaaacatttttaggaggaaattttttaaccaaggaaatactcttgtcaaggaaaccttagcctataaataactttacaattaagaaaaaaaaaaacccttcacacaatacaaaaccaaaaccattgactattgcatagccagaaacatggacagcataaccatggaaacaaataacccatttgctgcaagtatctaagaggtttggtgagtaaagagccagctgggcaataaacgaagacttgttcagttaacaattttaataaatctgttttatctagtaccactgtgctagatattatataaactaaatcctaaagattgtacttacgcattttaaagtttactttcaaatgcttaagctgaaacagaccagcaaattataaatttgagtcagtggggtaggaaaaaaagatttgttatttacaaacggggtcatgactggttagtaagtagagagacacagaactgcagctgattccattttgttttgtagtggtgccttagagcttactcatcccctgttggtggaagactcataaatcaatgccttatcaattttaggtttcttcggctacgtttcagtcacttgttcctgatattcccggtcacatcgagagcccagtcttcattgctactaatcaggctcagtcacctgaaacttctgttgctcaggtagcccctgttgatttagacggtatgcaacaggacattgagcaagtttggg

SEQ ID NO: 3734 - protein, 141 aa, Homo sapiens
MDLIDILWRQDIDLGVSREVFDFSQRRKEYELEKQKKLEKERQEQLQKEQEKAFFAQLQLDEETGEFLPIQPAQHIQSETSGSANYSQVAHIPKSDALYFDDCMQLLAQTFPFVDDNEVRYKITWLIEKLHHNYKITIYSM

SEQ ID NO: 3735 - DNA, 977 bp, Homo sapiens
ccagaggcggtggctcatgcctgtaatgccagcactttgggaggcccaggcaggcggatcacctaaggtgaggagatcgagaccagcctgaccaacatggagaaaccctgtctctactaaaaatgcaaaattggccaggcatggtggcgcatgcctgtaatccaagctacttgggaggctgaggcaagagaatcgcttgaacccgggaggcggcggttgcggtgagctgagatcacgccattgcactccagcctgggcaacaagagtgaaactctgtctcaaaaaaaaaagaaacagagtacaggtcagacattgggcaattttctcataacaatttcataggccattaatttggttacagacttgaatagcacacaacagttctctaagggtcagtttccaaagtaattcctaatatttaatgaatttttaagtgatagaaattgcagtaggaaagtctagcttgaaatctaatttgtgttaggttgaccaggtgacaaccacccacccctggattctgctcagttaggtcagacctggggccagttgcccatttagcatctcaggcctcaggatcctcatttataaacctggggtttgaactgcggtctccacgatcactgtcagctctccttagtcagttggttgttctaaatgtagtttagtggccagtaaacacctgttcctgagtgatacatctttaaggagccggtagatgggtcaacctggctggacttgctttttcaagtctgccttgtctattagaaaggctgagcttactgattttgcctgtcacgtttgagtgttccctgggcaacagaacaagaccctatcttagaaaaaaagaaaaaaaagaaaaagggacaacttacaactctgtgccctgatgtagaaccatctccaaaatatattaaatgagtgtgggatactatgcttatatgcgattgtgtgtatttaatggcttcctaagaaaacaa

SEQ ID NO: 3736 - protein, 60 aa, Homo sapiens
GAGRWVNLAGLAFSSLPCLLERLSLLILPVTFECSLGNRTRPYLRKKEKKEKGTTYNSVP

SEQ ID NO: 3737 - DNA, 2765 bp, Homo sapiens
agtgcttctggtttcagcacacatggagatatagaattgaaattgctctgctttctttacaaatgactcagagtgtgcttgtccttccctaaaatgttgccagcatgtaaaggattttcaatgagcagtgcaataagccagcaactgggaaggcttggagcggcactgatataacgtggtgctgtcacacagataatcagggctggagccaagtctcggtagcgctgtgcattatcctggtcacatactggaagttttgtttatccaacttggttgctcttgaagctggtgagagccctgccaggatgtggagtggacttcctagcagaggcagtacatgccacactactacccttcctgctcttgtgcgcacacctaccctgatgatgcagccttcactggatatcaaaccatttatgtcttttccagtggacagtagttctgctgttgggctctttccaaattttaacacaatggatcctgtgcaaaaagcggttattaaccatacatttggagtatccattcccccaaagaagaaacaagttatttcttgtaatgtctgtcagcttcgctttaactcagatagccaggccgaggcccactacaaaggaagtaaacatgccaagaaggtcaaagcactagacgcaacgaaaaataaacccaaaatggttccttccaaggacagcgcaaaggctaatcccagctgctccatcactccaatcacaggcaacaactctgacaaatcagaagataaagggaagttaaaagccagcagttccagtcagccatcaagctctgaaagtggctcatttctcctcaaatctggcacaacacccctgccacctggagcagccacttctccctccaagagcacaaatggagctcccggtactgttgttgaatcagaagaagaaaaagccaaaaaattactttattgttcactatgcaaagtggctgtgaactccctgtcacagctagaggcacacaacacaggatctaaacacaagaccatggttgaagctcgtaatggggctggtccaattaaatcctatcctagacctggatcaagattaaagatgcagaatggcagtaaggggtcaggactacagaacaagacatttcattgtgaaatctgtgatgttcatgttaattcagaaattcaactcaaacagcacatttctagccgaaggcataaagatcgagttgcagggaaaccactgaagccaaaatacagcccttacaacaaactccagcggagcccgagtattctagcagcaaaacttgcattccagaaagatatgatgaagcctttggccccagccttcctgtcctcacctctcgcagcggcggcagccgtgtcctcagcgctgtcactcccaccccggccctctgcctcgctcttccaggctccagccattcctccagctcttctgaggcctgggcatgggcccatccgcgccactcctgcctccatcctctttgctccgtactaacgtctgcaaaccccaagacgtttgaggccagtaggaagttgagaaagaaagccacaaggattcagcaatttaagcagtttgtgttgcagtaccccccattcacccacaaaatgcagcccaccacccagtcccccaattccagagagaaacacatcactagattgacgagggcttttagagactgctcctataattgaggaatcagcagcataggctttatctccctacttcctcccccaccctaccgcgttcaatttgtgtatctcagatatttgatttcttgagcatgtattggtcagaaagaaaaagaaagaaaaccattctctatttttccatgggtatgatctggcttaaaacaatatggaatattttcctgacagacttgaaaactaggatcttcctcagatgtctgtaaataactctggtatccaactgggtgtattctagtgtggaacaaaaaacagtgaacacaagtgcttacttgtggatactatcttaccaacggatcacaaagttctctttttggtgtactgttgttgacagggattgtgtactgtttcgacccaagtactgctgtatcctgtgtagtactagatctgtatctcttgtctgaattaaacatttttagttgctgtgtaaatgttaggaagcaaagtagctttgaattttctctgtaagagaataaaagataaaataatgtattttctttatttcacattttatttggagatatttaaatgaaatagaaagccatataacatagctataattactacctgtttgctatttttgtttaacttattttgtagcttcctcactggtttgtgttgctaagcaaacgtatacaaacagaaaaagagcttcctaaattgcacatttttgcacctcttgtgcattctgcaagaagacaatgaatccatgtatttctatataagtatcttcttcatttttaacctgttttcatttgtaatgatgctacataattttgtggctccctaatgcaataatgtacagaagataaaaaaatttataattgaacaatttgtctttctgttcgctgaatatattgcaggtcatgctcccatgcccccctttctaagccgatatcaacaagactggaatgtttgtgatatcaggggcaagagttatcatagaacaacaaaatagagtggactcttttagagcatctatatctgcaacctgtaaatggtaaaatgtctgtgtatttttttaaatgtaccttttcaataaaagtacaaaaaataaaatctg

SEQ ID NO: 3738 - protein, 395 aa, Homo sapiens
MWSGLPSRGSTCHTTTLPALVRTPTLMMQPSLDIKPFMSFPVDSSSAVGLFPNFNTMDPVQKAVINHTFGVSIPPKKKQVISCNVCQLRFNSDSQAEAHYKGSKHAKKVKALDATKNKPKMVPSKDSAKANPSCSITPITGNNSDKSEDKGKLKASSSSQPSSSESGSFLLKSGTTPLPPGAATSPSKSTNGAPGTVVESEEEKAKKLLYCSLCKVAVNSLSQLEAHNTGSKHKTMVEARNGAGPIKSYPRPGSRLKMQNGSKGSGLQNKTFHCEICDVHVNSEIQLKQHISSRRHKDRVAGKPLKPKYSPYNKLQRSPSILAAKLAFQKDMMKPLAPAFLSSPLAAAAAVSSALSLPPRPSASLFQAPAIPPALLRPGHGPIRATPASILFAPY

SEQ ID NO: 3739 - DNA, 1157 bp, Homo sapiens
gcacgtccaaaccccggggtcctcggccaggccaggggggcgggcgtgcggcggggccgggccgggccgggcgcgcccagcgggctccgggcacacgcccctcacctgggcgaggcccggtgcgcaggcgctcagcgcgggggcagcggccgggcgcttaagcccggcgcgggcaagagttggacagttcaggggccgcgccgggccgagctgtcgcccgcgccacctccaccgccgccgctgctaccgccaccgccaccgcctgggctgcagcagatcgcgggagaacgtctgcgcgaagccccggtgcagccctggcgggaccgcagcaaccaccggagcgtgagcaacagcttcccggctggaggagccactgccccacgcgcccgcggcccgcgcgccgagatgttctacatttcaactccatcaaatattaaattgatgtttatgggctaacctggaaaccgaaaaacagtttgtttcactacaagaataagaaaatatgtccaaattcctgtcagctgacttataaagggacttttagaacacaacccaatgcatgaggtactccttaagccctgacaaccatcttgaagatggaatcatgaatatggcaaattttctacggggctttgaagaaaaggggataaagaacgacaggcctgaggaccagttgagcaaagagaaaaagaaaattcttttctccttctgtgaggtgtgcaacatccagctgaactctgcagcccaggctcaggtgcattccaacggcaaatcccaccgcaaacgagtgaagcagctgagtgatgggcagcccccaccacccgcccaggccagccccagcagcaacagcagcacaggtaggaggcagggtcccgggttccatgtgctgcggggagagatggtcctggtctggaaaatgaaggatttagaacaagacttaatttttaccttaaaactgggctaccatgataacatgtactctttctcctacaggtaaaatacatgagctgtttgtcacctctcgaaatatttgttacacccactgacatacacactggcacacacacatacacacatatgcacaatttgtatatgggtccagagacttcctgtatccccacaatgtgtgaacacttctgaatgtattttgaaatgtg

SEQ ID NO: 3740 - protein, 145 aa, Homo sapiens
MRYSLSPDNHLEDGIMNMANFLRGFEEKGIKNDRPEDQLSKEKKKILFSFCEVCNIQLNSAAQAQVHSNGKSHRKRVKQLSDGQPPPPAQASPSSNSSTGRRQGPGFHVLRGEMVLVWKMKDLEQDLIFTLKLGYHDNMYSFSYR

SEQ ID NO: 3741 - DNA, 443 bp, Homo sapiens
atgaggtactccttaagccctgacaaccatcttgaagatggaatcatgaatatggcaaattttctacggggctttgaagaaaaggggataaagaacgacaggcctgaggaccagttgagcaaagagaaaaagaaaattcttttctccttctgtgaggtgtgcaacatccagctgaactctgcagcccaggctcaggtgcattccaacggcaaatcccaccgcaaacgagtgaagcagctgagtgatgggcagcccccaccacccgcccaggccagccccagcagcaacagcagcacaggtaaaatacatgagctgtttgtcacctctcgaaatatttgttacacccactgacatacacactggcacacacacatacacacatatgcacaatttgtatatgggtccagagacttcctgtatccccacaatgtgtgaacacttct

SEQ ID NO: 3742 - protein, 116 aa, Homo sapiens
MRYSLSPDNHLEDGIMNMANFLRGFEEKGIKNDRPEDQLSKEKKKILFSFCEVCNIQLNSAAQAQVHSNGKSHRKRVKQLSDGQPPPPAQASPSSNSSTGKIHELFVTSRNICYTH

SEQ ID NO: 3743 - DNA, 404 bp, Homo sapiens
ttaggtaaaactgatgttgccccagggggatagctccctcatcttggatctaggggagcttataacatcttttaaaaggcgaaaattcaagttatctgtggactgtcagaacattttgcataagtcatccccagatgttctacatttcaactccatcaaatattaaattgatgtttatgggctaacctggaaaccgaaaaacagtttgtttcactacaagaataagaaaatatgtccaaattcctgtcagctgacttataaagggacttttagaacacaacccaatgcatgaggtactccttaagccctgacaaccatcttgaagatggaatcatgaatatggcaaattttctacggggctttgaagaaaaggggataaagaacgacaggcctgaggaccagtt

SEQ ID NO: 3744 - protein, 50 aa, Homo sapiens
MLPQGDSSLILDLGELITSFKRRKFKLSVDCQNILHKSSPDVLHFNSIKY

SEQ ID NO: 3745 - DNA, 474 bp, Homo sapiens
atgtcacacatgctcctgcacctccacagcagctggcaggtggaccaggccatcctcccaggagaggactgcatggctgtcattcgcttcggccacggctgggaccccacatgcatgaaaatggataaggtcttgtacagcatcattgagaaggttaaagattttgcagttatttttcttgtgaatattaccaaagtacctgacttcaacaaaatgtatgagttatatgatccatgcactatcatgtttttcttcaggaacaagcacatcatggttgtcttggggactggcaacaacaagattaactgggccatggaggacaagcaggagatggtcgacatcatagagaccgtggactgtagggccctcaatggtggcgacctggtcttgtccccaaaaactactccaccaagtccagatactgaagcgccctcaggctgtgtggataaatgttgtggaggccttttcatgtag

SEQ ID NO: 3746 - protein, 157 aa, Homo sapiens
MSHMLLHLHSSWQVDQAILPGEDCMAVIRFGHGWDPTCMKMDKVLYSIIEKVKDFAVIFLVNITKVPDFNKMYELYDPCTIMFFFRNKHIMVVLGTGNNKINWAMEDKQEMVDIIETVDCRALNGGDLVLSPKTTPPSPDTEAPSGCVDKCCGGLFM

SEQ ID NO: 3747 - DNA, 3531 bp, Homo sapiens
gggacgcccgggcggccctgaaggggacggggcggccccagtcggaggtcgcagggagctccgcccccgactcggtataagagctgggcccggcccacggcggcggcggcggcggcggagagagctggctcagggcgtccgctaggctcggacgacctgctgagcctcccaaaccgcttccataaggctttgcctttccaacttcagctacagtgttagctaagtttggaaagaaggaaaaaagaaaatccctgggccccttttcttttgttctttgccaaagtcgtcgttgtagtctttttgcccaaggctgttgtgtttttagaggtgctatctccagttccttgcactcctgttaacaagcacctcagcgagagcagcagcagcgatagcagccgcagaagagccagcggggtcgcctagtgtcatgaccagggcgggagatcacaaccgccagagaggatgctgtggatccttggccgactacctgacctctgcaaaattccttctctaccttggtcattctctctctacttggggagatcggatgtggcactttgcggtgtctgtgtttctggtagagctctatggaaacagcctccttttgacagcagtctacgggctggtggtggcagggtctgttctggtcctgggagccatcatcggtgactgggtggacaagaatgctagacttaaagtggcccagacctcgctggtggtacagaatgtttcagtcatcctgtgtggaatcatcctgatgatggttttcttacataaacatgagcttctgaccatgtaccatggatgggttctcacttcctgctatatcctgatcatcactattgcaaatattgcaaatttggccagtactgctactgcaatcacaatccaaagggattggattgttgttgttgcaggagaagacagaagcaaactagcaaatatgaatgccacaatacgaaggattgaccagttaaccaacatcttagcccccatggctgttggccagattatgacatttggctccccagtcatcggctgtggctttatttcgggatggaacttggtatccatgtgcgtggagtacgttctgctctggaaggtttaccagaaaaccccagctctagctgtgaaagctggtcttaaagaagaggaaactgaattgaaacagctgaatttacacaaagatactgagccaaaacccctggagggaactcatctaatgggtgtgaaagactctaacatccatgagcttgaacatgagcaagagcctacttgtgcctcccagatggctgagcccttccgtaccttccgagatggatgggtctcctactacaaccagcctgtgtttctggctggcatgggtcttgctttcctttatatgactgtcctgggctttgactgcatcaccacagggtacgcctacactcagggactgagtggttccatcctcagtattttgatgggagcatcagctataactggaataatgggaactgtagcttttacttggctacgtcgaaaatgtggtttggttcggacaggtctgatctcaggattggcacagctttcctgtttgatcttgtgtgtgatctctgtattcatgcctggaagccccctggacttgtccgtttctccttttgaagatatccgatcaaggttcattcaaggagagtcaattacacctaccaagatacctgaaattacaactgaaatatacatgtctaatgggtctaattctgctaatattgtcccggagacaagtcctgaatctgtgcccataatctctgtcagtctgctgtttgcaggcgtcattgctgctagaatcggtctttggtcctttgatttaactgtgacacagttgctgcaagaaaatgtaattgaatctgaaagaggcattataaatggtgtacagaactccatgaactatcttcttgatcttctgcatttcatcatggtcatcctggctccaaatcctgaagcttttggcttgctcgtattgatttcagtctcctttgtggcaatgggccacattatgtatttccgatttgcccaaaatactctgggaaacaagctctttgcttgcggtcctgatgcaaaagaagttaggaaggaaaatcaagcaaatacatctgttgtttgagacagtttaactgttgctatcctgttactagattatatagagcacatgtgcttattttgtactgcagaattccaataaatggctgggtgttttgctctgtttttaccacagctgtgccttgagaactaaaagctgtttaggaaacctaagtcagcagaaattaactgattaatttcccttatgttgaggcatggaaaaaaaattggaaaagaaaaactcagtttaaatacggagactataatgataacactgaattcccctatttctcatgagtagatacaatcttacgtaaaagagtggttagtcacgtgaattcagttatcatttgacagattcttatctgtactagaattcagatatgtcagttttctgcaaaactcactcttgttcaagactagctaatttatttttttgcatcttagttatttttaaaaacaaattcttcaagtatgaagactaaattttgataactaatattatccttattgatcctattgatcttaaggtatttacatgtatgtggaaaaacaaaacacttaactagaattctctaataaggtttatggtttagcttaaagagcacctttgtatttttattatcagatggggcaacatattgtatgaagcatatgtagcacttcacagcatggttatcatgtaagctgcaggtagaagcaaagctgtaaagtagatttatcacacaatgactgcatacagacttcaaatatgtcaatagtttggtcatagaacctagaagccaaaagccacacagaagggcaagaatcccaatttaactcatgttatcatcattagtgatctgtgttgtagaacatgagggtgtaagccttcagcctggcaagttacatgtagaaagcccacacttgtgaaggttttgttttacaaatcacttgatttaacacactcaggtagaatatttttatttttactgttttatacccagaagttatttctacattgttctacagcaagaatattcataaaagtatccctttcaaatgcctttgagaagaatagaagaaaaaaagtttgtatatattttaaaaaattgttttaaaagtcagtttgcaacatgtctgtaccaagatggtactttgccttaaccgtttatatgcactttcatggagactgcaatacgttgctatgagcactttctttatccttggagtttaatcctttgcttcatctttctacagtatgacataatgatttgctatgttgtaaaatctttgtaaaaaatttctatataaaaatattttgaaaatcttaatttttcctgaattctgttccccaattatttaacaaggcttttgttacagaacatctgttttgggtaacttgtttttctctataaagggctacagtgtcat

SEQ ID NO: 3748 - protein, 571 aa, Homo sapiens; identical to SEQ ID NO: 336

SEQ ID NO: 3749 - DNA, 3429 bp, Homo sapiens
gggacgcccgggcggccctgaaggggacggggcggccccagtcggaggtcgcagggagctccgcccccgactcggtataagagctgggcccggcccacggcggcggcggcggcggcggagagagctggctcagggcgtccgctaggctcggacgacctgctgagcctcccaaaccgcttccataaggctttgcctttccaacttcagctacagtgttagctaagtttggaaagaaggaaaaaagaaaatccctgggccccttttcttttgttctttgccaaagtcgtcgttgtagtctttttgcccaaggctgttgtgtttttagaggtgctatctccagttccttgcactcctgttaacaagcacctcagcgagagcagcagcagcgatagcagccgcagaagagccagcggggtcgcctagtgtcatgaccagggcgggagatcacaaccgccagagaggatgctgtggatccttggccgactacctgacctctgcaaaattccttctctaccttggtcattctctctctacttggggagatcggatgtggcactttgcggtgtctgtgtttctggtagagctctatggaaacagcctccttttgacagcagtctacgggctggtggtggcagggtctgttctggtcctgggagccatcatcggtgactgggtggacaagaatgctagacttaaagtggcccagacctcgctggtggtacagaatgtttcagtcatcctgtgtggaatcatcctgatgatggttttcttacataaacatgagcttctgaccatgtaccatggatgggttctcacttcctgctatatcctgatcatcactattgcaaatattgcaaatttggccagtactgctactgcaatcacaatccaaagggattggattgttgttgttgcaggagaagacagaagcaaactagcaaatatgaatgccacaatacgaaggattgaccagttaaccaacatcttagcccccatggctgttggccagattatgacatttggctccccagtcatcggctgtggctttatttcgggatggaacttggtatccatgtgcgtggagtacgttctgctctggaaggtttaccagaaaaccccagctctagctgtgaaagctggtcttaaagaagaggaaactgaattgaaacagctgaatttacacaaagatactgagccaaaacccctggagggaactcatctaatgggtgtgaaagactctaacatccatgagcttgaacatgagcaagagcctacttgtgcctcccagatggctgagcccttccgtaccttccgagatggatgggtctcctactacaaccagcctgtgtttctggctggcatgggtcttgctttcctttatatgactgtcctgggctttgactgcatcaccacagggtacgcctacactcagggactgagtggttccatcctcagtattttgatgggagcatcagctataactggaataatgggaactgtagcttttacttggctacgtcgaaaatgtggtttggttcggacaggtctgatctcaggattggcacagctttcctgtttgatcttgtgtgtgatctctgtattcatgcctggaagccccctggacttgtccgtttctccttttgaagatatccgatcaaggttcattcaaggagagtcaattacacctaccaagatacctgaaattacaactgaaatatacatgtctaatgggtctaattctgctaatattgtcccggagacaagtcctgaatctgtgcccataatctctgtcagtctgctgtttgcaggcgtcattgctgctagaatcggtctttggtcctttgatttaactgtgacacagttgctgcaagaaaatgtaattgaatctgaaagaggcattataaatggtgtacagaactccatgaactatcttcttgatcttctgcatttcatcatggtcatcctggctccaaatcctgaagcttttggcttgctcgtattgatttcagtctcctttgtggcaatgggccacattatgtatttccgatttgcccaaaatactctgggaaacaagctctttgcttgcggtcctgatgcaaaagaagttaggaaggaaaatcaagcaaatacatctgttgtttgagacagtttaactgttgctatcctgttactagattatatagagcacatgtgcttattttgtactgcagaattccaataaatggctgggtgttttgctctgtttttaccacagctgtgccttgagaactaaaagctgtttaggaaacctaagtcagcagaaattaactgattaatttcccttatgttgaggcatggaaaaaaaattggaaaagaaaaactcagtttaaatacggagactataatgataacactgaattcccctatttctcatgagtagatacaatcttacgtaaaagagtggttagtcacgtgaattcagttatcatttgacagattcttatctgtactagaattcagatatgtcagttttctgcaaaactcactcttgttcaagactagctaatttatttttttgcatcttagttatttttaaaaacaaattcttcaagtatgaagactaaattttgataactaatattatccttattgatcctattgatcttaaggtatttacatgtatgtggaaaaacaaaacacttaactagaattctctaataaggtttatggtttagcttaaagagcacctttgtatttttattatcagatggggcaacatattgtatgaagcatatgtagcacttcacagcatggttatcatgtaagctgcaggtagaagcaaagctgtaaagtagatttatcacacaatgactgcatacagacttcaaatatgtcaatagtttggtcatagaacctagaagccaaaagccacacagaagggcaagaatcccaatttaactcatgttatcatcattagtgatctgtgttgtagaacatgagggtgtaagccttcagcctggcaagttacatgtagaaagcccacacttgtgaaggttttgttttacaaatcacttgatttaacacactcaggtagaatatttttatttttactgttttatacccagaagttatttctacattgttctacagcaagaatattcataaaagtatccctttcaaatgcctttgagaagaatagaagaaaaaaagtttgtatatattttaaaaaattgttttaaaagtcagtttgcaacatgtctgtaccaagatggtactttgccttaaccgtttatatgcactttcatggagactgcaatacgttgctatgagcactttctttatccttggagtttaatcctttgcttcatctttctacagtatgacataatgatttgctatgttgtaaaatctttgtaaaaaatttctatataaaaatattttgaaaatctt

SEQ ID NO: 3750 - protein, 571 aa, Homo sapiens; identical to SEQ ID NO: 336

SEQ ID NO: 3751 - DNA, 1139 bp, Homo sapiens
gggacgcccgggcggccctgaaggggacggggcggccccagtcggaggtcgcagggagctccgcccccgactcggtataagagctgggcccggcccacggcggcggcggcggcggcggagagagctggctcagggcgtccgctaggctcggacgacctgctgagcctcccaaaccgcttccataaggctttgcctttccaacttcagctacagtgttagctaagtttggaaagaaggaaaaaagaaaatccctgggccccttttcttttgttctttgccaaagtcgtcgttgtagtctttttgcccaaggctgttgtgtttttagaggtgctatctccagttccttgcactcctgttaacaagcacctcagcgagagcagcagcagcgatagcagccgcagaagagccagcggggtcgcctagtgtcatgaccagggcgggagatcacaaccgccagagaggatgctgtggatccttggccgactacctgacctctgcaaaattccttctctaccttggtcattctctctctacttggggagatcggatgtggcactttgcggtgtctgtgtttctggtagagctctatggaaacagcctccttttgacagcagtctacgggctggtggtggcagggtctgttctggtcctgggagccatcatcggtgactgggtggacaagaatgctagacttaaagtggcccagacctcgctggtggtacagaatgtttcagtcatcctgtgtggaatcatcctgatgatggttttcttacataaacatgagcttctgaccatgtaccatggatgggttctcgtaagttctcaatgagattcttgatggcagaaaattgaatatctggtagtggtaaaggatgaaaatgctttgaagctatttttttttttggccagtgtgaccttttaatattgatttctgtgtctactgtaatatcccctatagtttgttttgttgttgttttgcccacaacaggcactcattaagtattgtttgaatttaaattttgtcctattggtttctaatggcatttctaagagtttactatagaattcagttgtttgttttcagctttttagtgacctatactttgtttgtgctatttaataaatgttatccatatcta

SEQ ID NO: 3752 - protein, 133 aa, Homo sapiens
MTRAGDHNRQRGCCGSLADYLTSAKFLLYLGHSLSTWGDRMWHFAVSVFLVELYGNSLLLTAVYGLVVAGSVLVLGAIIGDWVDKNARLKVAQTSLVVQNVSVILCGIILMMVFLHKHELLTMYHGWVLVSSQ

SEQ ID NO: 3753 - DNA, 2449 bp, Homo sapiens
aaaagaaagggtgagcgcggctggaagcgcgcatgcgctgtggctaatgccgtaggctccttcagggctgagccatcccgcgtgtcttgcgctcggtggaaatgcccagccgagggacgcgaccagaggacagctctgtgctgatccccaccgacaattcgaccccacacaaggaggatctaagcagcaagattaaagaacaaaaaattgtggtggatgaactttctaaccttaagaagaataggaaagtatataggcaacaacagaacagcaatatattctttcttgcagaccgaacagaaatgctgtctgagagcaagaatatattggatgaactgaaaaaagaataccaagaaatagaaaacttagacaagaccaaaatcaagaaatagtcaacctgatttcacataacaatgtgtggcatttgttgttctgtaaacttttctgctgagcatttcagtcaagatttaaaagaggacttactatataatcttaaacagcggggacccaatagtagtaaacaattgttaaagtctgatgttaactaccagtgtttattttctgctcacgtcctacacttgaggggtgttttgactacccagcctgtggaagatgaaagaggcaatgtgtttctatggaatggagaaatttttagtggaataaaggttgaagctgaagagaatgacactcaaattttgtttaattatctttcctcctgtaagaatgaatctgagattttgtcactcttctcagaagtacaaggtccctggtcatttatatattatcaagcatctagtcattatttatggtttggtagggatttttttggtcgccgtagcttgctttggcattttagtaatttgggcaagagtttctgcctctcttcagttggcacccaaacatctggattggcaaatcagtggcaagaagttccagcatctggacttttcagaattgatcttaagtctactgtcatttccggatgcattattttacaactgtatccttggaaatatatttctagggagaatattattgaagaaaatgttaatagcctgagtcaaatttcagcagacttaccagcatttgtatcagtggtagcaaatgaagccaaactgtatcttgaaaaacctgttgttcctttaaatatgatgttgccacaagctgcattggagactcattgcagtaatatttccaatgtgccacctacaagagagatacttcaagtctttcttactgatgtacacatgaaggaagtaattcagcagttcattgatgtcctgagtgtagcagtcaagaaacgtgtcttgtgtttacctagggatgaaaacctgacagcaaatgaagttttgaaaacgtgtgataggaaagcaaatgttgcaatcctgttttctgggggcattgattccatggttattgcaacccttgctgaccgtcatattcctttagatgaaccaattgatcttcttaatgtagctttcatagctgaagaaaagaccatgccaactacctttaacagagaagggaataaacagaaaaataaatgtgaaataccttcagaagaattctctaaagatgttgctgctgctgctgctgacagtcctaataaacatgtcagtgtaccagatcgaatcacaggaagggcgggactaaaggaactacaagctgttagcccttcccgaatttggaattttgttgaaattaatgtttctatggaagaactgcagaaattaagaagaactcgaatatgtcacttaattcggccattggatacagttttggatgatagcattggctgtgcagtctggtttgcttctagaggaattggttggttagtggcccaggaaggagtgaaatcctatcagagcaatgcaaaggtagttctcactggaattggtgcagatgagcaacttgcaggttattctcgtcatcgtgtccgctttcagtcgcatgggctggaaggattgaataaggaaataatgatggaactgggtcgaatttcttctagaaatcttggtcgtgatgacagagttattggtgatcatggaaaagaagcaagatttcctttcctggatgaaaatgttgtctcctttctaaattctctgccgatttgggaaaaagcaaacttgactttaccccgaggaattggtgaaaaattacttttacgccttgcagctgtggaacttggtcttacagcctctgctcttctgcccaaacgggccatgcagtttggatcaagaattgcaaaaatggaaaaaattaatgaaaaggcatctgataaatgtggacggctccaaatcatgtccttagaaaatctttctattgaaaaggagactaaattgtaatgtgattcacaatgtaacaatataaaaataagtttttatataattatataaaagtaagatactctgctgctttactattgtataacatagtagttttaaagttc

SEQ ID NO: 3754 - protein, 643 aa, Homo sapiens
MCGICCSVNFSAEHFSQDLKEDLLYNLKQRGPNSSKQLLKSDVNYQCLFSAHVLHLRGVLTTQPVEDERGNVFLWNGEIFSGIKVEAEENDTQILFNYLSSCKNESEILSLFSEVQGPWSFIYYQASSHYLWFGRDFFGRRSLLWHFSNLGKSFCLSSVGTQTSGLANQWQEVPASGLFRIDLKSTVISGCIILQLYPWKYISRENIIEENVNSLSQISADLPAFVSVVANEAKLYLEKPVVPLNMMLPQAALETHCSNISNVPPTREILQVFLTDVHMKEVIQQFIDVLSVAVKKRVLCLPRDENLTANEVLKTCDRKANVAILFSGGIDSMVIATLADRHIPLDEPIDLLNVAFIAEEKTMPTTFNREGNKQKNKCEIPSEEFSKDVAAAAADSPNKHVSVPDRITGRAGLKELQAVSPSRIWNFVEINVSMEELQKLRRTRICHLIRPLDTVLDDSIGCAVWFASRGIGWLVAQEGVKSYQSNAKVVLTGIGADEQLAGYSRHRVRFQSHGLEGLNKEIMMELGRISSRNLGRDDRVIGDHGKEARFPFLDENVVSFLNSLPIWEKANLTLPRGIGEKLLLRLAAVELGLTASALLPKRAMQFGSRIAKMEKINEKASDKCGRLQIMSLENLSIEKETKL

SEQ ID NO: 3755 - DNA, 2704 bp, Homo sapiens
aaaagaaagggtgagcgcggctggaagcgcgcatgcgctgtggctaatgccgtaggctccttcagggctgagccatcccgcgtgtcttgcgctcggtggaaatgcccagccgagggacgcgaccagaggacagctctgtgctgatccccaccgacaattcgaccccacacaaggaggatctaagcagcaagattaaagaacaaaaaattgtggtggatgaactttctaaccttaagaagaataggaaagtatataggcaacaacagaacagcaatatattctttcttgcagaccgaacagaaatgctgtctgagagcaagaatatattggatgaactgaaaaaagaataccaagaaatagaaaacttagacaagaccaaaatcaagaaatagtcaacctgatttcacataacaatgtgtggcatttgttgttctgtaaacttttctgctgagcatttcagtcaagatttaaaagaggacttactatataatcttaaacagcggggacccaatagtagtaaacaattgttaaagtctgatgttaactaccagtgtttattttctgctcacgtcctacacttgaggggtgttttgactacccagcctgtggaagatgaaagaggcaatgtgtttctatggaatggagaaatttttagtggaataaaggttgaagctgaagagaatgacactcaaattttgtttaattatctttcctcctgtaagaatgaatctgagattttgtcactcttctcagaagtacaaggtccctggtcatttatatattatcaagcatctagtcattatttatggtttggtagggatttttttggtcgccgtagcttgctttggcattttagtaatttgggcaagagtttctgcctctcttcagttggcacccaaacatctggattggcaaatcagtggcaagaagttccagcatctggacttttcagaattgatcttaagtctactgtcatttccggatgcattattttacaactgtatccttggaaatatatttctagggagaatattattgaagaaaatgttaatagcctgagtcaaatttcagcagacttaccagcatttgtatcagtggtagcaaatgaagccaaactgtatcttgaaaaacctgttgttcctttaaatatgatgttgccacaagctgcattggagactcattgcagtaatatttccaatgtgccacctacaagagagatacttcaagtctttcttactgatgtacacatgaaggaagtaattcagcagttcattgatgtcctgagtgtagcagtcaagaaacgtgtcttgtgtttacctagggatgaaaacctgacagcaaatgaagttttgaaaacgtgtgataggaaagcaaatgttgcaatcctgttttctgggggcattgattccatggttattgcaacccttgctgaccgtcatattcctttagatgaaccaattgatcttcttaatgtagctttcatagctgaagaaaagaccatgccaactacctttaacagagaagggaataaacagaaaaataaatgtgaaataccttcagaagaattctctaaagatgttgctgctgctgctgctgacagtcctaataaacatgtcagtgtaccagatcgaatcacaggaagggcgggactaaaggaactacaagctgttagcccttcccgaatttggaattttgttgaaattaatgtttctatggaagaactgcagaaattaagaagaactcgaatatgtcacttaattcggccattggatacagttttggatgatagcattggctgtgcagtctggtttgcttctagaggaattggttggttagtggcccaggaaggagtgaaatcctatcagagcaatgcaaaggtagttctcactggaattggtgcagatgagcaacttgcaggttattctcgtcatcgtgtccgctttcagtcgcatgggctggaaggattgaataaggaaataatgatggaactgggtcgaatttcttctagaaatcttggtcgtgatgacagagttattggtgatcatggaaaagaagcaagatttcctttcctggatgaaaatgttgtctcctttctaaattctctgccgatttgggaaaaagcaaacttgactttaccccgaggaattggtgaaaaattacttttacgccttgcagctgtggaacttggtcttacagcctctgctcttctgcccaaacgggccatgcagtttggatcaagaattgcaaaaatggaaaaaattaatgaaaaggcatctgataaatgtggacggctccaaatcatgtccttagaaaatctttctattgaaaaggagactaaattgtaatgtgattcacaatgtaacaatataaaaataagtttttatataattatataaaagtaagatactctgctgctttactattgtataacatagtagttttaaagttcatttggttgaattttcattttttcctgtcacagagcttctaaaaccatggaatttccttagtgatagggaatatcttttgttgttcataataagccccttttgatcacacctgagtttatgctaatgcgttgacttagggtgaggtctctaaatagcctttaacacctgcagcttgggaggccaaggcagagggatctcttgagtccaggagtttgagaacagcctgggcaacatgatgaaacctcatctctacc

SEQ ID NO: 3756 - protein, 643 aa, Homo sapiens; identical to SEQ ID NO: 3754

SEQ ID NO: 3757 - DNA, 658 bp, Homo sapiens
ggaagcgcgcatgcgctgtggctaatgccgtaggctccttcagggctgagccatcccgcgtgtcttgcgctcggtggaaatgcccagccgagggacgcgaccagaggacagctctgtgctgatccccaccgacaattcgaccccacacaaggaggatctaagcagcaagattaaagaacaaaaaattgtggtggatgaactttctaaccttaagaagaataggaaagtatataggcaacaacagaacagcaatatattctttcttgcagaccgaacagaaatgctgtctgagagcaagaatatattggatgaactgaaaaaagaataccaagaaatagaaaacttagacaagaccaaaatcaagaaatagtcaacctgatttcacataacaatgtgtggcatttgttgttctgtaaacttttctgctgagcatttcagtcaagatttaaaagaggacttactatataatcttaaacagcggggacccaatagtagtaaacaattgttaaagtctgatgttaactaccagtgtttattttctgctcacgtcctacacttgaggggtgttttgactacccagcctgtggaagatgaaagaggcaatgtgtttctatggaatggagaaatttttagtggaataaaggttgaagctgaagag

SEQ ID NO: 3758 - protein, 96 aa, Homo sapiens
MPSRGTRPEDSSVLIPTDNSTPHKEDLSSKIKEQKIVVDELSNLKKNRKVYRQQQNSNIFFLADRTEMLSESKNILDELKKEYQEIENLDKTKIKK

SEQ ID NO: 3759 - DNA, 608 bp, Homo sapiens
gcgcgcatgcgctgtggctaatgccgtaggctccttcagggctgagccatcccgcgtgtcttgcgctcggtggaaatgcccagccgagggacgcgaccagaggacagctctgtgctgatccccaccgacaattcgaccccacacaaggaggatctaagcagcaagattaaagaacaaaaaattgtggtggatgaactttctaaccttaagaagaataggaccgaacagaaatgctgtctgagagcaagaatatattggatgaactgaaaaaagaataccaagaaatagaaaacttagacaagaccaaaatcaagaaatagtcaacctgatttcacataacaatgtgtggcatttgttgttctgtaaacttttctgctgagcatttcagtcaagatttaaaagaggacttactatataatcttaaacagcggggacccaatagtagtaaacaattgttaaagtctgatgttaactaccagtgtttattttctgctcacgtcctacacttgaggggtgttttgactacccagcctgtggaagatgaaagaggcaatgtgtttctatggaatggagaaatttttagtggaataaaggttgaagctgaagag

SEQ ID NO: 3760 - protein, 63 aa, Homo sapiens
MPSRGTRPEDSSVLIPTDNSTPHKEDLSSKIKEQKIVVDELSNLKKNRTEQKCCLRARIYWMN

SEQ ID NO: 3761 - DNA, 428 bp, Homo sapiens
ctccttcagggctgagccatcccgcgtgtcttgcgctcggtggaaatgcccagccgagggacgcgaccagaggacagctctgtgctgatccccaccgacaattcgaccccacacaaggaggatctaagcagcaagattaaagaacaaaaaattgtggtggatgaactttctaaccttaagaagaataggaaagtatataggcaacaacagaacagcaatatattctttcttgcagaccgaacagaaatgctgtctgagagcaagagtaagttttttcttttttggggtttttggggggtgcctaaattatactcatctgagtgttaaaatatatatctaaagtatatatatatatatatatatatatatatatatatatatatatatatattataaatgttttagaaagcaatagttattaacatgtg

SEQ ID NO: 3762 - protein, 93 aa, Homo sapiens
MPSRGTRPEDSSVLIPTDNSTPHKEDLSSKIKEQKIVVDELSNLKKNRKVYRQQQNSNIFFLADRTEMLSESKSKFFLFWGFWGVPKLYSSEC

SEQ ID NO: 3763 - DNA, 626 bp, Homo sapiens
gctcggtggaaatgcccagccgagggacgcgaccagaggacagctctgtgctgatccccaccgacaattcgaccccacacaaggaggatctaagcagcaagattaaagaacaaaaaattgtggtggatgaactttctaaccttaagaagaataggaaagtatataggcaacaacagaacagcaatatattctttcttgcagaccgaacagaaatgctgtctgagagcaagagtaagttttttcttttttggggtttttggggggtgcctaaattatactcatctgagtgttaaaatatatatctaaagattaatgcagcagtttgattttcttcaaattaggcttccgaagatgagtcaacagttatatatatatgtgtatatatatatatatatatatatatatatatatatatatatatatatattataaatgttttagaaagcaatagttattaacatgtgctttagaattttaaacaggtctaagtatgacaaaccattaccactttctacctttgtgactttgggtgaaatactttaagcctccaaggtattgtgggatctaaataagatgctatgttaaaagtgcttagccaagtgcttgggccaaaatcagcactcggc

SEQ ID NO: 3764 - protein, 93 aa, Homo sapiens; identical to SEQ ID NO: 3762

SEQ ID NO: 3765 - DNA, 1787 bp, Homo sapiens
tataatcttaaacagcggggacccaatagtagtaaacaattgttaaagtctgatgttaactaccagtgtttattttctgctcacgtcctacacttgaggggtgttttgactacccagcctgtggaagatgaaagaggcaatgtgtttctatggaatggagaaatttttagtggaataaaggttgaagctgaagagaatgacactcaaattttgtttaattatctttcctcctgtaagaatgaatctgagattttgtcactcttctcagaagtacaaggtccctggtcatttatatattatcaagcatctagtcattatttatggtttggtagggatttttttggtcgccgtagcttgctttggcattttagtaatttgggcaagagtttctgcctctcttcagttggcacccaaacatctggattggcaaatcagtggcaagaagttccagcatctggacttttcagaattgatcttaagtctactgtcatttccggatgcattattttacaactgtatccttggaaatatatttctagggagaatattattgaagaaaatgttaatagcctgagtcaaatttcagcagacttaccagcatttgtatcagtggtagcaaatgaagccaaactgtatcttgaaaaacctgttgttcctttaaatatgatgttgccacaagctgcattggagactcattgcagtaatatttccaatgtgccacctacaagagagatacttcaagtctttcttactgatgtacacatgaaggaagtaattcagcagttcattgatgtcctgagtgtagcagtcaagaaacgtgtcttgtgtttacctagggatgaaaacctgacagcaaatgaagttttgaaaacgtgtgataggaaagcaaatgttgcaatcctgttttctgggggcattgattccatggttattgcaacccttgctgaccgtcatattcctttagatgaaccaattgatcttcttaatgtagctttcatagctgaagaaaagaccatgccaactacctttaacagagaagggaataaacagaaaaataaatgtgaaatactaagaagaactcgaatatgtcacttaattcggccattggatacagttttggatgatagcattggctgtgcagtctggtttgcttctagaggaattggttggttagtggcccaggaaggagtgaaatcctatcagagcaatgcaaaggtagttctcactggaattggtgcagatgagcaacttgcaggttattctcgtcatcgtgtccgctttcagtcgcatgggctggaaggattgaataaggaaataatgatggaactgggtcgaatttcttctagaaatcttggtcgtgatgacagagttattggtgatcatggaaaagaagcaagatttcctttcctggatgaaaatgttgtctcctttctaaattctctgccgatttgggaaaaagcaaacttgactttaccccgaggaattggtgaaaaattacttttacgccttgcagctgtggaacttggtcttacagcctctgctcttctgcccaaacgggccatgcagtttggatcaagaattgcaaaaatggaaaaaattaatgaaaaggcatctgataaatgtggacggctccaaatcatgtccttagaaaatctttctattgaaaaggagactaaattgtaatgtgattcacaatgtaacaatataaaaataagtttttatataattatataaaagtaagatactctgctgctttactattgtataacatagtagttttaaagttc

SEQ ID NO: 3766 - protein, 339 aa, Homo sapiens
MMLPQAALETHCSNISNVPPTREILQVFLTDVHMKEVIQQFIDVLSVAVKKRVLCLPRDENLTANEVLKTCDRKANVAILFSGGIDSMVIATLADRHIPLDEPIDLLNVAFIAEEKTMPTTFNREGNKQKNKCEILRRTRICHLIRPLDTVLDDSIGCAVWFASRGIGWLVAQEGVKSYQSNAKVVLTGIGADEQLAGYSRHRVRFQSHGLEGLNKEIMMELGRISSRNLGRDDRVIGDHGKEARFPFLDENVVSFLNSLPIWEKANLTLPRGIGEKLLLRLAAVELGLTASALLPKRAMQFGSRIAKMEKINEKASDKCGRLQIMSLENLSIEKETKL

SEQ ID NO: 3767 - DNA, 2042 bp, Homo sapiens
tataatcttaaacagcggggacccaatagtagtaaacaattgttaaagtctgatgttaactaccagtgtttattttctgctcacgtcctacacttgaggggtgttttgactacccagcctgtggaagatgaaagaggcaatgtgtttctatggaatggagaaatttttagtggaataaaggttgaagctgaagagaatgacactcaaattttgtttaattatctttcctcctgtaagaatgaatctgagattttgtcactcttctcagaagtacaaggtccctggtcatttatatattatcaagcatctagtcattatttatggtttggtagggatttttttggtcgccgtagcttgctttggcattttagtaatttgggcaagagtttctgcctctcttcagttggcacccaaacatctggattggcaaatcagtggcaagaagttccagcatctggacttttcagaattgatcttaagtctactgtcatttccggatgcattattttacaactgtatccttggaaatatatttctagggagaatattattgaagaaaatgttaatagcctgagtcaaatttcagcagacttaccagcatttgtatcagtggtagcaaatgaagccaaactgtatcttgaaaaacctgttgttcctttaaatatgatgttgccacaagctgcattggagactcattgcagtaatatttccaatgtgccacctacaagagagatacttcaagtctttcttactgatgtacacatgaaggaagtaattcagcagttcattgatgtcctgagtgtagcagtcaagaaacgtgtcttgtgtttacctagggatgaaaacctgacagcaaatgaagttttgaaaacgtgtgataggaaagcaaatgttgcaatcctgttttctgggggcattgattccatggttattgcaacccttgctgaccgtcatattcctttagatgaaccaattgatcttcttaatgtagctttcatagctgaagaaaagaccatgccaactacctttaacagagaagggaataaacagaaaaataaatgtgaaatactaagaagaactcgaatatgtcacttaattcggccattggatacagttttggatgatagcattggctgtgcagtctggtttgcttctagaggaattggttggttagtggcccaggaaggagtgaaatcctatcagagcaatgcaaaggtagttctcactggaattggtgcagatgagcaacttgcaggttattctcgtcatcgtgtccgctttcagtcgcatgggctggaaggattgaataaggaaataatgatggaactgggtcgaatttcttctagaaatcttggtcgtgatgacagagttattggtgatcatggaaaagaagcaagatttcctttcctggatgaaaatgttgtctcctttctaaattctctgccgatttgggaaaaagcaaacttgactttaccccgaggaattggtgaaaaattacttttacgccttgcagctgtggaacttggtcttacagcctctgctcttctgcccaaacgggccatgcagtttggatcaagaattgcaaaaatggaaaaaattaatgaaaaggcatctgataaatgtggacggctccaaatcatgtccttagaaaatctttctattgaaaaggagactaaattgtaatgtgattcacaatgtaacaatataaaaataagtttttatataattatataaaagtaagatactctgctgctttactattgtataacatagtagttttaaagttcatttggttgaattttcattttttcctgtcacagagcttctaaaaccatggaatttccttagtgatagggaatatcttttgttgttcataataagccccttttgatcacacctgagtttatgctaatgcgttgacttagggtgaggtctctaaatagcctttaacacctgcagcttgggaggccaaggcagagggatctcttgagtccaggagtttgagaacagcctgggcaacatgatgaaacctcatctctacc

SEQ ID NO: 3768 - protein, 339 aa, Homo sapiens; identical to SEQ ID NO: 3766

SEQ ID NO: 3769 - DNA, 1575 bp, Homo sapiens
gtcctacacttgaggggtgttttgactacccagcctgtggaagatgaaagaggcaatgtgtttctatggaatggagaaatttttagtggaataaaggttgaagctgaagagaatgacactcaaattttgtttaattatctttcctcctgtaagaatgaatctgagattttgtcactcttctcagaagtacaaggtccctggtcatttatatattatcaagcatctagtcattatttatggtttggtagggatttttttggtcgccgtagcttgctttggcattttagtaatttgggcaagagtttctgcctctcttcagttggcacccaaacatctggattggcaaatcagtggcaagaagttccagcatctggacttttcagaattgatcttaagtctactgtcatttccggatgcattattttacaactgtatccttggaaatatatttctagggagaatattattgaagaaaatgttaatagcctgagtcaaatttcagcagacttaccagcatttgtatcagtggtagcaaatgaagccaaactgtatcttgaaaaacctgttgttcctttaaatatgatgttgccacaagctgcattggagactcattgcagtaatatttccaatgtgccacctacaagagagatacttcaagtctttcttactgatgtacacatgaaggaagtaattcagcagttcattgatgtcctgagtgtagcagtcaagaaacgtgtcttgtgtttacctagggatgaaaacctgacagcaaatgaagttttgaaaacgtgtgataggaaagcaaatgttgcaatcctgttttctgggggcattgattccatggttattgcaacccttgctgaccgtcatattcctttagatgaaccaattgatcttcttaatgtagctttcatagctgaagaaaagaccatgccaactacctttaacagagaagggaataaacagaaaaataaatgtgaaataccttcagaagaattctctaaagatgttgctgctgctgctgctgacagtcctaataaacatgtcagtgtaccagatcgaatcacaggaagggcgggactaaaggaactacaagctgttagcccttcccgaatttggaattttgttgaaattaatgtttctatggaagaactgcagaaattaagaagaactcgaatatgtcacttaattcggccattggatacagttttggatgatagcattggctgtgcagtctggtttgcttctagaggaattggttggttagtggcccaggaaggagtgaaatcctatcagagcaatgcaaaggtagttctcactggaattggtgcagatgagcaacttgcaggttattctcgtcatcgtgtccgctttcagtcgcatgggctggaaggattgaataaggaaataatgatggaactgggtcgaatttcttctagaaatcttggtcgtgatgacagagttattggtgatcatggaaaagaagcaaggtaattctaatcatttgagtgttcttacggtatttttataaaaacagcagagtgtaaatggagactttaaagtttgttttctctt

SEQ ID NO: 3770 - protein, 304 aa, Homo sapiens
MMLPQAALETHCSNISNVPPTREILQVFLTDVHMKEVIQQFIDVLSVAVKKRVLCLPRDENLTANEVLKTCDRKANVAILFSGGIDSMVIATLADRHIPLDEPIDLLNVAFIAEEKTMPTTFNREGNKQKNKCEIPSEEFSKDVAAAAADSPNKHVSVPDRITGRAGLKELQAVSPSRIWNFVEINVSMEELQKLRRTRICHLIRPLDTVLDDSIGCAVWFASRGIGWLVAQEGVKSYQSNAKVVLTGIGADEQLAGYSRHRVRFQSHGLEGLNKEIMMELGRISSRNLGRDDRVIGDHGKEAR

SEQ ID NO: 3771 - DNA, 1165 bp, Homo sapiens
gaaccaattgatcttcttaatgtagctttcatagctgaagaaaagaccatgccaactacctttaacagagaagggaataaacagaaaaataaatgtgaaataccttcagaagaattctctaaagatgttgctgctgctgctgctgacagtcctaataaacatgtcagtgtaccagatcgaatcacaggaagggcgggactaaaggaactacaagctgttagcccttcccgaatttggaattttgttgaaattaatgtttctatggaagaactgcagaaattaagaagaactcgaatatgtcacttaattcggccattggatacagttttggatgatagcattggctgtgcagtctggtttgcttctagaggaattggttggttagtggcccaggaaggagtgaaatcctatcagagcaatgcaaaggtatgacacagtgtttcttctcctgagaattcctgagacctatttttgacccttaaagcttttagcattttgattgtaagaatatagcatattttaggtgcatttatcttattttctttactgtgtagttgataacatttttatacggatttctttaaacctcataggtagttctcactggaattggtgcagatgagcaacttgcaggttattctcgtcatcgtgtccgctttcagtcgcatgggctggaaggattgaataaggaaataatgatggaactgggtcgaatttcttctagaaatcttggtcgtgatgacagagttattggtgatcatggaaaagaagcaagatttcctttcctggatgaaaatgttgtctcctttctaaattctctgccgatttgggaaaaagcaaacttgactttaccccgaggaattggtgaaaaattacttttacgccttgcagctgtggaacttggtcttacagcctctgctcttctgcccaaacgggccatgcagtttggatcaagaattgcaaaaatggaaaaaattaatgaaaaggcatctgataaatgtggacggctccaaatcatgtccttagaaaatctttctattgaaaaggagactaaattgtaatgtgattcacaatgtaacaatataaaaataagtttttatataattatataaaagtaagatactctgctgctttactattgtataacatagtagttttaaagttc

SEQ ID NO: 3772 - protein, 121 aa, Homo sapiens
MMELGRISSRNLGRDDRVIGDHGKEARFPFLDENVVSFLNSLPIWEKANLTLPRGIGEKLLLRLAAVELGLTASALLPKRAMQFGSRIAKMEKINEKASDKCGRLQIMSLENLSIEKETKL

SEQ ID NO: 3773 - DNA, 1420 bp, Homo sapiens
gaaccaattgatcttcttaatgtagctttcatagctgaagaaaagaccatgccaactacctttaacagagaagggaataaacagaaaaataaatgtgaaataccttcagaagaattctctaaagatgttgctgctgctgctgctgacagtcctaataaacatgtcagtgtaccagatcgaatcacaggaagggcgggactaaaggaactacaagctgttagcccttcccgaatttggaattttgttgaaattaatgtttctatggaagaactgcagaaattaagaagaactcgaatatgtcacttaattcggccattggatacagttttggatgatagcattggctgtgcagtctggtttgcttctagaggaattggttggttagtggcccaggaaggagtgaaatcctatcagagcaatgcaaaggtatgacacagtgtttcttctcctgagaattcctgagacctatttttgacccttaaagcttttagcattttgattgtaagaatatagcatattttaggtgcatttatcttattttctttactgtgtagttgataacatttttatacggatttctttaaacctcataggtagttctcactggaattggtgcagatgagcaacttgcaggttattctcgtcatcgtgtccgctttcagtcgcatgggctggaaggattgaataaggaaataatgatggaactgggtcgaatttcttctagaaatcttggtcgtgatgacagagttattggtgatcatggaaaagaagcaagatttcctttcctggatgaaaatgttgtctcctttctaaattctctgccgatttgggaaaaagcaaacttgactttaccccgaggaattggtgaaaaattacttttacgccttgcagctgtggaacttggtcttacagcctctgctcttctgcccaaacgggccatgcagtttggatcaagaattgcaaaaatggaaaaaattaatgaaaaggcatctgataaatgtggacggctccaaatcatgtccttagaaaatctttctattgaaaaggagactaaattgtaatgtgattcacaatgtaacaatataaaaataagtttttatataattatataaaagtaagatactctgctgctttactattgtataacatagtagttttaaagttcatttggttgaattttcattttttcctgtcacagagcttctaaaaccatggaatttccttagtgatagggaatatcttttgttgttcataataagccccttttgatcacacctgagtttatgctaatgcgttgacttagggtgaggtctctaaatagcctttaacacctgcagcttgggaggccaaggcagagggatctcttgagtccaggagtttgagaacagcctgggcaacatgatgaaacctcatctctacc

SEQ ID NO: 3774 - protein, 121 aa, Homo sapiens; identical to SEQ ID NO: 3772

SEQ ID NO: 3775 - DNA, 4443 bp, Homo sapiens
ggtattccaactcgggactgcctcaacgcccggcgctgtctcctctgctactctgtttcggtgttttagcagaggcagatagtgagggcggcacagtgcccacggcatgccgctggactaagcgctaagcgggcttgggatgatgcgcacgcggggggtctgagccagccaaggggccgggcgccgcctgggggcgctgcggctgctgcgggacgcaccaggcctagtcgcccgcaggctccgcccgaggagcagcccagccaccccagggcccggaggaccaaccgcttcgacccgcgcccgggcggcggcagtgttggccggcgaggcgaggagggccgggccgccacggtggggcgaaaagccctgaaagttcctctcagttccttccggtgcgcctcccgctcgcccttgcggaggccctgagggcggattcaaggccccgcgagaagccatctgaggcggcgacgactgttctcagccccacgggaacgccgcggacgcagcgtccctctcccggacaagaaaacagccattctagagtttgactgatattacaaaggatccagactttaatgaaatctatgatgaagacgtgaatgaagatccaacatatgatcccaacagccctgaagaaacagctgtatttatgaaatatgctgaaaatattatgctaaagttaacattcagtaccacacaaattcaacaagactacagcaaagattatatcttcaaaaaaagattattcaaaaacactttgagaagaaaaaagatatcagaagagggataggatacctaaagttaatatgttttctgattccatttctactgagtttaaagaagaaaatgaaagttccatatttaagtagtctgcttcagcctttttcagatgacaaggtcaagacagagcgagaattgcctccatttatttatggaagagattttaaatgccagaattttcactacaaagagaatcaatattttcatgttcatggaggaattgaatttgatatcagcaccccttcaattgagaatgccttggaagattttcagaaaaatttagaaaaaatacgagattgtgctgctaatacatttatagaagattcaggatataaagaatattactcaataccagtcatggaatttcatggaaaaagctactatgtgatctattttgaactagaaactttctatcagcaactatataagacacagtggtggggagccataaatgaaatagtgaacaatctgagactgaaaagacttccactgacagatgctcaattacatgaacaatttaagaaaaagcttggtttcaaaagagctatgaaatgcaagagtattccatttggtatgaagtccgctgttgaaagagggttgtctgcagttttccacacatttagccgtaaaacctcaagctcaacaatcaatgtttcagatgaagcaggttatactatttttcatcatgctgccctgcacaacagagtttctattatatgtcaactgtgcaatgctaacttcaaggtcaaccagaggcgctttgttacgttcagccaaggtccaacacctctacaccttgctgcacaggcttgctcattagaaacaacagtttgtctactgtgttccaaagctgattacacgctttctgaaaaaagaggctggatgccgattcactttgccgctttctatgacaacgtttgcatcattattgctctctgtaggaaggatcctagtttgctagaagctgaggcaacagctgagaatcagtgcactccactgttacttgctgccacttcaggagcactggacactattcaatacctgttttctatcggtgctaactggagaaaaacagatattaaaggaaataatataatccatttatcagtgttaacctttcatacagaggttctcaaatatataataaaattaaatattcctgaactcccagtgtggaaaactttggtagaaatgttacagtgtgaaagctataaacgaaggatgatggccgtcatgtccttggaagtaatttgcttagcaaatgatcaatactggagatgtattttggatgcagatggccaaataggaacagctccggtctgcagctcccagcatgatcggcgcagaagacaggtgatttctgcatttccaactgaggcaccattcctgccttaatcaatctattaaaaagttccaaaataaaactgcagtgcaaaactgttgggttattgagtaatatctcaacccacaaaagtgcagtgcatgctttggtagaagcgggaggcattccatctctaatcaacctactggtttgtgatgagcctgaagtacactctcgctgtgctgtcattctatatgatattgctcaatgtgaaaacaaggatgttattgccaaatatgaaatgaaaacaatcaaagagctgtgagagaacataaaggcctcccatatcttatcagatttctgagttctgattcagcctgggtgacagagcgagaccttgtctcaaaaaagaaaagaaaagaaaagaaaagtaaagggttgaataaaataggagcctgtgccctcatcctgataacaactggataaacaaggaaacaaataaatagagaataagatgtgttgaaggctgtatcttctgctgcaattgctgaggttgggcgtgacaataaggaaattcaggatgctatagctatggagggagcgattcctcctctggtggctctttttaaagggaaacaaattagtgtccaaatgaaaggtgcaatggctgtggaatcactggcaagtcacaacgctcttatacagaaagcatttctggaaaaatcgttaactaaatatcttttaaaactcctaaaggcatttcaaatagatgttaaggaacaaggagctgttgcactttgggccttggcaggacaaacactaaaacaacaaaaatatatggcagaacaaattggatacagctttataataaatatgcttttgtcaccatcagctaaaatgcagtatgttggaggtgaagctgtcatagctctaagtaaggacagcaggatgcatcaaaatcaaatatgtgaagggaatggaattgcaccattggttcgcttactaagaattagtacgattgctgaaggcacacttctcagtgtcatcagagcagtgggatccatttgtattggtgtagcccatacaagcaatcctgtcagtcaacaattggttgtagatgaaaatgcctttccagtacttatccaactactaagaaatcacccttctcctaacattaagacatcagttgctaaaactgggcggcgatagtgggaatgtgtgacttatatgggaatatttctcaaatattagtgaatcttgtcagtactacacttcagaccagccctgccttctgtcaagcagcctctgttggctggaggttgaagtggcattttccttggcatgcattgtcctagggaatgatgtgttacagaaagacttacatgaaaatgaaggatttgaatatgctgatgtcctttatcttcttcactcaacagaaaaggatatttgcttaagagcaggctatgcattaacactttttgccttcaataatcgctttcaacaatacttaatattggaaagtggaataatgaccatatctatttttgaacgttttcttgaatcaacagttgaaactgagaaggcaatggcagcatttcagattgttgtactggctaaagtcattagagatatggaccatattactttgtctgcaagaggtgttactattttagttgatagtctgtattcagttcagacttctactattgtcttgacagggaatttaatagcaagcctggctcattctagagctggtatcccagaagcatttaccacattaggaacaatccaacggctctgctatcatttgtactcgggaatagaagaggttcgtgcagcttgttcctctgctcttggctacttaacatacaatgcaaatgctttccgcatcctattaaaagaatgcaggaataaacctaatcagttcattcgtataaaaaataatatcagcagagatgcaagtattaacccagcatttttaaaggaatttcaaatgcaacaaacactggtgggacttccttccttaagtctggagaagaatggaggaccatccataattcctatctttaaaagagggaaggagcaccgaagaaaattaaaacctaaaattcaaccaaaagattctttgactttattacctcctgtaactaacttcatgggactcttcaaagcaacaaaaaagaccaaggattcccataatattttttctttttcatctacaattacatcagatatcacaaatgtatcaagaccaagaatagtgtgtttgaaccaacttgggaaacatgtccagaaagccaacccagagcctgcagaaggctaataaaacattttagaatgaa

SEQ ID NO: 3776 - protein, 442 aa, Homo sapiens
MKVPYLSSLLQPFSDDKVKTERELPPFIYGRDFKCQNFHYKENQYFHVHGGIEFDISTPSIENALEDFQKNLEKIRDCAANTFIEDSGYKEYYSIPVMEFHGKSYYVIYFELETFYQQLYKTQWWGAINEIVNNLRLKRLPLTDAQLHEQFKKKLGFKRAMKCKSIPFGMKSAVERGLSAVFHTFSRKTSSSTINVSDEAGYTIFHHAALHNRVSIICQLCNANFKVNQRRFVTFSQGPTPLHLAAQACSLETTVCLLCSKADYTLSEKRGWMPIHFAAFYDNVCIIIALCRKDPSLLEAEATAENQCTPLLLAATSGALDTIQYLFSIGANWRKTDIKGNNIIHLSVLTFHTEVLKYIIKLNIPELPVWKTLVEMLQCESYKRRMMAVMSLEVICLANDQYWRCILDADGQIGTAPVCSSQHDRRRRQVISAFPTEAPFLP

SEQ ID NO: 3777 - DNA, 3734 bp, Homo sapiens
gtattccaactcgggactgcctcaacgcccggcgctgtctcctctgctactctgtttcggtgttttagcagaggcagatagtgagggcggcacagtgcccacggcatgccgctggactaagcgctaagcgggcttgggatgatgcgcacgcggggggtctgagccagccaaggggccgggcgccgcctgggggcgctgcggctgctgcgggacgcaccaggcctagtcgcccgcaggctccgcccgaggagcagcccagccaccccagggcccggaggaccaaccgcttcgacccgcgcccgggcggcggcagtgttggccggcgaggcgaggagggccgggccgccacggtggggcgaaaagccctgaaagttcctctcagttccttccggtgcgcctcccgctcgcccttgcggaggccctgagggcggattcaaggccccgcgagaagccatctgaggcggcgacgactgttctcagccccacgggaacgccgcggacgcagcgtccctctcccggacaagaaaacagccattctagagtttgactgatattacaaaggatccagactttaatgaaatctatgatgaagacgtgaatgaagatccaacatatgatcccaacagccctgaagaaacagctgtatttatgaaatatgctgaaaatattatgctaaagttaacattcagtaccacacaaattcaacagtatgaaaatgtctttatatttgaaacaggctattggcttactaatgctataaaatataatcaggattatcttgatatctgtacctaccagagactacagcaaagattatatcttcaaaaaaagattattcaaaaacactttgagaagaaaaaagatatcagaagagggataggatacctaaagttaatatgttttctgattccatttctactgagtttaaagaagaaaatgaaagttccatatttaagtagtctgcttcagcctttttcagatgacaaggtcaagacagagcgagaattgcctccatttatttatggaagagattttaaatgccagaattttcactacaaagagaatcaatattttcatgttcatggaggaattgaatttgatatcagcaccccttcaattgagaatgccttggaagattttcagaaaaatttagaaaaaatacgagattgtgctgctaatacatttatagaagattcaggatataaagaatattactcaataccagtcatggaatttcatggaaaaagctactatgtgatctattttgaactagaaactttctatcagcaactatataagacacagtggtggggagccataaatgaaatagtgaacaatctgagactgaaaagacttccactgacagatgctcaattacatgaacaatttaagaaaaagcttggtttcaaaagagctatgaaatgcaagagtattccatttggtatgaagtccgctgttgaaagagggttgtctgcagttttccacacatttagccgtaaaacctcaagctcaacaatcaatgtttcagatgaagcaggttatactatttttcatcatgctgccctgcacaacagagtttctattatatgtcaactgtgcaatgctaacttcaaggtcaaccagaggcgctttgttacgttcagccaaggtccaacacctctacaccttgctgcacaggcttgctcattagaaacaacagtttgtctactgtgttccaaagctgattacacgctttctgaaaaaagaggctggatgccgattcactttgccgctttctatgacaacgtttgcatcattattgctctctgtaggaaggatcctagtttgctagaagctgaggcaacagctgagaatcagtgcactccactgttacttgctgccacttcaggagcactggacactattcaatacctgttttctatcggtgctaactggagaaaaacagatattaaaggaaataatataatccatttatcagtgttaacctttcatacagaggttctcaaatatataataaaattaaatattcctgaactcccagtgtggaaaactttggtagaaatgttacagtgtgaaagctataaacgaaggatgatggccgtcatgtccttggaagtaatttgcttagcaaatgatcaatactggagatgtattttggatgcaggcaccattcctgccttaatcaatctattaaaaagttccaaaataaaactgcagtgcaaaactgttgggttattgagtaatatctcaacccacaaaagtgcagtgcatgctttggtagaagcgggaggcattccatctctaatcaacctactggtttgtgatgagcctgaagtacactctcgctgtgctgtcattctatatgatattgctcaatgtgaaaacaaggatgttattgccaaatataatggaatcccaagcctgataaatctattgaacttaaacatagaaaatgtgctagtaaatgtaatgaactgtatacgggtattgtgtataggaaatgaaaacaatcaaagagctgtgagagaacataaaggcctcccatatcttatcagatttctgagttctgattcaggtttatttaacttgttcttaaattcatttgaagatgtgttgaaggctgtatcttctgctgcaattgctgaggttgggcgtgacaataaggaaattcaggatgctatagctatggagggagcgattcctcctctggtggctctttttaaagggaaacaaattagtgtccaaatgaaaggtgcaatggctgtggaatcactggcaagtcacaacgctcttatacagaaagcatttctggaaaaatcgttaactaaatatcttttaaaactcctaaaggcatttcaaatagatgttaaggaacaaggagctgttgcactttgggccttggcaggacaaacactaaaacaacaaaaatatatggcagaacaaattggatacagctttataataaatatgcttttgtcaccatcagctaaaatgcagtatgttggatatttgcttaagagcaggctatgcattaacactttttgccttcaataatcgctttcaacaatacttaatattggaaagtggaataatgaccatatctatttttgaacgttttcttgaatcaacagttgaaactgagaaggcaatggcagcatttcagattgttgtactggctaaagtcattagagatatggaccatattactttgtctgcaagaggtgttactattttagttgatagtctgtattcagttcagacttctactattgtcttgacagggaatttaatagcaagcctggctcattctagagctggtatcccagaagcatttaccacattaggaacaatccaacggctctgctatcatttgtactcgggaatagaagaggttcgtgcagcttgttcctctgctcttggctacttaacatacaatgcaaatgctttccgcatcctattaaaagaatgcaggaataaacctaatcagttcattcgtataaaaaataatatcagcagagatgcaagtattaacccagcatttttaaaggaatttcaaatgcaacaaacactggtgggacttccttccttaagtctggagaagaatggaggaccatccataattcctatctttaaaagagttttcctaggacttcagctgagaccatgaaacatagaagtggagaaaagaaggaatgcattactgaaggaaaatcaataaatacggaagctgggaa

SEQ ID NO: 3778 - protein, 801 aa, Homo sapiens
MKYAENIMLKLTFSTTQIQQYENVFIFETGYWLTNAIKYNQDYLDICTYQRLQQRLYLQKKIIQKHFEKKKDIRRGIGYLKLICFLIPFLLSLKKKMKVPYLSSLLQPFSDDKVKTERELPPFIYGRDFKCQNFHYKENQYFHVHGGIEFDISTPSIENALEDFQKNLEKIRDCAANTFIEDSGYKEYYSIPVMEFHGKSYYVIYFELETFYQQLYKTQWWGAINEIVNNLRLKRLPLTDAQLHEQFKKKLGFKRAMKCKSIPFGMKSAVERGLSAVFHTFSRKTSSSTINVSDEAGYTIFHHAALHNRVSIICQLCNANFKVNQRRFVTFSQGPTPLHLAAQACSLETTVCLLCSKADYTLSEKRGWMPIHFAAFYDNVCIIIALCRKDPSLLEAEATAENQCTPLLLAATSGALDTIQYLFSIGANWRKTDIKGNNIIHLSVLTFHTEVLKYIIKLNIPELPVWKTLVEMLQCESYKRRMMAVMSLEVICLANDQYWRCILDAGTIPALINLLKSSKIKLQCKTVGLLSNISTHKSAVHALVEAGGIPSLINLLVCDEPEVHSRCAVILYDIAQCENKDVIAKYNGIPSLINLLNLNIENVLVNVMNCIRVLCIGNENNQRAVREHKGLPYLIRFLSSDSGLFNLFLNSFEDVLKAVSSAAIAEVGRDNKEIQDAIAMEGAIPPLVALFKGKQISVQMKGAMAVESLASHNALIQKAFLEKSLTKYLLKLLKAFQIDVKEQGAVALWALAGQTLKQQKYMAEQIGYSFIINMLLSPSAKMQYVGYLLKSRLCINTFCLQ

SEQ ID NO: 3779 - DNA, 3199 bp, Homo sapiens
gctgcgggacgcaccaggcctagtcgcccgcaggctccgcccgaggagcagcccagccaccccagggcccggaggaccaaccgcttcgacccgcgcccgggcggcggcagtgttggccggcgaggcgaggagggccgggccgccacggtggggcgaaaagccctgaaagttcctctcagttccttccggtgcgcctcccgctcgcccttgcggaggccctgagggcggattcaaggccccgcgagaagccatctgaggcggcgacgactgttctcagccccacgggaacgccgcggacgcagcgtccctctcccggacaagaaaacagccattctagagtttgactgatattacaaaggatccagactttaatgaaatctatgatgaagacgtgaatgaagatccaacatatgatcccaacagccctgaagaaacagctgtatttatgaaatatgctgaaaatattatgctaaagttaacattcagtaccacacaaattcaacagtatgaaaatgtctttatatttgaaacaggctattggcttactaatgctataaaatataatcaggattatcttgatatctgtacctaccagagactacagcaaagattatatcttcaaaaaaagattattcaaaaacactttgagaagaaaaaagatatcagaagagggataggatacctaaagttaatatgttttctgattccatttctactgagtttaaagaagaaaatgaaagttccatatttaagtagtctgcttcagcctttttcagctactatgtgatctattttgaactagaaactttctatcagcaactatataagacacagtggtggggagccataaatgaaatagtgaacaatctgagactgaaaagacttccactgacagatgctcaattacatgaacaatttaagaaaaagcttggtttcaaaagagctatgaaatgcaagagtattccatttggtatgaagtccgctgttgaaagagggttgtctgcagttttccacacatttagccgtaaaacctcaagctcaacaatcaatgtttcagatgaagcaggttatactatttttcatcatgctgccctgcacaacagagtttctattatatgtcaactgtgcaatgctaacttcaaggtcaaccagaggcgctttgttacgttcagccaaggtccaacacctctacaccttgctgcacaggcttgctcattagaaacaacagtttgtctactgtgttccaaagctgattacacgctttctgaaaaaagaggctggatgccgattcactttgccgctttctatgacaacgtttgcatcattattgctctctgtaggaaggatcctagtttgctagaagctgaggcaacagctgagaatcagtgcactccactgttacttgctgccacttcaggagcactggacactattcaatacctgttttctatcggtgctaactggagaaaaacagatattaaaggaaataatataatccatttatcagtgttaacctttcatacagaggttctcaaatatataataaaattaaatattcctgaactcccagtgtggaaaactttggtagaaatgttacagtgtgaaagctataaacgaaggatgatggccgtcatgtccttggaagtaatttgcttagcaaatgatcaatactggagatgtattttggatgcaggcaccattcctgccttaatcaatctattaaaaagttccaaaataaaactgcagtgcaaaactgttgggttattgagtaatatctcaacccacaaaagtgcagtgcatgctttggtagaagcgggaggcattccatctctaatcaacctactggtttgtgatgagcctgaagtacactctcgctgtgctgtcattctatatgatattgctcaatgtgaaaacaaggatgttattgccaaatataatggaatcccaagcctgataaatctattgaacttaaacatagaaaatgtgctagtaaatgtaatgaactgtatacgggtattgtgtataggaaatgaaaacaatcaaagagctgtgagagaacataaaggcctcccatatcttatcagatttctgagttctgattcagatgtgttgaaggctgtatcttctgctgcaattgctgaggttgggcgtgacaataaggaaattcaggatgctatagctatggagggagcgattcctcctctggtggctctttttaaagggaaacaaattagtgtccaaatgaaaggtgcaatggctgtggaatcactggcaagtcacaacgctcttatacagaaagcatttctggaaaaatcgttaactaaatatcttttaaaactcctaaaggcatttcaaatagatgttaaggaacaaggagctgttgcactttgggccttggcaggacaaacactaaaacaacaaaaatatatggcagaacaaattggatacagctttataataaatatgcttttgtcaccatcagctaaaatgcagtatgttggatatttgcttaagagcaggctatgcattaacactttttgccttcaataatcgctttcaacaatacttaatattggaaagtggaataatgaccatatctatttttgaacgttttcttgaatcaacagttgaaactgagaaggcaatggcagcatttcagattgttgtactggctaaagtcattagagatatggaccatattactttgtctgcaagaggtgttactattttagttgatagtctgtattcagttcagacttctactattgtcttgacagggaatttaatagcaagcctggctcattctagagctggtatcccagaagcatttaccacattaggaacaatccaacggctctgctatcatttgtactcgggaatagaagagtctggagaagaatggaggaccatccataattcctatctttaaaagagggaaggagcaccgaagaaaattaaaacctaaaattcaaccaaaagattctttgactttattacctcctgtaactaacttcatgggactcttcaaagcaacaaaaaagaccaaggattcccataatattttttctttttcatctacaattacatcagatatcacaaatgtatcaagaccaagaatagtgtgtttgaaccaacttgggaaacatgtccagaaagccaacccagagcctgcagaaggctaataaaacattttagaatg

SEQ ID NO: 3780 - protein, 534 aa, Homo sapiens
MKCKSIPFGMKSAVERGLSAVFHTFSRKTSSSTINVSDEAGYTIFHHAALHNRVSIICQLCNANFKVNQRRFVTFSQGPTPLHLAAQACSLETTVCLLCSKADYTLSEKRGWMPIHFAAFYDNVCIIIALCRKDPSLLEAEATAENQCTPLLLAATSGALDTIQYLFSIGANWRKTDIKGNNIIHLSVLTFHTEVLKYIIKLNIPELPVWKTLVEMLQCESYKRRMMAVMSLEVICLANDQYWRCILDAGTIPALINLLKSSKIKLQCKTVGLLSNISTHKSAVHALVEAGGIPSLINLLVCDEPEVHSRCAVILYDIAQCENKDVIAKYNGIPSLINLLNLNIENVLVNVMNCIRVLCIGNENNQRAVREHKGLPYLIRFLSSDSDVLKAVSSAAIAEVGRDNKEIQDAIAMEGAIPPLVALFKGKQISVQMKGAMAVESLASHNALIQKAFLEKSLTKYLLKLLKAFQIDVKEQGAVALWALAGQTLKQQKYMAEQIGYSFIINMLLSPSAKMQYVGYLLKSRLCINTFCLQ

SEQ ID NO: 3781 - DNA, 3980 bp, Homo sapiens
ctcacaagaagctgagcagatgctggtgccatgcttgtacagcctgcagaattaagcttcaaaaaggacacactagatttaattagaaatgttaagattgcccaaaaaaggattacctagatttgagcaagttcaggatgaagacacctacctggaaaatttagcaatacaaagaaatgcatctgctttttttgaaaaatatgatcggagtgaaatacaagagttactaactactgcactagttagctggttgtctgccaaagaggatgtgcgctctcaagtagacctcccatgtggaattatgagtcaaatgaataacgtaggcttctccactgcaatcctactgactcccgtggaccctactgccctcttagactatagagaggtccatcaaatgataagagagttggctattggaatttattgcctaaatcaaatcccttccatcagtttagaagctaattatgatcagagttcttcttgtcaattacctccagcttattatgataccagaattgggcaaattctgatcaatattgactacatgctgaaagcactatggcatggaatatatatgcccaaagaaaaacgagctagattctctgaattgtggcgtgccatcatggacattgatcctgatggaaaacctcaaacaaataaagacattttttcagagtttagttcagcaggtttgactgatattacaaaggatccagactttaatgaaatctatgatgaagacgtgaatgaagatccaacatatgatcccaacagccctgaagaaacagctgtatttatgaaatatgctgaaaatattatgctaaagttaacattcagtaccacacaaattcaacagtatgaaaatgtctttatatttgaaacaggctattggcttactaatgctataaaatataatcaggattatcttgatatctgtacctaccagagactacagcaaagattatatcttcaaaaaaagattattcaaaaacactttgagaagaaaaaagatatcagaagagggataggatacctaaagttaatatgttttctgattccatttctactgagtttaaagaagaaaatgaaagttccatatttaagtagtctgcttcagcctttttcagatgacaaggtcaagacagagcgagaattgcctccatttatttatggaagagattttaaatgccagaattttcactacaaagagaatcaatattttcatgttcatggaggaattgaatttgatatcagcaccccttcaattgagaatgccttggaagattttcagaaaaatttagaaaaaatacgagattgtgctgctaatacatttatagaagattcaggatataaagaatattactcaataccagtcatggaatttcatggaaaaagctactatgtgatctattttgaactagaaactttctatcagcaactatataagacacagtggtggggagccataaatgaaatagtgaacaatctgagactgaaaagacttccactgacagatgctcaattacatgaacaatttaagaaaaagcttggtttcaaaagagctatgaaatgcaagagtattccatttggtatgaagtccgctgttgaaagagggttgtctgcagttttccacacatttagccgtaaaacctcaagctcaacaatcaatgtttcagatgaagcaggttatactatttttcatcatgctgccctgcacaacagagtttctattatatgtcaactgtgcaatgctaacttcaaggtcaaccagaggcgctttgttacgttcagccaaggtccaacacctctacaccttgctgcacaggcttgctcattagaaacaacagtttgtctactgtgttccaaagctgattacacgctttctgaaaaaagaggctggatgccgattcactttgccgctttctatgacaacgtttgcatcattattgctctctgtaggaaggatcctagtttgctagaagctgaggcaacagctgagaatcagtgcactccactgttacttgctgccacttcaggagcactggacactattcaatacctgttttctatcggtgctaactggagaaaaacagatattaaaggaaataatataatccatttatcagtgttaacctttcatacagaggttctcaaatatataataaaattaaatattcctgaactcccagtgtggaaaactttggtagaaatgttacagtgtgaaagctataaacgaaggatgatggccgtcatgtccttggaagtaatttgcttagcaaatgatcaatactggagatgtattttggatgcaggcaccattcctgccttaatcaatctattaaaaagttccaaaataaaactgcagtgcaaaactgttgggttattgagtaatatctcaacccacaaaagtgcagtgcatgctttggtagaagcgggaggcattccatctctaatcaacctactggtttgtgatgagcctgaagtacactctcgctgtgctgtcattctatatgatattgctcaatgtgaaaacaaggatgttattgccaaatataatggaatcccaagcctgataaatctattgaacttaaacatagaaaatgtgctagtaaatgtaatgaactgtatacgggtattgtgtataggaaatgaaaacaatcaaagagctgtgagagaacataaaggcctcccatatcttatcagatttctgagttctgattcagatgtgttgaaggctgtatcttctgctgcaattgctgaggttgggcgtgacaataaggaaattcaggatgctatagctatggagggagcgattcctcctctggtggctctttttaaagggaaacaaattagtgtccaaatgaaaggtgcaatggctgtggaatcactggcaagtcacaacgctcttatacagaaagcatttctggaaaaatcgttaactaaatatcttttaaaactcctaaaggcatttcaaatagatgttaaggaacaaggagctgttgcactttgggccttggcaggacaaacactaaaacaacaaaaatatatggcagaacaaattggatacagctttataataaatatgcttttgtcaccatcagctaaaatgcagtatgttggaggtgaagctgtcatagctctaagtaaggacagcaggatgcatcaaaatcaaatatgtgaagggaatggaattgcaccattggttcgcttactaagaattagtacgattgctgaaggcacacttctcagtgtcatcagagcagtgggatccatttgtattggatatttgcttaagagcaggctatgcattaacactttttgccttcaataatcgctttcaacaatacttaatattggaaagtggaataatgaccatatctatttttgaacgttttcttgaatcaacagttgaaactgagaaggcaatggcagcatttcagattgttgtactggctaaagtcattagagatatggaccatattactttgtctgcaagaggtgttactattttagttgatagtctgtattcagttcagacttctactattgtcttgacagggaatttaatagcaagcctggctcattctagagctggtatcccagaagcatttaccacattaggaacaatccaacggctctgctatcatttgtactcgggaatagaagagtctggagaagaatggaggaccatccataattcctatctttaaaagagggaaggagcaccgaagaaaattaaaacctaaaattcaaccaaaagattctttgactttattacctcctgtaactaacttcatgggactcttcaaagcaacaaaaaagaccaaggattcccataatattttttctttttcatctacaattacatcagatatcacaaatgtatcaagaccaagaatagtgtgtttgaaccaacttgggaaacatgtccagaaagccaacccagagcctgcagaaggctaataaaacattttagaatg

SEQ ID NO: 3782 - protein, 1080 aa, Homo sapiens
MLRLPKKGLPRFEQVQDEDTYLENLAIQRNASAFFEKYDRSEIQELLTTALVSWLSAKEDVRSQVDLPCGIMSQMNNVGFSTAILLTPVDPTALLDYREVHQMIRELAIGIYCLNQIPSISLEANYDQSSSCQLPPAYYDTRIGQILINIDYMLKALWHGIYMPKEKRARFSELWRAIMDIDPDGKPQTNKDIFSEFSSAGLTDITKDPDFNEIYDEDVNEDPTYDPNSPEETAVFMKYAENIMLKLTFSTTQIQQYENVFIFETGYWLTNAIKYNQDYLDICTYQRLQQRLYLQKKIIQKHFEKKKDIRRGIGYLKLICFLIPFLLSLKKKMKVPYLSSLLQPFSDDKVKTERELPPFIYGRDFKCQNFHYKENQYFHVHGGIEFDISTPSIENALEDFQKNLEKIRDCAANTFIEDSGYKEYYSIPVMEFHGKSYYVIYFELETFYQQLYKTQWWGAINEIVNNLRLKRLPLTDAQLHEQFKKKLGFKRAMKCKSIPFGMKSAVERGLSAVFHTFSRKTSSSTINVSDEAGYTIFHHAALHNRVSIICQLCNANFKVNQRRFVTFSQGPTPLHLAAQACSLETTVCLLCSKADYTLSEKRGWMPIHFAAFYDNVCIIIALCRKDPSLLEAEATAENQCTPLLLAATSGALDTIQYLFSIGANWRKTDIKGNNIIHLSVLTFHTEVLKYIIKLNIPELPVWKTLVEMLQCESYKRRMMAVMSLEVICLANDQYWRCILDAGTIPALINLLKSSKIKLQCKTVGLLSNISTHKSAVHALVEAGGIPSLINLLVCDEPEVHSRCAVILYDIAQCENKDVIAKYNGIPSLINLLNLNIENVLVNVMNCIRVLCIGNENNQRAVREHKGLPYLIRFLSSDSDVLKAVSSAAIAEVGRDNKEIQDAIAMEGAIPPLVALFKGKQISVQMKGAMAVESLASHNALIQKAFLEKSLTKYLLKLLKAFQIDVKEQGAVALWALAGQTLKQQKYMAEQIGYSFIINMLLSPSAKMQYVGGEAVIALSKDSRMHQNQICEGNGIAPLVRLLRISTIAEGTLLSVIRAVGSICIGYLLKSRLCINTFCLQ

SEQ ID NO: 3783 - DNA, 4327 bp, Homo sapiens
atgttaagattgcccaaaaaaggattacctagatttgagcaagttcaggatgaagacacctacctggaaaatttagcaatacaaagaaatgcatctgctttttttgaaaaatatgatcggagtgaaatacaagagttactaactactgcactagttagctggttgtctgccaaagaggatgtgcgctctcaagtagacctcccatgtggaattatgagtcaaatgaataacgtaggcttctccactgcaatcctactgactcccgtggaccctactgccctcttagactatagagaggtccatcaaatgataagagagttggctattggaatttattgcctaaatcaaatcccttccatcagtttagaagctaattatgatcagagttcttcttgtcaattacctccagcttattatgataccagaattgggcaaattctgatcaatattgactacatgctgaaagcactatggcatggaatatatatgcccaaagaaaaacgagctagattctctgaattgtggcgtgccatcatggacattgatcctgatggaaaacctcaaacaaataaagacattttttcagagtttagttcagcaggtttgactgatattacaaaggatccagactttaatgaaatctatgatgaagacgtgaatgaagatccaacatatgatcccaacagccctgaagaaacagctgtatttatgaaatatgctgaaaatattatgctaaagttaacattcagtaccacacaaattcaacagtatgaaaatgtctttatatttgaaacaggctattggcttactaatgctataaaatataatcaggattatcttgatatctgtacctaccagagactacagcaaagattatatcttcaaaaaaagattattcaaaaacactttgagaagaaaaaagatatcagaagagggataggatacctaaagttaatatgttttctgattccatttctactgagtttaaagaagaaaatgaaagttccatatttaagtagtctgcttcagcctttttcagatgacaaggtcaagacagagcgagaattgcctccatttatttatggaagagattttaaatgccagaattttcactacaaagagaatcaatattttcatgttcatggaggaattgaatttgatatcagcaccccttcaattgagaatgccttggaagattttcagaaaaatttagaaaaaatacgagattgtgctgctaatacatttatagaagattcaggatataaagaatattactcaataccagtcatggaatttcatggaaaaagctactatgtgatctattttgaactagaaactttctatcagcaactatataagacacagtggtggggagccataaatgaaatagtgaacaatctgagactgaaaagacttccactgacagatgctcaattacatgaacaatttaagaaaaagcttggtttcaaaagagctatgaaatgcaagagtattccatttggtatgaagtccgctgttgaaagagggttgtctgcagttttccacacatttagccgtaaaacctcaagctcaacaatcaatgtttcagatgaagcaggttatactatttttcatcatgctgccctgcacaacagagtttctattatatgtcaactgtgcaatgctaacttcaaggtcaaccagaggcgctttgttacgttcagccaaggtccaacacctctacaccttgctgcacaggcttgctcattagaaacaacagtttgtctactgtgttccaaagctgattacacgctttctgaaaaaagaggctggatgccgattcactttgccgctttctatgacaacgtttgcatcattattgctctctgtaggaaggatcctagtttgctagaagctgaggcaacagctgagaatcagtgcactccactgttacttgctgccacttcaggagcactggacactattcaatacctgttttctatcggtgctaactggagaaaaacagatattaaaggaaataatataatccatttatcagtgttaacctttcatacagaggttctcaaatatataataaaattaaatattcctgaactcccagtgtggaaaactttggtagaaatgttacagtgtgaaagctataaacgaaggatgatggccgtcatgtccttggaagtaatttgcttagcaaatgatcaatactggagatgtattttggatgcaggcaccattcctgccttaatcaatctattaaaaagttccaaaataaaactgcagtgcaaaactgttgggttattgagtaatatctcaacccacaaaagtgcagtgcatgctttggtagaagcgggaggcattccatctctaatcaacctactggtttgtgatgagcctgaagtacactctcgctgtgctgtcattctatatgatattgctcaatgtgaaaacaaggatgttattgccaaatataatggaatcccaagcctgataaatctattgaacttaaacatagaaaatgtgctagtaaatgtaatgaactgtatacgggtattgtgtataggaaatgaaaacaatcaaagagctgtgagagaacataaaggcctcccatatcttatcagatttctgagttctgattcagatgtgttgaaggctgtatcttctgctgcaattgctgaggttgggcgtgacaataaggaaattcaggatgctatagctatggagggagcgattcctcctctggtggctctttttaaagggaaacaaattagtgtccaaatgaaaggtgcaatggctgtggaatcactggcaagtcacaacgctcttatacagaaagcatttctggaaaaatcgttaactaaatatcttttaaaactcctaaaggcatttcaaatagatgttaaggaacaaggagctgttgcactttgggccttggcaggacaaacactaaaacaacaaaaatatatggcagaacaaattggatacagctttataataaatatgcttttgtcaccatcagctaaaatgcagtatgttggaggtgaagctgtcatagctctaagtaaggacagcaggatgcatcaaaatcaaatatgtgaagggaatggaattgcaccattggttcgcttactaagaattagtacgattgctgaaggcacacttctcagtgtcatcagagcagtgggatccatttgtattggtgtagcccatacaagcaatcctgtcagtcaacaattggttgtagatgaaaatgcctttccagtacttatccaactactaagaaatcacccttctcctaacattaaggttgaagtggcattttccttggcatgcattgtcctagggaatgatgtgttacagaaagacttacatgaaaatgaaggatttgaatatgctgatgtcctttatcttcttcactcaacagaaaaggatatttgcttaagagcaggctatgcattaacactttttgccttcaataatcgctttcaacaatacttaatattggaaagtggaataatgaccatatctatttttgaacgttttcttgaatcaacagttgaaactgagaaggcaatggcagcatttcagattgttgtactggctaaagtcattagagatatggaccatattactttgtctgcaagaggtgttactattttagttgatagtctgtattcagttcagacttctactattgtcttgacagggaatttaatagcaagcctggctcattctagagctggtatcccagaagcatttaccacattaggaacaatccaacggctctgctatcatttgtactcgggaatagaagaggttcgtgcagcttgttcctctgctcttggctacttaacatacaatgcaaatgctttccgcatcctattaaaagaatgcaggaataaacctaatcagttcattcgtataaaaaataatatcagcagagatgcaagtattaacccagcatttttaaaggaatttcaaatgcaacaaacactggtgggacttccttccttaagtctggagaagaatggaggaccatccataattcctatctttaaaagagggaaggagcaccgaagaaaattaaaacctaaaattcaaccaaaagattctttgactttattacctcctgtaactaacttcatgggactcttcaaagcaacaaaaaagaccaaggattcccataatattttttctttttcatctacaattacatcagatatcacaaatgtatcaagaccaagaatagtgtgtttgaaccaacttgggaaacatgtccagaaagccaacccagagcctgcagaaggctaataaaacattttagaatgaaagg

SEQ ID NO: 3784 - protein, 1434 aa, Homo sapiens
MLRLPKKGLPRFEQVQDEDTYLENLAIQRNASAFFEKYDRSEIQELLTTALVSWLSAKEDVRSQVDLPCGIMSQMNNVGFSTAILLTPVDPTALLDYREVHQMIRELAIGIYCLNQIPSISLEANYDQSSSCQLPPAYYDTRIGQILINIDYMLKALWHGIYMPKEKRARFSELWRAIMDIDPDGKPQTNKDIFSEFSSAGLTDITKDPDFNEIYDEDVNEDPTYDPNSPEETAVFMKYAENIMLKLTFSTTQIQQYENVFIFETGYWLTNAIKYNQDYLDICTYQRLQQRLYLQKKIIQKHFEKKKDIRRGIGYLKLICFLIPFLLSLKKKMKVPYLSSLLQPFSDDKVKTERELPPFIYGRDFKCQNFHYKENQYFHVHGGIEFDISTPSIENALEDFQKNLEKIRDCAANTFIEDSGYKEYYSIPVMEFHGKSYYVIYFELETFYQQLYKTQWWGAINEIVNNLRLKRLPLTDAQLHEQFKKKLGFKRAMKCKSIPFGMKSAVERGLSAVFHTFSRKTSSSTINVSDEAGYTIFHHAALHNRVSIICQLCNANFKVNQRRFVTFSQGPTPLHLAAQACSLETTVCLLCSKADYTLSEKRGWMPIHFAAFYDNVCIIIALCRKDPSLLEAEATAENQCTPLLLAATSGALDTIQYLFSIGANWRKTDIKGNNIIHLSVLTFHTEVLKYIIKLNIPELPVWKTLVEMLQCESYKRRMMAVMSLEVICLANDQYWRCILDAGTIPALINLLKSSKIKLQCKTVGLLSNISTHKSAVHALVEAGGIPSLINLLVCDEPEVHSRCAVILYDIAQCENKDVIAKYNGIPSLINLLNLNIENVLVNVMNCIRVLCIGNENNQRAVREHKGLPYLIRFLSSDSDVLKAVSSAAIAEVGRDNKEIQDAIAMEGAIPPLVALFKGKQISVQMKGAMAVESLASHNALIQKAFLEKSLTKYLLKLLKAFQIDVKEQGAVALWALAGQTLKQQKYMAEQIGYSFIINMLLSPSAKMQYVGGEAVIALSKDSRMHQNQICEGNGIAPLVRLLRISTIAEGTLLSVIRAVGSICIGVAHTSNPVSQQLVVDENAFPVLIQLLRNHPSPNIKVEVAFSLACIVLGNDVLQKDLHENEGFEYADVLYLLHSTEKDICLRAGYALTLFAFNNRFQQYLILESGIMTISIFERFLESTVETEKAMAAFQIVVLAKVIRDMDHITLSARGVTILVDSLYSVQTSTIVLTGNLIASLAHSRAGIPEAFTTLGTIQRLCYHLYSGIEEVRAACSSALGYLTYNANAFRILLKECRNKPNQFIRIKNNISRDASINPAFLKEFQMQQTLVGLPSLSLEKNGGPSIIPIFKRGKEHRRKLKPKIQPKDSLTLLPPVTNFMGLFKATKKTKDSHNIFSFSSTITSDITNVSRPRIVCLNQLGKHVQKANPEPAEG

SEQ ID NO: 3785 - DNA, 1187 bp, Homo sapiens
attgactacatgctgaaagcactatggcatggaatatatatgcccaaagaaaaacgagctagattctctgaattgtggcgtgccatcatggacattgatcctgatggaaaacctcaaacaaataaagacattttttcagagtttagttcagcaggtttgactgatattacaaaggatccagactttaatgaaatctatgatgaagacgtgaatgaagatccaacatatgatcccaacagccctgaagaaacagctgtatttatgaaatatgctgaaaatattatgctaaagttaacattcagtaccacacaaattcaacagtatgaaaatgtctttatatttgaaacaggctattggcttactaatgctataaaatataatcaggattatcttgatatctgtacctaccagagactacagcaaagattatatcttcaaaaaaagattattcaaaaacactttgagaagaaaaaagatatcagaagagggataggatacctaaagttaatatgttttctgattccatttctactgagtttaaagaagaaaatgaaagttccatatttaagtagtctgcttcagcctttttcagatgacaaggtcaagacagagcgagaattgcctccatttatttatggaagagattttaaatgccagaattttcactacaaagagaatcaatattttcatgttcatggaggaattgaatttgatatcagcaccccttcaattgagaatgccttggaagattttcaggtttaaatgatcattccttagacaatttatcatttcacaactcttttatcctattctccaaccaaaaagagcctctgttggtacaggcactcgacagctctccaaatgattattctcacaactcaataattttttcatacattattttaacatcaatgaattaagtgcagatatatgtaaggtactgtgttggatatctgagataaaattataaataagctaggtacatctatcaccctcacagaatttaaagacttctaatggactatatttgtcccagaacaggtaaccaaagagtgcagtagaaatctctggacactcagtacacattcttccattttcctcaaagaatcaggattagaacagagatcctttaaaattttggaacagtaattcttcacctggaatttagtataaaaattctacatttc

SEQ ID NO: 3786 - protein, 250 aa, Homo sapiens
MLKALWHGIYMPKEKRARFSELWRAIMDIDPDGKPQTNKDIFSEFSSAGLTDITKDPDFNEIYDEDVNEDPTYDPNSPEETAVFMKYAENIMLKLTFSTTQIQQYENVFIFETGYWLTNAIKYNQDYLDICTYQRLQQRLYLQKKIIQKHFEKKKDIRRGIGYLKLICFLIPFLLSLKKKMKVPYLSSLLQPFSDDKVKTERELPPFIYGRDFKCQNFHYKENQYFHVHGGIEFDISTPSIENALEDFQV

SEQ ID NO: 3787 - DNA, 465 bp, Homo sapiens
ttcaatacctgttttctatcggtgctaactggagaaaaacagatattaaaggaaataatataatccatttatcagtgttaacctttcatacagaggttctcaaatatataataaaattaaatattcctgaactcccagtgtggaaaactttggtaggcatttcaaatagatgttaaggaacaaggagctgttgcactttgggccttggcaggacaaacactaaaacaacaaaaatatatggcagaacaaattggatacagctttataataaatatgcttttgtcaccatcagctaaaatgcagtatgttggatatttgcttaagagcaggctatgcattaacactttttgccttcaataatcgctttcaacaatacttaatattggaaagtggaataatgaccatatctatttttgaacgttttcttgaatcaacagttgaaactgagaaggcaatggcagcatt

SEQ ID NO: 3788 - protein, 52 aa, Homo sapiens
MLDICLRAGYALTLFAFNNRFQQYLILESGIMTISIFERFLESTVETEKAMA

SEQ ID NO: 3789 - DNA, 1764 bp, Homo sapiens
tgctttggtagaagcgggaggcattccatctctaatcaacctactggtttgtgatgagcctgaagtacactctcgctgtgctgtcattctatatgatattgctcaatgtgaaaacaaggatgttattgccaaatataatggaatcccaagcctgataaatctattgaacttaaacatagaaaatgtgctagtaaatgtaatgaactgtatacgggtattgtgtataggaaatgaaaacaatcaaagagctgtgagagaacataaaggcctcccatatcttatcagatttctgagttctgattcagatgtgttgaaggctgtatcttctgctgcaattgctgaggttgggcgtgacaataaggaaattcaggatgctatagctatggagggagcgattcctcctctggtggctctttttaaagggaaacaaattagtgtccaaatgaaaggtgcaatggctgtggaatcactggcaagtcacaacgctcttatacagaaagcatttctggaaaaatcgttaactaaatatcttttaaaactcctaaaggcatttcaaatagatgttaaggaacaaggagctgttgcactttgggccttggcaggacaaacactaaaacaacaaaaatatatggcagaacaaattggatacagctttataataaatatgcttttgtcaccatcagctaaaatgcagtatgttggaggtgaagctgtcatagctctaagtaaggacagcaggatgcatcaaaatcaaatatgtgaagggaatggaattgcaccattggttcgcttactaagaattagtacgattgctgaaggcacacttctcagtgtcatcagagcagtgggatccatttgtattggatatttgcttaagagcaggctatgcattaacactttttgccttcaataatcgctttcaacaatacttaatattggaaagtggaataatgaccatatctatttttgaacgttttcttgaatcaacagttgaaactgagaaggcaatggcagcatttcagattgttgtactggctaaagtcattagagatatggaccatattactttgtctgcaagaggtgttactattttagttgatagtctgtattcagttcagacttctactattgtcttgacagggaatttaatagcaagcctggctcattctagagctggtatcccagaagcatttaccacattaggaacaatccaacggctctgctatcatttgtactcgggaatagaagaggttcgtgcagcttgttcctctgctcttggctacttaacatacaatgcaaatgctttccgcatcctattaaaagaatgcaggaataaacctaatcagttcattcgtataaaaaataatatcagcagagatgcaagtattaacccagcatttttaaaggaatttcaaatgcaacaaacactggtgggacttccttccttaagtctggagaagaatggaggaccatccataattcctatctttaaaagagggaaggagcaccgaagaaaattaaaacctaaaattcaaccaaaagattctttgactttattacctcctgtaactaacttcatgggactcttcaaagcaacaaaaaagaccaaggattcccataatattttttctttttcatctacaattacatcagatatcacaaatgtatcaagaccaagaatagtgtgtttgaaccaacttgggaaacatgtccagaaagccaacccagagcctgcagaaggctaataaaacattttagaatgaa

SEQ ID NO: 3790 - protein, 264 aa, Homo sapiens
MTISIFERFLESTVETEKAMAAFQIVVLAKVIRDMDHITLSARGVTILVDSLYSVQTSTIVLTGNLIASLAHSRAGIPEAFTTLGTIQRLCYHLYSGIEEVRAACSSALGYLTYNANAFRILLKECRNKPNQFIRIKNNISRDASINPAFLKEFQMQQTLVGLPSLSLEKNGGPSIIPIFKRGKEHRRKLKPKIQPKDSLTLLPPVTNFMGLFKATKKTKDSHNIFSFSSTITSDITNVSRPRIVCLNQLGKHVQKANPEPAEG

SEQ ID NO: 3791 - DNA, 1353 bp, Homo sapiens
gaaaggtgcaatggctgtggaatcactggcaagtcacaacgctcttatacagaaagcatttctggaaaaatcgttaactaaatatcttttaaaactcctaaaggcatttcaaatagatgttaaggaacaaggagctgttgcactttgggccttggcaggacaaacactaaaacaacaaaaatatatggcagaacaaattggatacagctttataataaatatgcttttgtcaccatcagctaaaatgcagtatgttggaggtgaagctgtcatagctctaagtaaggacagcaggatgcatcaaaatcaaatatgtgaagggaatggaattgcaccattggttcgcttactaagaattagtacgattgctgaaggcacacttctcagtgtcatcagagcagtgggatccatttgtattggtgtagcccatacaagcaatcctgtcagtcaacaattggttgtagatgaaaatgcctttccagtacttatccaactactaagaaatcacccttctcctaacattaaggttgaagtggcattttccttggcatgcattgtcctagggaatgatgtgttacagaaagacttacatgaaaatgaaggatttgaatatgctgatgtcctttatcttcttcactcaacagaaaaggatatttgcttaagagcaggctatgcattaacactttttgccttcaataatcgctttcaacaatacttaatattggaaagtggaataatgaccatatctatttttgaacgttttcttgaatcaacagttgaaactgagaaggcaatggcagcatttcagattgttgtactggctaaagtcattagagatatggaccatattactttgtctgcaagaggtgttactattttagttgatagtctgtattcagttcagacttctactattgtcttgacagggaatttaatagcaagcctggctcattctagagctggtatcccagaagcatttaccacattaggaacaatccaacggctctgctatcatttgtactcgggaatagaagagtctggagaagaatggaggaccatccataattcctatctttaaaagagggaaggagcaccgaagaaaattaaaacctaaaattcaaccaaaagattctttgactttattacctcctgtaactaacttcatgggactcttcaaagcaacaaaaaagaccaaggattcccataatattttttctttttcatctacaattacatcagatatcacaaatgtatcaagaccaagaatagtgtgtttgaaccaacttgggaaacatgtccagaaagccaacccagagcctgcagaaggctaataaaacattttagaatgaaagg

SEQ ID NO: 3792 - protein, 355 aa, Homo sapiens
MAVESLASHNALIQKAFLEKSLTKYLLKLLKAFQIDVKEQGAVALWALAGQTLKQQKYMAEQIGYSFIINMLLSPSAKMQYVGGEAVIALSKDSRMHQNQICEGNGIAPLVRLLRISTIAEGTLLSVIRAVGSICIGVAHTSNPVSQQLVVDENAFPVLIQLLRNHPSPNIKVEVAFSLACIVLGNDVLQKDLHENEGFEYADVLYLLHSTEKDICLRAGYALTLFAFNNRFQQYLILESGIMTISIFERFLESTVETEKAMAAFQIVVLAKVIRDMDHITLSARGVTILVDSLYSVQTSTIVLTGNLIASLAHSRAGIPEAFTTLGTIQRLCYHLYSGIEESGEEWRTIHNSYL

SEQ ID NO: 3793 - DNA, 657 bp, Homo sapiens
agaacaaattggatacagctttataataaatatgcttttgtcaccatcagctaaaatgcagtatgttggaggtgaagctgtcatagctctaagtaaggacagcaggatgcatcaaaatcaaatatgtgaagggaatggaattgcaccattggttcgcttactaagaattagtacgattgctgaaggcacacttctcagtgtcatcagagcagtgggatccatttgtattgggaatttaatagcaagcctggctcattctagagctggtatcccagaagcatttaccacattaggaacaatccaacggctctgctatcatttgtactcgggaatagaagagtctggagaagaatggaggaccatccataattcctatctttaaaagagggaaggagcaccgaagaaaattaaaacctaaaattcaaccaaaagattctttgactttattacctcctgtaactaacttcatgggactcttcaaagcaacaaaaaagaccaaggattcccataatattttttctttttcatctacaattacatcagatatcacaaatgtatcaagaccaagaatagtgtgtttgaaccaacttgggaaacatgtccagaaagccaacccagagcctgcagaaggctaataaaacattttagaatgaaagg

SEQ ID NO: 3794 - protein, 116 aa, Homo sapiens
MLLSPSAKMQYVGGEAVIALSKDSRMHQNQICEGNGIAPLVRLLRISTIAEGTLLSVIRAVGSICIGNLIASLAHSRAGIPEAFTTLGTIQRLCYHLYSGIEESGEEWRTIHNSYL

SEQ ID NO: 3795 - DNA, 1167 bp, Homo sapiens
tttcagattgttgtactggctaaagtcattagagatatggaccatattactttgtctgcaagaggtgttactattttagttgatagtctgtattcagttcagacttctactattgtcttgacagggaatttaatagcaagcctggctcattctagagctggtatcccagaagcatttaccacattaggaacaatccaacggctctgctatcatttgtactcgggaatagaagagtctggagaagaatggaggaccatccataattcctatctttaaaagagagctctgcggatatagaagttacttgcgacaccaccagatgcaacctgaaggaattgagaaaaccaaaataactatcatatatggatatgaaccaagctgctaattaaacctggagaaaaatatcagcattaaacaataataaactatcccattttgagatgggtaatgggcagatgacatatctatgtaataaaaatttggaaagaaaaaaattactaataattctaatagcatacaaacattactagcatttttgtatattttcttccaacctttcatctaaatatttatttaatataatttcaatcatagtacactattttagaccctgaaatttttattattttgtgcattttactacataactctgaaaaaattattctttgatatccatgtaaaattccatctatgaattactaccatttaaacattttcccactttagtttataatttttaaatgaataaagtttaagatacagttaaacaggatgtttgtcaaggcttttaagcacaattaaagggattttggctggtacaatatagtggattatcagaactttatcaacattagtgtcacgaaagttggtataccacctcccactgctaaatttgactggcttattaaaaaaacaaacaaacaaagggatttcatcaaaggatgaaggaaatccacctatttttctaaaaatagtgatagcagttactgcatttactttctttattgtaagccctcttttaaatccaacaagaagatgcaaaattagacttatgtgccatagaagctatacagctgtcccataaagctaccaaactagtacaagaaatggctgttagtctttcctatcctgcataatttcatactgtcagggctagcataaggcata

SEQ ID NO: 3796 - protein, 79 aa, Homo sapiens
MDHITLSARGVTILVDSLYSVQTSTIVLTGNLIASLAHSRAGIPEAFTTLGTIQRLCYHLYSGIEESGEEWRTIHNSYL

SEQ ID NO: 3797 - DNA, 374 bp, Homo sapiens
tccaacggctctgctatcatttgtactcgggaatagaagagtctggagaagaatggaggaccatccataattcctatctttaaaagagttttcctaggacttcagctgagaccatgaaacatagaagtggagaaaagaaggaatgcattactgaaggaaaatcaataaatacggaagctgggaatgagctcagtttcttttggcaacaggattagttaaggttgggaccttattgtgaagacccttaaaagccaggatgaagtgtttgaggttttctatagcagttattaaaagtgtttgcaaaaaggaataagacagtagctcctgaaaacttttatatatgacaaatacaaaagaatgattttactttttcc

SEQ ID NO: 3798 - protein, 33 aa, Homo sapiens
MKHRSGEKKECITEGKSINTEAGNELSFFWQQD

SEQ ID NO: 3799 - DNA, 2070 bp, Homo sapiens
aaaggagacaagtgctagctactgccgcccaagtggaaggtgggtgaaattgctcactcttcaccccactgacgcttttgcgcacctggaaaagcggttccagtttgcgcccgtcgccgccttacagccgacaggagaccagcgctacccaagtcacgtgggttcagcctgcagctttcttggcccgaaagggaattatctatagagtaagtatgctaatcttgactaagactgcaggagttttttttaaaccatcaaaaaggaaagtttatgaatttttaagaagttttaattttcatcctggaacactatttcttcataaaatagtattgggaattgaaactagttgtgatgatacagcagctgctgtggtggatgaaactggaaatgtgttgggagaagcaatacattcccaaactgaagttcatttaaaaacaggtgggattgttcctccagcagctcaacagcttcacagagaaaatattcaacgaatagtacaagaagctctttctgccagtggagtctctccaagtgacctctcagcaattgcaactaccataaaaccaggacttgctttaagcctgggagtgggcttatcatttagcttacagctggtaggacagttaaaaaagccattcattcccattcatcatatggaggctcatgcacttactattaggttgaccaataaagtagaatttccttttttagttcttttgatttctggaggtcactgtctgttggcattagttcaaggagtttcagattttctgcttcttggaaagtctttggacatagcaccaggtgacatgcttgacaaggtggcaagaagactttctttaataaaacatccagagtgctccaccatgagtggtgggaaagccatagaacatttggccaaacaaggaaatagatttcattttgacatcaaacctcccttgcatcatgctaaaaattgtgatttttcttttactggacttcaacacgttactgataaaataataatgaaaaaggaaaaagaggaaggtatatttctaattagtaaagttgaacagataaatattcctggattgtgcctaaaaatagctgctcatttctgcaggtattgagaaggggcaaatcctgtcttcagcagcagacattgctgccacagtacagcacacaatggcatgtcatcttgtgaaaagaacacatcgggctattctgttttgtaagcagagagacttgttacctcaaaataatgcagtactggttgcatctggtggtgtcgcaagtaacttctatatccgcagagctctggaaattttaacaaatgcaacacagtgcactttgttgtgtcctcctcccagactatgcactgataatggcattatgattgcatggaatggtattgaaagactacgtgctggcttgggcattttacatgacatagaaggcatccgctatgaaccaaaatgtcctcttggagtagacatatcaaaagaagttggagaagcttccataaaagtaccacaattaaaaatggagatatgatttctgctgttcaaaaaagtccctaaagagacaggctcttgccatgttgcccgggctggtcctgaactgctgaattcaagtgatcctcccaccttggcctccagaagtgctgggattatgggtgtgagccaccatgcctagccaaaatgtttcttaaggtatacattttgggtcttagaagacttatacatttgtaatatttattactaaatatctcaaagtattacaataaatgttaccatgtgagctactttgaatcaggcttcttgcacaccaatttaaaaatgttaactcttgatatatacactagttataccactcatgtcagtcaataaattttaaggtttaagtgcaggcctttgtttacagaaatcctaattttttgaaaccataactctgacctgacactaaattcctgtagacatgctaaggaaaatctgcttagtatcgagatcaagaactttcattcaaaaagattattcagttatgttatttgcatattaccattattaaaaataaaaaaatttttaaaagatg

SEQ ID NO: 3800 - protein, 298 aa, Homo sapiens
MLILTKTAGVFFKPSKRKVYEFLRSFNFHPGTLFLHKIVLGIETSCDDTAAAVVDETGNVLGEAIHSQTEVHLKTGGIVPPAAQQLHRENIQRIVQEALSASGVSPSDLSAIATTIKPGLALSLGVGLSFSLQLVGQLKKPFIPIHHMEAHALTIRLTNKVEFPFLVLLISGGHCLLALVQGVSDFLLLGKSLDIAPGDMLDKVARRLSLIKHPECSTMSGGKAIEHLAKQGNRFHFDIKPPLHHAKNCDFSFTGLQHVTDKIIMKKEKEEGIFLISKVEQINIPGLCLKIAAHFCRY

SEQ ID NO: 3801 - DNA, 2233 bp, Homo sapiens
aaaggagacaagtgctagctactgccgcccaagtggaaggtgggtgaaattgctcactcttcaccccactgacgcttttgcgcacctggaaaagcggttccagtttgcgcccgtcgccgccttacagccgacaggagaccagcgctacccaagtcacgtgggttcagcctgcagctttcttggcccgaaagggaattatctatagagtaagtatgctaatcttgactaagactgcaggagttttttttaaaccatcaaaaaggaaagtttatgaatttttaagaagttttaattttcatcctggaacactatttcttcataaaatagtattgggaattgaaactagttgtgatgatacagcagctgctgtggtggatgaaactggaaatgtgttgggagaagcaatacattcccaaactgaagttcatttaaaaacaggtgggattgttcctccagcagctcaacagcttcacagagaaaatattcaacgaatagtacaagaagctctttctgccagtggagtctctccaagtgacctctcagcaattgcaactaccataaaaccaggacttgctttaagcctgggagtgggcttatcatttagcttacagctggtaggacagttaaaaaagccattcattcccattcatcatatggaggctcatgcacttactattaggttgaccaataaagtagaatttccttttttagttcttttgatttctggaggtcactgtctgttggcattagttcaaggagtttcagattttctgcttcttggaaagtctttggacatagcaccaggtgacatgcttgacaaggtggcaagaagactttctttaataaaacatccagagtgctccaccatgagtggtgggaaagccatagaacatttggccaaacaaggaaatagatttcattttgacatcaaacctcccttgcatcatgctaaaaattgtgatttttcttttactggacttcaacacgttactgataaaataataatgaaaaaggaaaaagaggaaggtatatttctaattagtaaagttgaacagataaatattcctggattgtgcctaaaaatagctgctcatttctgcaggtattgagaaggggcaaatcctgtcttcagcagcagacattgctgccacagtacagcacacaatggcatgtcatcttgtgaaaagaacacatcgggctattctgttttgtaagcagagagacttgttacctcaaaataatgcagtactggttgcatctggtggtgtcgcaagtaacttctatatccgcagagctctggaaattttaacaaatgcaacacagtgcactttgttgtgtcctcctcccagactatgcactgataatggcattatgattgcatggaatggtattgaaagactacgtgctggcttgggcattttacatgacatagaaggcatccgctatgaaccaaaatgtcctcttggagtagacatatcaaaagaagttggagaagcttccataaaagtaccacaattaaaaatggagatatgatttctgctgttcaaaaaagtccctaaagggtctcactctctgacctcagctggagtacagtagccagatcacaactcactgcaaccctgacttcctgaactcaagcaatcctcctgccttagcctcttgaatagccgggactacaggtgtgcatgtccatgcccagccaactttatttctattttttgtagagacaggctcttgccatgttgcccgggctggtcctgaactgctgaattcaagtgatcctcccaccttggcctccagaagtgctgggattatgggtgtgagccaccatgcctagccaaaatgtttcttaaggtatacattttgggtcttagaagacttatacatttgtaatatttattactaaatatctcaaagtattacaataaatgttaccatgtgagctactttgaatcaggcttcttgcacaccaatttaaaaatgttaactcttgatatatacactagttataccactcatgtcagtcaataaattttaaggtttaagtgcaggcctttgtttacagaaatcctaattttttgaaaccataactctgacctgacactaaattcctgtagacatgctaaggaaaatctgcttagtatcgagatcaagaactttcattcaaaaagattattcagttatgttatttgcatattaccattattaaaaataaaaaaatttttaaaagatg

SEQ ID NO: 3802 - protein, 298 aa, Homo sapiens; identical to SEQ ID NO: 3800

SEQ ID NO: 3803 - DNA, 2221 bp, Homo sapiens
gcagtcgacagtctttagtagggaaaggagacaagtgctagctactgccgcccaagtggaaggtgggtgaaattgctcactcttcaccccactgacgcttttgcgcacctggaaaagcggttccagtttgcgcccgtcgccgccttacagccgacaggagaccagcgctacccaagtcacgaattatctatagagtaagtatgctaatcttgactaagactgcaggagttttttttaaaccatcaaaaaggaaagtttatgaatttttaagaagttttaattttcatcctggaacactatttcttcataaaatagtattgggaattgaaactagttgtgatgatacagcagctgctgtggtggatgaaactggaaatgtgttgggagaagcaatacattcccaaactgaagttcatttaaaaacaggtgggattgttcctccagcagctcaacagcttcacagagaaaatattcaacgaatagtacaagaagctctttctgccagtggagtctctccaagtgacctctcagcaattgcaactaccataaaaccaggacttgctttaagcctgggagtgggcttatcatttagcttacagctggtaggacagttaaaaaagccattcattcccattcatcatatggaggctcatgcacttactattaggttgaccaataaagtagaatttccttttttagttcttttgatttctggaggtcactgtctgttggcattagttcaaggagtttcagattttctgcttcttggaaagtctttggacatagcaccaggtgacatgcttgacaaggtggcaagaagactttctttaataaaacatccagagtgctccaccatgagtggtgggaaagccatagaacatttggccaaacaaggaaatagatttcattttgacatcaaacctcccttgcatcatgctaaaaattgtgatttttcttttactggacttcaacacgttactgataaaataataatgaaaaaggaaaaagaggaaggtatatttctaattagtaaagttgaacagataaatattcctggattgtgcctaaaaatagctgctcatttctgcaggtattgagaaggggcaaatcctgtcttcagcagcagacattgctgccacagtacagcacacaatggcatgtcatcttgtgaaaagaacacatcgggctattctgttttgtaagcagagagacttgttacctcaaaataatgcagtactggttgcatctggtggtgtcgcaagtaacttctatatccgcagagctctggaaattttaacaaatgcaacacagtgcactttgttgtgtcctcctcccagactatgcactgataatggcattatgattgcatggaatggtattgaaagactacgtgctggcttgggcattttacatgacatagaaggcatccgctatgaaccaaaatgtcctcttggagtagacatatcaaaagaagttggagaagcttccataaaagtaccacaattaaaaatggagatatgatttctgctgttcaaaaaagtccctaaagggtctcactctctgacctcagctggagtacagtagccagatcacaactcactgcaaccctgacttcctgaactcaagcaatcctcctgccttagcctcttgaatagccgggactacaggtgtgcatgtccatgcccagccaactttatttctattttttgtagagacaggctcttgccatgttgcccgggctggtcctgaactgctgaattcaagtgatcctcccaccttggcctccagaagtgctgggattatgggtgtgagccaccatgcctagccaaaatgtttcttaaggtatacattttgggtcttagaagacttatacatttgtaatatttattactaaatatctcaaagtattacaataaatgttaccatgtgagctactttgaatcaggcttcttgcacaccaatttaaaaatgttaactcttgatatatacactagttataccactcatgtcagtcaataaattttaaggtttaagtgcaggcctttgtttacagaaatcctaattttttgaaaccataactctgacctgacactaaattcctgtagacatgctaaggaaaatctgcttagtatcgagatcaagaactttcattcaaaaagattattcagttatgttatttgcatattaccattattaaaaataaaaaaatttttaaaagatg

SEQ ID NO: 3804 - protein, 298 aa, Homo sapiens; identical to SEQ ID NO: 3800

SEQ ID NO: 3805 - DNA, 2058 bp, Homo sapiens
gcagtcgacagtctttagtagggaaaggagacaagtgctagctactgccgcccaagtggaaggtgggtgaaattgctcactcttcaccccactgacgcttttgcgcacctggaaaagcggttccagtttgcgcccgtcgccgccttacagccgacaggagaccagcgctacccaagtcacgaattatctatagagtaagtatgctaatcttgactaagactgcaggagttttttttaaaccatcaaaaaggaaagtttatgaatttttaagaagttttaattttcatcctggaacactatttcttcataaaatagtattgggaattgaaactagttgtgatgatacagcagctgctgtggtggatgaaactggaaatgtgttgggagaagcaatacattcccaaactgaagttcatttaaaaacaggtgggattgttcctccagcagctcaacagcttcacagagaaaatattcaacgaatagtacaagaagctctttctgccagtggagtctctccaagtgacctctcagcaattgcaactaccataaaaccaggacttgctttaagcctgggagtgggcttatcatttagcttacagctggtaggacagttaaaaaagccattcattcccattcatcatatggaggctcatgcacttactattaggttgaccaataaagtagaatttccttttttagttcttttgatttctggaggtcactgtctgttggcattagttcaaggagtttcagattttctgcttcttggaaagtctttggacatagcaccaggtgacatgcttgacaaggtggcaagaagactttctttaataaaacatccagagtgctccaccatgagtggtgggaaagccatagaacatttggccaaacaaggaaatagatttcattttgacatcaaacctcccttgcatcatgctaaaaattgtgatttttcttttactggacttcaacacgttactgataaaataataatgaaaaaggaaaaagaggaaggtatatttctaattagtaaagttgaacagataaatattcctggattgtgcctaaaaatagctgctcatttctgcaggtattgagaaggggcaaatcctgtcttcagcagcagacattgctgccacagtacagcacacaatggcatgtcatcttgtgaaaagaacacatcgggctattctgttttgtaagcagagagacttgttacctcaaaataatgcagtactggttgcatctggtggtgtcgcaagtaacttctatatccgcagagctctggaaattttaacaaatgcaacacagtgcactttgttgtgtcctcctcccagactatgcactgataatggcattatgattgcatggaatggtattgaaagactacgtgctggcttgggcattttacatgacatagaaggcatccgctatgaaccaaaatgtcctcttggagtagacatatcaaaagaagttggagaagcttccataaaagtaccacaattaaaaatggagatatgatttctgctgttcaaaaaagtccctaaagagacaggctcttgccatgttgcccgggctggtcctgaactgctgaattcaagtgatcctcccaccttggcctccagaagtgctgggattatgggtgtgagccaccatgcctagccaaaatgtttcttaaggtatacattttgggtcttagaagacttatacatttgtaatatttattactaaatatctcaaagtattacaataaatgttaccatgtgagctactttgaatcaggcttcttgcacaccaatttaaaaatgttaactcttgatatatacactagttataccactcatgtcagtcaataaattttaaggtttaagtgcaggcctttgtttacagaaatcctaattttttgaaaccataactctgacctgacactaaattcctgtagacatgctaaggaaaatctgcttagtatcgagatcaagaactttcattcaaaaagattattcagttatgttatttgcatattaccattattaaaaataaaaaaatttttaaaagatg

SEQ ID NO: 3806 - protein, 298 aa, Homo sapiens; identical to SEQ ID NO: 3800

SEQ ID NO: 3807 - DNA, 1970 bp, Homo sapiens
aggttcgggctttctcctgcagcgataagggcagtcgacagtctttagtagggaaaggagacaagtgctagctactgccgcccaagtggaaggaattatctatagagtaagtatgctaatcttgactaagactgcaggagttttttttaaaccatcaaaaaggaaagtttatgaatttttaagaagttttaattttcatcctggaacactatttcttcataaaatagtattgggaattgaaactagttgtgatgatacagcagctgctgtggtggatgaaactggaaatgtgttgggagaagcaatacattcccaaactgaagttcatttaaaaacaggtgggattgttcctccagcagctcaacagcttcacagagaaaatattcaacgaatagtacaagaagctctttctgccagtggagtctctccaagtgacctctcagcaattgcaactaccataaaaccaggacttgctttaagcctgggagtgggcttatcatttagcttacagctggtaggacagttaaaaaagccattcattcccattcatcatatggaggctcatgcacttactattaggttgaccaataaagtagaatttccttttttagttcttttgatttctggaggtcactgtctgttggcattagttcaaggagtttcagattttctgcttcttggaaagtctttggacatagcaccaggtgacatgcttgacaaggtggcaagaagactttctttaataaaacatccagagtgctccaccatgagtggtgggaaagccatagaacatttggccaaacaaggaaatagatttcattttgacatcaaacctcccttgcatcatgctaaaaattgtgatttttcttttactggacttcaacacgttactgataaaataataatgaaaaaggaaaaagaggaaggtatatttctaattagtaaagttgaacagataaatattcctggattgtgcctaaaaatagctgctcatttctgcaggtattgagaaggggcaaatcctgtcttcagcagcagacattgctgccacagtacagcacacaatggcatgtcatcttgtgaaaagaacacatcgggctattctgttttgtaagcagagagacttgttacctcaaaataatgcagtactggttgcatctggtggtgtcgcaagtaacttctatatccgcagagctctggaaattttaacaaatgcaacacagtgcactttgttgtgtcctcctcccagactatgcactgataatggcattatgattgcatggaatggtattgaaagactacgtgctggcttgggcattttacatgacatagaaggcatccgctatgaaccaaaatgtcctcttggagtagacatatcaaaagaagttggagaagcttccataaaagtaccacaattaaaaatggagatatgatttctgctgttcaaaaaagtccctaaagagacaggctcttgccatgttgcccgggctggtcctgaactgctgaattcaagtgatcctcccaccttggcctccagaagtgctgggattatgggtgtgagccaccatgcctagccaaaatgtttcttaaggtatacattttgggtcttagaagacttatacatttgtaatatttattactaaatatctcaaagtattacaataaatgttaccatgtgagctactttgaatcaggcttcttgcacaccaatttaaaaatgttaactcttgatatatacactagttataccactcatgtcagtcaataaattttaaggtttaagtgcaggcctttgtttacagaaatcctaattttttgaaaccataactctgacctgacactaaattcctgtagacatgctaaggaaaatctgcttagtatcgagatcaagaactttcattcaaaaagattattcagttatgttatttgcatattaccattattaaaaataaaaaaatttttaaaagatg

SEQ ID NO: 3808 - protein, 298 aa, Homo sapiens; identical to SEQ ID NO: 3800

SEQ ID NO: 3809 - DNA, 2133 bp, Homo sapiens
aggttcgggctttctcctgcagcgataagggcagtcgacagtctttagtagggaaaggagacaagtgctagctactgccgcccaagtggaaggaattatctatagagtaagtatgctaatcttgactaagactgcaggagttttttttaaaccatcaaaaaggaaagtttatgaatttttaagaagttttaattttcatcctggaacactatttcttcataaaatagtattgggaattgaaactagttgtgatgatacagcagctgctgtggtggatgaaactggaaatgtgttgggagaagcaatacattcccaaactgaagttcatttaaaaacaggtgggattgttcctccagcagctcaacagcttcacagagaaaatattcaacgaatagtacaagaagctctttctgccagtggagtctctccaagtgacctctcagcaattgcaactaccataaaaccaggacttgctttaagcctgggagtgggcttatcatttagcttacagctggtaggacagttaaaaaagccattcattcccattcatcatatggaggctcatgcacttactattaggttgaccaataaagtagaatttccttttttagttcttttgatttctggaggtcactgtctgttggcattagttcaaggagtttcagattttctgcttcttggaaagtctttggacatagcaccaggtgacatgcttgacaaggtggcaagaagactttctttaataaaacatccagagtgctccaccatgagtggtgggaaagccatagaacatttggccaaacaaggaaatagatttcattttgacatcaaacctcccttgcatcatgctaaaaattgtgatttttcttttactggacttcaacacgttactgataaaataataatgaaaaaggaaaaagaggaaggtatatttctaattagtaaagttgaacagataaatattcctggattgtgcctaaaaatagctgctcatttctgcaggtattgagaaggggcaaatcctgtcttcagcagcagacattgctgccacagtacagcacacaatggcatgtcatcttgtgaaaagaacacatcgggctattctgttttgtaagcagagagacttgttacctcaaaataatgcagtactggttgcatctggtggtgtcgcaagtaacttctatatccgcagagctctggaaattttaacaaatgcaacacagtgcactttgttgtgtcctcctcccagactatgcactgataatggcattatgattgcatggaatggtattgaaagactacgtgctggcttgggcattttacatgacatagaaggcatccgctatgaaccaaaatgtcctcttggagtagacatatcaaaagaagttggagaagcttccataaaagtaccacaattaaaaatggagatatgatttctgctgttcaaaaaagtccctaaagggtctcactctctgacctcagctggagtacagtagccagatcacaactcactgcaaccctgacttcctgaactcaagcaatcctcctgccttagcctcttgaatagccgggactacaggtgtgcatgtccatgcccagccaactttatttctattttttgtagagacaggctcttgccatgttgcccgggctggtcctgaactgctgaattcaagtgatcctcccaccttggcctccagaagtgctgggattatgggtgtgagccaccatgcctagccaaaatgtttcttaaggtatacattttgggtcttagaagacttatacatttgtaatatttattactaaatatctcaaagtattacaataaatgttaccatgtgagctactttgaatcaggcttcttgcacaccaatttaaaaatgttaactcttgatatatacactagttataccactcatgtcagtcaataaattttaaggtttaagtgcaggcctttgtttacagaaatcctaattttttgaaaccataactctgacctgacactaaattcctgtagacatgctaaggaaaatctgcttagtatcgagatcaagaactttcattcaaaaagattattcagttatgttatttgcatattaccattattaaaaataaaaaaatttttaaaagatg

SEQ ID NO: 3810 - protein, 298 aa, Homo sapiens; identical to SEQ ID NO: 3800

SEQ ID NO: 3811 - DNA, 1903 bp, Homo sapiens
ccgggcgccaggttcgggctttctcctgcagcgataagggcagtcgacagtctttagtagggaaaggagacaagtgctagctactgccgcccaagtggaaggaattatctatagagtaagtatgctaatcttgactaagactgcaggagttttttttaaaccatcaaaaaggaaagtttatgaatttttaagaagttttaattttcatcctggaacactatttcttcataaaatagtattgggaattgaaactagttgtgatgatacagcagctgctgtggtggatgaaactggaaatgtgttgggagaagcaatacattcccaaactgaagttcatttaaaaacaggtgggattgttcctccagcagctcaacagcttcacagagaaaatattcaacgaatagtacaagaagctctttctgccagtggagtctctccaagtgacctctcagcaattgcaactaccataaaaccaggacttgctttaagcctgggagtgggcttatcatttagcttacagctggtaggacagttaaaaaagccattcattcccattcatcatatggaggctcatgcacttactattaggttgaccaataaagtagaatttccttttttagttcttttgatttctggaggtcactgtctgttggcattagttcaaggagtttcagattttctgcttcttggaaagtctttggacatagcaccaggtgacatgcttgacaaggtggcaagaagactttctttaataaaacatccagagtgctccaccatgagtggtgggaaagccatagaacatttggccaaacaaggaaatagatttcattttgacatcaaacctcccttgcatcatgctaaaaattgtgatttttcttttactggacttcaacacgttactgataaaataataatgaaaaaggaaaaagaggaaggtattgagaaggggcaaatcctgtcttcagcagcagacattgctgccacagtacagcacacaatggcatgtcatcttgtgaaaagaacacatcgggctattctgttttgtaagcagagagacttgttacctcaaaataatgcagtactggttgcatctggtggtgtcgcaagtaacttctatatccgcagagctctggaaattttaacaaatgcaacacagtgcactttgttgtgtcctcctcccagactatgcactgataatggcattatgattgcatggaatggtattgaaagactacgtgctggcttgggcattttacatgacatagaaggcatccgctatgaaccaaaatgtcctcttggagtagacatatcaaaagaagttggagaagcttccataaaagtaccacaattaaaaatggagatatgatttctgctgttcaaaaaagtccctaaagagacaggctcttgccatgttgcccgggctggtcctgaactgctgaattcaagtgatcctcccaccttggcctccagaagtgctgggattatgggtgtgagccaccatgcctagccaaaatgtttcttaaggtatacattttgggtcttagaagacttatacatttgtaatatttattactaaatatctcaaagtattacaataaatgttaccatgtgagctactttgaatcaggcttcttgcacaccaatttaaaaatgttaactcttgatatatacactagttataccactcatgtcagtcaataaattttaaggtttaagtgcaggcctttgtttacagaaatcctaattttttgaaaccataactctgacctgacactaaattcctgtagacatgctaaggaaaatctgcttagtatcgagatcaagaactttcattcaaaaagattattcagttatgttatttgcatattaccattattaaaaataaaaaaatttttaaaagatg

SEQ ID NO: 3812 - protein, 414 aa, Homo sapiens; identical to SEQ ID NO: 344

SEQ ID NO: 3813 - DNA, 2216 bp, Homo sapiens
ctttggtaaccctgctagggggcgccgctagattccatcctatttctccgatgaaagtatcagaactctcatcacctgcaaatctgggggaaatgcaggtgcgcacagagagcgttttgggcaaagacggcctttaagcttttcttcactaagcatgccgctcgctagcggaacagcagccagctctggacgggaccttgcacagttccgatgacatcacttccgggcgccaggttcgggctttctcctgcagcgataagggcagtcgacagtctttagtagggaaaggagacaagtgctagctactgccgcccaagtggaaggaattatctatagagtaagtatgctaatcttgactaagactgcaggagttttttttaaaccatcaaaaaggaaagtttatgaatttttaagaagttttaattttcatcctggaacactatttcttcataaaatagtattgggaattgaaactagttgtgatgatacagcagctgctgtggtggatgaaactggaaatgtgttgggagaagcaatacattcccaaactgaagttcatttaaaaacaggtgggattgttcctccagcagctcaacagcttcacagagaaaatattcaacgaatagtacaagaagctctttctgccagtggagtctctccaagtgacctctcagcaattgcaactaccataaaaccaggacttgctttaagcctgggagtgggcttatcatttagcttacagctggtaggacagttaaaaaagccattcattcccattcatcatatggaggctcatgcacttactattaggttgaccaataaagtagaatttccttttttagttcttttgatttctggaggtcactgtctgttggcattagttcaaggagtttcagattttctgcttcttggaaagtctttggacatagcaccaggtgacatgcttgacaaggtggcaagaagactttctttaataaaacatccagagtgctccaccatgagtggtgggaaagccatagaacatttggccaaacaaggaaatagatttcattttgacatcaaacctcccttgcatcatgctaaaaattgtgatttttcttttactggacttcaacacgttactgataaaataataatgaaaaaggaaaaagaggaaggtattgagaaggggcaaatcctgtcttcagcagcagacattgctgccacagtacagcacacaatggcatgtcatcttgtgaaaagaacacatcgggctattctgttttgtaagcagagagacttgttacctcaaaataatgcagtactggttgcatctggtggtgtcgcaagtaacttctatatccgcagagctctggaaattttaacaaatgcaacacagtgcactttgttgtgtcctcctcccagactatgcactgataatggcattatgattgcatgatgtcctcttggagtagacatatcaaaagaagttggagaagcttccataaaagtaccacaattaaaaatggagatatgatttctgctgttcaaaaaagtccctaaagggtctcactctctgacctcagctggagtacagtagccagatcacaactcactgcaaccctgacttcctgaactcaagcaatcctcctgccttagcctcttgaatagccgggactacaggtgtgcatgtccatgcccagccaactttatttctattttttgtagagacaggctcttgccatgttgcccgggctggtcctgaactgctgaattcaagtgatcctcccaccttggcctccagaagtgctgggattatgggtgtgagccaccatgcctagccaaaatgtttcttaaggtatacattttgggtcttagaagacttatacatttgtaatatttattactaaatatctcaaagtattacaataaatgttaccatgtgagctactttgaatcaggcttcttgcacaccaatttaaaaatgttaactcttgatatatacactagttataccactcatgtcagtcaataaattttaaggtttaagtgcaggcctttgtttacagaaatcctaattttttgaaaccataactctgacctgacactaaattcctgtagacatgctaaggaaaatctgcttagtatcgagatcaagaactttcattcaaaaagattattcagttatgttatttgcatattaccattattaaaaataaaaaaatttttaaaagatg

SEQ ID NO: 3814 - protein, 364 aa, Homo sapiens
MLILTKTAGVFFKPSKRKVYEFLRSFNFHPGTLFLHKIVLGIETSCDDTAAAVVDETGNVLGEAIHSQTEVHLKTGGIVPPAAQQLHRENIQRIVQEALSASGVSPSDLSAIATTIKPGLALSLGVGLSFSLQLVGQLKKPFIPIHHMEAHALTIRLTNKVEFPFLVLLISGGHCLLALVQGVSDFLLLGKSLDIAPGDMLDKVARRLSLIKHPECSTMSGGKAIEHLAKQGNRFHFDIKPPLHHAKNCDFSFTGLQHVTDKIIMKKEKEEGIEKGQILSSAADIAATVQHTMACHLVKRTHRAILFCKQRDLLPQNNAVLVASGGVASNFYIRRALEILTNATQCTLLCPPPRLCTDNGIMIA

SEQ ID NO: 3815 - DNA, 2107 bp, Homo sapiens
gttctttggtaaccctgctagggggcgccgctagattccatcctatttctccgatgaaagtatcaggaattatctatagagtaagtatgctaatcttgactaagactgcaggagttttttttaaaccatcaaaaaggaaagtttatgaatttttaagaagttttaattttcatcctggaacactatttcttcataaaatagtattgggaattgaaactagttgtgatgatacagcagctgctgtggtggatgaaactggaaatgtgttgggagaagcaatacattcccaaactgaagttcatttaaaaacaggtgggattgttcctccagcagctcaacagcttcacagagaaaatattcaacgaatagtacaagaagctctttctgccagtggagtctctccaagtgacctctcagcaattgcaactaccataaaaccaggacttgctttaagcctgggagtgggcttatcatttagcttacagctggtaggacagttaaaaaagccattcattcccattcatcatatggaggctcatgcacttactattaggttgaccaataaagtagaatttccttttttagttcttttgatttctggaggtcactgtctgttggcattagttcaaggagtttcagattttctgcttcttggaaagtctttggacatagcaccaggtgacatgcttgacaaggtggcaagaagactttctttaataaaacatccagagtgctccaccatgagtggtgggaaagccatagaacatttggccaaacaaggaaatagatttcattttgacatcaaacctcccttgcatcatgctaaaaattgtgatttttcttttactggacttcaacacgttactgataaaataataatgaaaaaggaaaaagaggaaggtatatttctaattagtaaagttgaacagataaatattcctggattgtgcctaaaaatagctgctcatttctgcaggtattgagaaggggcaaatcctgtcttcagcagcagacattgctgccacagtacagcacacaatggcatgtcatcttgtgaaaagaacacatcgggctattctgttttgtaagcagagagacttgttacctcaaaataatgcagtactggttgcatctggtggtgtcgcaagtaacttctatatccgcagagctctggaaattttaacaaatgcaacacagtgcactttgttgtgtcctcctcccagactatgcactgataatggcattatgattgcatggaatggtattgaaagactacgtgctggcttgggcattttacatgacatagaaggcatccgctatgaaccaaaatgtcctcttggagtagacatatcaaaagaagttggagaagcttccataaaagtaccacaattaaaaatggagatatgatttctgctgttcaaaaaagtccctaaagggtctcactctctgacctcagctggagtacagtagccagatcacaactcactgcaaccctgacttcctgaactcaagcaatcctcctgccttagcctcttgaatagccgggactacaggtgtgcatgtccatgcccagccaactttatttctattttttgtagagacaggctcttgccatgttgcccgggctggtcctgaactgctgaattcaagtgatcctcccaccttggcctccagaagtgctgggattatgggtgtgagccaccatgcctagccaaaatgtttcttaaggtatacattttgggtcttagaagacttatacatttgtaatatttattactaaatatctcaaagtattacaataaatgttaccatgtgagctactttgaatcaggcttcttgcacaccaatttaaaaatgttaactcttgatatatacactagttataccactcatgtcagtcaataaattttaaggtttaagtgcaggcctttgtttacagaaatcctaattttttgaaaccataactctgacctgacactaaattcctgtagacatgctaaggaaaatctgcttagtatcgagatcaagaactttcattcaaaaagattattcagttatgttatttgcatattaccattattaaaaataaaaaaatttttaaaagatg

SEQ ID NO: 3816 - protein, 309 aa, Homo sapiens
MKVSGIIYRVSMLILTKTAGVFFKPSKRKVYEFLRSFNFHPGTLFLHKIVLGIETSCDDTAAAVVDETGNVLGEAIHSQTEVHLKTGGIVPPAAQQLHRENIQRIVQEALSASGVSPSDLSAIATTIKPGLALSLGVGLSFSLQLVGQLKKPFIPIHHMEAHALTIRLTNKVEFPFLVLLISGGHCLLALVQGVSDFLLLGKSLDIAPGDMLDKVARRLSLIKHPECSTMSGGKAIEHLAKQGNRFHFDIKPPLHHAKNCDFSFTGLQHVTDKIIMKKEKEEGIFLISKVEQINIPGLCLKIAAHFCRY

SEQ ID NO: 3817 - DNA, 1944 bp, Homo sapiens
gttctttggtaaccctgctagggggcgccgctagattccatcctatttctccgatgaaagtatcaggaattatctatagagtaagtatgctaatcttgactaagactgcaggagttttttttaaaccatcaaaaaggaaagtttatgaatttttaagaagttttaattttcatcctggaacactatttcttcataaaatagtattgggaattgaaactagttgtgatgatacagcagctgctgtggtggatgaaactggaaatgtgttgggagaagcaatacattcccaaactgaagttcatttaaaaacaggtgggattgttcctccagcagctcaacagcttcacagagaaaatattcaacgaatagtacaagaagctctttctgccagtggagtctctccaagtgacctctcagcaattgcaactaccataaaaccaggacttgctttaagcctgggagtgggcttatcatttagcttacagctggtaggacagttaaaaaagccattcattcccattcatcatatggaggctcatgcacttactattaggttgaccaataaagtagaatttccttttttagttcttttgatttctggaggtcactgtctgttggcattagttcaaggagtttcagattttctgcttcttggaaagtctttggacatagcaccaggtgacatgcttgacaaggtggcaagaagactttctttaataaaacatccagagtgctccaccatgagtggtgggaaagccatagaacatttggccaaacaaggaaatagatttcattttgacatcaaacctcccttgcatcatgctaaaaattgtgatttttcttttactggacttcaacacgttactgataaaataataatgaaaaaggaaaaagaggaaggtatatttctaattagtaaagttgaacagataaatattcctggattgtgcctaaaaatagctgctcatttctgcaggtattgagaaggggcaaatcctgtcttcagcagcagacattgctgccacagtacagcacacaatggcatgtcatcttgtgaaaagaacacatcgggctattctgttttgtaagcagagagacttgttacctcaaaataatgcagtactggttgcatctggtggtgtcgcaagtaacttctatatccgcagagctctggaaattttaacaaatgcaacacagtgcactttgttgtgtcctcctcccagactatgcactgataatggcattatgattgcatggaatggtattgaaagactacgtgctggcttgggcattttacatgacatagaaggcatccgctatgaaccaaaatgtcctcttggagtagacatatcaaaagaagttggagaagcttccataaaagtaccacaattaaaaatggagatatgatttctgctgttcaaaaaagtccctaaagagacaggctcttgccatgttgcccgggctggtcctgaactgctgaattcaagtgatcctcccaccttggcctccagaagtgctgggattatgggtgtgagccaccatgcctagccaaaatgtttcttaaggtatacattttgggtcttagaagacttatacatttgtaatatttattactaaatatctcaaagtattacaataaatgttaccatgtgagctactttgaatcaggcttcttgcacaccaatttaaaaatgttaactcttgatatatacactagttataccactcatgtcagtcaataaattttaaggtttaagtgcaggcctttgtttacagaaatcctaattttttgaaaccataactctgacctgacactaaattcctgtagacatgctaaggaaaatctgcttagtatcgagatcaagaactttcattcaaaaagattattcagttatgttatttgcatattaccattattaaaaataaaaaaatttttaaaagatg

SEQ ID NO: 3818 - protein, 309 aa, Homo sapiens; identical to SEQ ID NO: 3816

SEQ ID NO: 3819 - DNA, 745 bp, Homo sapiens
taaaatttatactacttctcctataaatctcccctataaagattatttttattgtgctgggattacaggcatgagccaccatgcctggccaatgctgacaagttttaaaacatcagatgaaacagtgttcaaaatataattatttatgaaaataattgtcttttactattccagaattaaaacagaatttgatagtaatttgaaaaaccagccaggtgtggtggctcacacctgtcatcccagcattttgggaggccgaggtgggtggatcacttgaggcctggagttcgagaccagcctggccaatgtggcaaaacccaaaaactaaaaatacaaaaaatgagctgggcacagctgtgtgaacctgtaattccagctactcaggaggctgaggcatgacaatcacttgaatatgggaagcagaggttgcagtgagccgagaatgcgccactgcactctagcctgggtgacactaagactctaaaaaaaaaaagaaaaaaagtaaagaaaaaactgtgctattcactggaactttgatttgggagaggaaataaggcttgcaggaaacagctatctttcggccaattctcaactgcctgtgtaagagcataatcacaacccactctcacacctgaatgctttctgcatgttttccttaaatttcccagcatacttgctggttctgagatgttcttgacattgcaaaagtccaggtcatggacatagtttacattctagttccaaa

SEQ ID NO: 3820 - protein, 43 aa, Homo sapiens
MKIIVFYYSRIKTEFDSNLKNQPGVVAHTCHPSILGGRGGWIT

SEQ ID NO: 3821 - DNA, 314 bp, Homo sapiens
agagtcttagtgtcacccaggctagagtgcagtggcgcattctcggctcactgcaacctctgcttcccatattcaagtgattgtcatgcctcagcctcctgaatcctcgaggtggaggttacagtaagccgagatcacgccactgcactccagcccgggtgacagagtgagactccatctcaaaaaaaaaaaaaaaaaacacaacttgtcagcattatattccgtaacttgacagttgtgctatatatgaattacatgtatgctgatgatgaatgaactgaattgagttagtagtaccggaaggcatccctttg

SEQ ID NO: 3822 - protein, 33 aa, Homo sapiens
RVLVSPRLECSGAFSAHCNLCFPYSSDCHASAS

SEQ ID NO: 3823 - DNA, 506 bp, Homo sapiens
agctagcacttgtctcctttccctactaaagactgtcgactgcccttatcgctgcaggagaaagcccgaacctggcgcccggaagtgatgtcatcggaactgtgcaaggtcccgtccagagctggctgctgttccgctagcgagcggcatgcttagtgaagaaaagcttaaaggccgtctttgcccaaaacgctctctgtgcgcacctgcatttcccccagatttgcaggtgatgagagttctgtaaaattacacagctagtgactgatccagcggaggccgaatacagatggagtctcactctgttgccaggctggagtgcagtggtgccatctcagctcactacaacctccacctccggggttcaagcgattctcctgcctcagccttccgagtagctgggactacaggcttgaaattggtttatcaggtctggaagtgactggactctggagtactgagttacccaccacaaactgctaataaaatgctgtgtaaaagccatt

SEQ ID NO: 3824 - protein, 50 aa, Homo sapiens
MESHSVARLECSGAISAHYNLHLRGSSDSPASAFRVAGTTGLKLVYQVWK

SEQ ID NO: 3825 - DNA, 910 bp, Homo sapiens
gcccggaagtgatgtcatcggaactgtgcaaggtcccgtccagagctggctgctgttccgctagcgagcggcatgcttagtgaagaaaagcttaaaggccgtctttgcccaaaacgctctctgtgcgcacctgcatttcccccagatttgcaggtgatgagagttctgtaaaattacacagctagtgactgatccagcggaggccgaatacagatggagtctcactctgttgccaggctggagtgcagtggtgccatctcagctcactacaacctccacctccggggttcaagcgattctcctgcctcagccttccgagtagctgggactacaggtgcctgccaccattcccagttaatttttgtatttttagtagagatgacatttcactatgttggccaggctggttttgaactcctgacctcgtgatccacctgcctcagcttcccaaagtgctgggattacaggcatgagccaccacgcctggcccaaatcctatttttcaatatttatttcctaattatgtcctactaggttaggttttattttcatttgttacatatttattgggttatttcctttatgctaggaactttattagtataaggatacagataaggtccattctctgttctcaagaatctgagtctacaggcagaagacaaaatgcagtacagaattatggaaatgtgaatggaaactgcattcagagaggggtattgcttgggaaaagccacattggcgtgccacagatgtatgccagcctggcaggcccatagtgtgattacttgagtttcaatatctgattcttttataggcttgaaattggtttatcaggtctggaagtgactggactctggagtactgagttacccaccacaaactgctaataaaatgctgtgtaaaagcc

SEQ ID NO: 3826 - protein, 71 aa, Homo sapiens [sequence omitted]

SEQ ID NO: 3827 - DNA, 3034 bp, Homo sapiens
gagcgctcgggctgtcggtctagcaggggggactcccctgaggggccgctgcgggtcgccgtcttcggaggcaccggcgagggcagagccaacagcctcttcacggtgttcttcaggacagttttattttaagcaattcttagtctcaagtaaacaccatcattaaaagaactgagaactattatcaattcttcctttggagtccatcttcaatggaaaggagaagggaaaaccttttttaaaaagaagaaagaaaactgaagtttttgatttgactagagaaatattcagaagactccttattttcacctagtttaatcacaaaattgagaaacaaacattatcccttgaccatgtaaattttacaccacattatgtcaacagcatgtaccttccacattgagtattcagaaagaagtgatctgaactctgaccattctttatggatacattaagtcaaatataagagtctgactacttgacacactggctcgagcaaacatgaacgttggagttgcccacagtgaagtgaatccaaatacccgtgtcatgaacagccggggtatgtggctgacatatgcattgggagttggcttgcttcatattgtcttactcagcattcccttcttcagtgttcctgttgcttggactttaacaaatattatacataatctggggatgtacgtatttttgcatgcagtgaaaggaacacctttcgaaactcctgaccagggtaaagcaaggctcctaactcattgggaacaactggactatggagtacagtttacatcttcacggaagtttttcacaatttctccaataattctatattttctggcaagtttctatacgaagtatgatccaactcacttcatcctaaacacagcttctctcctgagtgtactaattcccaaaatgccacaactacatggtgttcggatctttggaattaataagtattgaaatgttttgaaactgaaaaaaaattttacagctactgaatttcttataaggaaggagtggttagtaaactgcactgtttctgtgataatgtgaaatgagaagtatttacattggagggccaatggctggtccttcaagtgctgttttgaagtgcagatttccattaaatgatgcctctgtttaatacacctggtacatttctgaagaggggctttataagcaggctgggcaggcccagcttataagttaaagggcatcacagtgagggtgtagtagataaattcaaggaaataagagatttgtaagaaactaggaccagcttaacttataatgaatgggcattgtgttaagaaaagaacatttccagtcattcagctgtggttatttaaagcagacttacatgtaaaccggaatcctctctatacaagtttattaaagattatttttattaccgtacatatttctcgttttatgtaagcggatgtatatcctcttgttttatacaagccagttcccacttatgagggtacttttttggttttgctggcttaatattgtgtattggtcaatgaggccatttttacatttattacgttacagagttcatggaggttcacctttgtgactgattggtgataaaagatagccaagtgtcttacaagcagcttctgagtcaagtgttctaattttggaacaaagcaggttttactgcttttccagacacaaggctgctaaaccaattaagaaaataattaatttctttcaagcaactaaaaaatatatggtaatttaaaggtgtctgcttatttggttgaacaatttaattgggaaagtttgtcatcatttgaaaaaggaaatataaaaggaacaaccatatagccaacctgtggtctggcagaaacaacgtctctagcaatagtaccaaagtaagtaatggagtcttttttttggcaggtctgcagtaaaagataacattttcttttcttagtcctcctgctctcaacccccatattttgcctttgaatacgtgggttttagtatatatagcccaaaatggtaactgtctccagaacagcaaccacattgaattcttgtgacttaggaaagcttcttatagttgctgacattaattgcaagaaataactatatactactttgagaagtaaacatgtcaaaaaaaacaaagttcagatatgggacaaaatttaaaaattcagtaacatttataaacagaattgaatgaaaagagttacagaccaacttaaacatcaattcgtgtcagtaaactgacttttgggggtaatgatcattgttttgtatctcaaaagtattgagtttagaaatcagttgtatgatactacctttgtatgtctgtcttttcccgtgtatttttaaataactggtgatctataatttaataaaatttttcgttggtgtaatattatttcaaaagccctccaaatttagtcatcaaaattaaaatgacatttttcaagtttatttttaagcaactgaattcgtaaaattaaagtaacaaaaagcattcatttttctttattttaaagttcctctcaaaaggcttacatttttttaacatacttcagagatagaagtctccctcttagacatgctttcttcactgctttctcccgtcaatgttttaaaaatatttactcagtagatatttgaagggcccactctgtaacaggaattatgttaggtattgaggatagtttgtagacaagaaaaaccaactcccttccctttggtgcctacattccagtttaaaacaaaatctaaaaatgactattacttggaacaaaataaattgccatgccataaatgctcctgacttcaagtcaggagacataatggcaatttctaaggagtcatgagcttagaaatgccacaaattttagcattcattggtggatctttcttgcagcaattactattgtggagttctagtgatgattttctgtttcccttattctataattatttattagaatctttttataaggaagatttgtcccttctttatttacttattaaatcacttatactctgg

SEQ ID NO: 3828 - protein, 153 aa, Homo sapiens; identical to SEQ ID NO: 346

SEQ ID NO: 3829 - DNA, 3955 bp, Homo sapiens
cagcggcggcttttgctgagttttctctggcccagagcgctcgggctgtcggtctagcaggggggactcccctgaggggccgctgcgggtcgccgtcttcggaggcaccggcgagggcagagccaacagcctcttcacggtctgtaaggtcattgtttgccagtcgtgggcagcgcggcaaacctgctgggaaaaggttttctggttggaataggatgagtaccgcaccagctttgccttccagctgagatgtaaatttcaggcctccatcctgtggaacgtgggaaaactatcttgagtgttggcatgttctaagtatgacataatagtttaatgtatgataaatcatgggtgtttagacgaaagatttacacatataaattggaggctttagcggtcttagtgtaactaacttttcgtccccttaacccttgatgcctgttctatgggtctctagagcggaaggagcattatactccggaaacatttgctggaaggggttatgagaaattcctctctgtatgctaactccgtaatacaagcgtttgtgtattttaaaatcacagctgttccaaatataatctagcctcgttttccccctccgtcggatgataggtgttcttcaggacagttttattttaagcaattcttagtctcaagtaaacaccatcattaaaagaactgagaactattatcaattcttcctttggagtccatcttcaatggaaaggagaagggaaaaccttttttaaaaagaagaaagaaaactgaagtttttgatttgactagagaaatattcagaagactccttattttcacctagtttaatcacaaaattgagaaacaaacattatcccttgaccatgtaaattttacaccacattatgtcaacagcatgtaccttccacattgagtattcagaaagaagtgatctgaactctgaccattctttatggatacattaagtcaaatataagagtctgactacttgacacactggctcggtgagttctgctttttctttttaatataaatttattatgttggtaaatttagcttttggcttttcactttgctctcatgatataagaaaatgtaggttttctctttcagtttgaattttcctattcagtaaaacaacatgctagaaaacaaacttttggaaaggcattgtaactattttttcaaatagaaccataataacaagtcttgtcttaccctaaagtcaaatgctgaagattctttactgctgtcatcagcatctacaagtagcatattttggatggtgtttgtgtgctacttcaaagtaactaggaaaaaataatcctcgcaacacaggtaccttgtcatgtcagaattgggggtgttaggttgccagttgtatcagtgttgattcatttcattacttcctacagagcaaacatgaacgttggagttgcccacagtgaagtgaatccaaatacccgtgtcatgaacagccggggtatgtggctgacatatgcattgggagttggcttgcttcatattgtcttactcagcattcccttcttcagtgttcctgttgcttggactttaacaaatattatacataatctggggatgtacgtatttttgcatgcagtgaaaggaacacctttcgaaactcctgaccagggtaaagcaaggctcctaactcattgggaacaactggactatggagtacagtttacatcttcacggaagtttttcacaatttctccaataattctatattttctggcaagtttctatacgaagtatgatccaactcacttcatcctaaacacagcttctctcctgagtgtactaattcccaaaatgccacaactacatggtgttcggatctttggaattaataagtattgaaatgttttgaaactgaaaaaaaattttacagctactgaatttcttataaggaaggagtggttagtaaactgcactgtttctgtgataatgtgaaatgagaagtatttacattggagggccaatggctggtccttcaagtgctgttttgaagtgcagatttccattaaatgatgcctctgtttaatacacctggtacatttctgaagaggggctttataagcaggctgggcaggcccagcttataagttaaagggcatcacagtgagggtgtagtagataaattcaaggaaataagagatttgtaagaaactaggaccagcttaacttataatgaatgggcattgtgttaagaaaagaacatttccagtcattcagctgtggttatttaaagcagacttacatgtaaaccggaatcctctctatacaagtttattaaagattatttttattaccgtacatatttctcgttttatgtaagcggatgtatatcctcttgttttatacaagccagttcccacttatgagggtacttttttggttttgctggcttaatattgtgtattggtcaatgaggccatttttacatttattacgttacagagttcatggaggttcacctttgtgactgattggtgataaaagatagccaagtgtcttacaagcagcttctgagtcaagtgttctaattttggaacaaagcaggttttactgcttttccagacacaaggctgctaaaccaattaagaaaataattaatttctttcaagcaactaaaaaatatatggtaatttaaaggtgtctgcttatttggttgaacaatttaattgggaaagtttgtcatcatttgaaaaaggaaatataaaaggaacaaccatatagccaacctgtggtctggcagaaacaacgtctctagcaatagtaccaaagtaagtaatggagtcttttttttggcaggtctgcagtaaaagataacattttcttttcttagtcctcctgctctcaacccccatattttgcctttgaatacgtgggttttagtatatatagcccaaaatggtaactgtctccagaacagcaaccacattgaattcttgtgacttaggaaagcttcttatagttgctgacattaattgcaagaaataactatatactactttgagaagtaaacatgtcaaaaaaaacaaagttcagatatgggacaaaatttaaaaattcagtaacatttataaacagaattgaatgaaaagagttacagaccaacttaaacatcaattcgtgtcagtaaactgacttttgggggtaatgatcattgttttgtatctcaaaagtattgagtttagaaatcagttgtatgatactacctttgtatgtctgtcttttcccgtgtatttttaaataactggtgatctataatttaataaaatttttcgttggtgtaatattatttcaaaagccctccaaatttagtcatcaaaattaaaatgacatttttcaagtttatttttaagcaactgaattcgtaaaattaaagtaacaaaaagcattcatttttctttattttaaagttcctctcaaaaggcttacatttttttaacatacttcagagatagaagtctccctcttagacatgctttcttcactgctttctcccgtcaatgttttaaaaatatttactcagtagatatttgaagggcccactctgtaacaggaattatgttaggtattgaggatagtttgtagacaagaaaaaccaactcccttccctttggtgcctacattccagtttaaaacaaaatctaaaaatgactattacttggaacaaaataaattgccatgccataaatgctcctgacttcaagtcaggagacataatggcaatttctaaggagtcatgagcttagaaatgccacaaattttagcattcattggtggatctttcttgcagcaattactattgtggagttctagtgatgattttctgtttcccttattctataattatttattagaatctttttataaggaagatttgtcccttctttatttacttattaaatcacttatactctgg

SEQ ID NO: 3830 - protein, 153 aa, Homo sapiens; identical to SEQ ID NO: 346

SEQ ID NO: 3831 - DNA, 2985 bp, Homo sapiens
cctgctgcgagccggcggcccggagtggggcggcgggtaagtgggcacgaacgcggtggacgctgtacagtcgccttcgtcggtagggaactgctggcggcctaggggtcgtcctgagagggaaaagcgggctccggctgcatctgcggcgccctgcgtggccgtaagagccaagtggcctcagaggctcgccccctacgcaaatcctcgttgtcttgccagggtcctgacgtgacgtgcggccgcgagaaggaaggggcgggttgggggaggcgctgaggtggtagcagcggcggcttttgctgagttttctctggcccagagcgctcgggctgtcggtctagcaggggggactcccctgaggggccgctgcgggtcgccgtcttcggaggcaccggcgagggcagagccaacagcctcttcacggtctgtaaggtcattgtttgccagtcgtgggcagcgcggcaaacctgctgggaaaaggttttctggttggaataggatgagtaccgcaccagctttgccttccagctgagatgtaaatttcaggcctccatcctgtggaacgtgggaaaactatcttgagtgttggcatgttctaagtatgacataatagtttaatgtatgataaatcatgggtgtttagacgaaagatttacacatataaattggaggctttagcggtcttagtgtaactaacttttcgtccccttaacccttgatgcctgttctatgggtctctagagcggaaggagcattatactccggaaacatttgctggaaggggttatgagaaattcctctctgtatgctaactccgtaatacaagcgtttgtgtattttaaaatcacagctgttccaaatataatctagcctcgttttccccctccgtcggatgataggtgttcttcaggacagttttattttaagcaattcttagtctcaagtaaacaccatcattaaaagaactgagaactattatcaattcttcctttggagtccatcttcaatggaaaggagaagggaaaaccttttttaaaaagaagaaagaaaactgaagtttttgatttgactagagaaatattcagaagactccttattttcacctagtttaatcacaaaattgagaaacaaacattatcccttgaccatgtaaattttacaccacattatgtcaacagcatgtaccttccacattgagtattcagaaagaagtgatctgaactctgaccattctttatggatacattaagtcaaatataagaaaaagaacatttccagtcattcagctgtggttatttaaagcagacttacatgtaaaccggaatcctctctatacaagtttattaaagattatttttattaccgtacatatttctcgttttatgtaagcggatgtatatcctcttgttttatacaagccagttcccacttatgagggtacttttttggttttgctggcttaatattgtgtattggtcaatgaggccatttttacatttattacgttacagagttcatggaggttcacctttgtgactgattggtgataaaagatagccaagtgtcttacaagcagcttctgagtcaagtgttctaattttggaacaaagcaggttttactgcttttccagacacaaggctgctaaaccaattaagaaaataattaatttctttcaagcaactaaaaaatatatggtaatttaaaggtgtctgcttatttggttgaacaatttaattgggaaagtttgtcatcatttgaaaaaggaaatataaaaggaacaaccatatagccaacctgtggtctggcagaaacaacgtctctagcaatagtaccaaagtaagtaatggagtcttttttttggcaggtctgcagtaaaagataacattttcttttcttagtcctcctgctctcaacccccatattttgcctttgaatacgtgggttttagtatatatagcccaaaatggtaactgtctccagaacagcaaccacattgaattcttgtgacttaggaaagcttcttatagttgctgacattaattgcaagaaataactatatactactttgagaagtaaacatgtcaaaaaaaacaaagttcagatatgggacaaaatttaaaaattcagtaacatttataaacagaattgaatgaaaagagttacagaccaacttaaacatcaattcgtgtcagtaaactgacttttgggggtaatgatcattgttttgtatctcaaaagtattgagtttagaaatcagttgtatgatactacctttgtatgtctgtcttttcccgtgtatttttaaataactggtgatctataatttaataaaatttttcgttggtgtaatattatttcaaaagccctccaaatttagtcatcaaaattaaaatgacatttttcaagtttatttttaagcaactgaattcgtaaaattaaagtaacaaaaagcattcatttttctttattttaaagttcctctcaaaaggcttacatttttttaacatacttcagagatagaagtctccctcttagacatgctttcttcactgctttctcccgtcaatgttttaaaaatatttactcagtagatatttgaagggcccactctgtaacaggaattatgttaggtattgaggatagtttgtagacaagaaaaaccaactcccttccctttggtgcctacattccagtttaaaacaaaatctaaaaatgactattacttggaacaaaataaattgccatgccataaatgctcctgacttcaagtcaggagacataatggcaatttctaaggagtcatgagcttagaaatgccacaaattttagcattcattggtggatctttcttgcagcaattactattgtggagttctagtgatgattttctgtttcccttattctataattatttattagaatctttttataaggaagatttgtcccttctttatttacttattaaatcacttatactctgg

SEQ ID NO: 3832 - protein, 59 aa, Homo sapiens
MSLEMPQILAFIGGSFLQQLLLWSSSDDFLFPLFYNYLLESFYKEDLSLLYLLIKSLIL

SEQ ID NO: 3833 - DNA, 3121 bp, Homo sapiens
cgcggccgtagcagccgggctggtcctgctgcgagccggcggcccggagtggggcggcggcatgtaccttccacattgagtattcagaaagaagtgatctgaactctgaccattctttatggatacattaagtcaaatataagagtctgactacttgacacactggctcggtgagttctgctttttctttttaatataaatttattatgttggtaaatttagcttttggcttttcactttgctctcatgatataagaaaatgtaggttttctctttcagtttgaattttcctattcagtaaaacaacatgctagaaaacaaacttttggaaaggcattgtaactattttttcaaatagaaccataataacaagtcttgtcttaccctaaagtcaaatgctgaagattctttactgctgtcatcagcatctacaagtagcatattttggatggtgtttgtgtgctacttcaaagtaactaggaaaaaataatcctcgcaacacaggtaccttgtcatgtcagaattgggggtgttaggttgccagttgtatcagtgttgattcatttcattacttcctacagagcaaacatgaacgttggagttgcccacagtgaagtgaatccaaatacccgtgtcatgaacagccggggtatgtggctgacatatgcattgggagttggcttgcttcatattgtcttactcagcattcccttcttcagtgttcctgttgcttggactttaacaaatattatacataatctggggatgtacgtatttttgcatgcagtgaaaggaacacctttcgaaactcctgaccagggtaaagcaaggctcctaactcattgggaacaactggactatggagtacagtttacatcttcacggaagtttttcacaatttctccaataattctatattttctggcaagtttctatacgaagtatgatccaactcacttcatcctaaacacagcttctctcctgagtgtactaattcccaaaatgccacaactacatggtgttcggatctttggaattaataagtattgaaatgttttgaaactgaaaaaaaattttacagctactgaatttcttataaggaaggagtggttagtaaactgcactgtttctgtgataatgtgaaatgagaagtatttacattggagggccaatggctggtccttcaagtgctgttttgaagtgcagatttccattaaatgatgcctctgtttaatacacctggtacatttctgaagaggggctttataagcaggctgggcaggcccagcttataagttaaagggcatcacagtgagggtgtagtagataaattcaaggaaataagagatttgtaagaaactaggaccagcttaacttataatgaatgggcattgtgttaagaaaagaacatttccagtcattcagctgtggttatttaaagcagacttacatgtaaaccggaatcctctctatacaagtttattaaagattatttttattaccgtacatatttctcgttttatgtaagcggatgtatatcctcttgttttatacaagccagttcccacttatgagggtacttttttggttttgctggcttaatattgtgtattggtcaatgaggccatttttacatttattacgttacagagttcatggaggttcacctttgtgactgattggtgataaaagatagccaagtgtcttacaagcagcttctgagtcaagtgttctaattttggaacaaagcaggttttactgcttttccagacacaaggctgctaaaccaattaagaaaataattaatttctttcaagcaactaaaaaatatatggtaatttaaaggtgtctgcttatttggttgaacaatttaattgggaaagtttgtcatcatttgaaaaaggaaatataaaaggaacaaccatatagccaacctgtggtctggcagaaacaacgtctctagcaatagtaccaaagtaagtaatggagtcttttttttggcaggtctgcagtaaaagataacattttcttttcttagtcctcctgctctcaacccccatattttgcctttgaatacgtgggttttagtatatatagcccaaaatggtaactgtctccagaacagcaaccacattgaattcttgtgacttaggaaagcttcttatagttgctgacattaattgcaagaaataactatatactactttgagaagtaaacatgtcaaaaaaaacaaagttcagatatgggacaaaatttaaaaattcagtaacatttataaacagaattgaatgaaaagagttacagaccaacttaaacatcaattcgtgtcagtaaactgacttttgggggtaatgatcattgttttgtatctcaaaagtattgagtttagaaatcagttgtatgatactacctttgtatgtctgtcttttcccgtgtatttttaaataactggtgatctataatttaataaaatttttcgttggtgtaatattatttcaaaagccctccaaatttagtcatcaaaattaaaatgacatttttcaagtttatttttaagcaactgaattcgtaaaattaaagtaacaaaaagcattcatttttctttattttaaagttcctctcaaaaggcttacatttttttaacatacttcagagatagaagtctccctcttagacatgctttcttcactgctttctcccgtcaatgttttaaaaatatttactcagtagatatttgaagggcccactctgtaacaggaattatgttaggtattgaggatagtttgtagacaagaaaaaccaactcccttccctttggtgcctacattccagtttaaaacaaaatctaaaaatgactattacttggaacaaaataaattgccatgccataaatgctcctgacttcaagtcaggagacataatggcaatttctaaggagtcatgagcttagaaatgccacaaattttagcattcattggtggatctttcttgcagcaattactattgtggagttctagtgatgattttctgtttcccttattctataattatttattagaatctttttataaggaagatttgtcccttctttatttacttattaaatcacttatactctgg

SEQ ID NO: 3834 - protein, 153 aa, Homo sapiens; identical to SEQ ID NO: 346

SEQ ID NO: 3835 - DNA, 2713 bp, Homo sapiens
atccgcggccgtagcagccgggctggtcctgctgcgagccggcggcccggagtggggcggcggcatgtaccttccacattgagtattcagaaagaagtgatctgaactctgaccattctttatggatacattaagtcaaatataagagtctgactacttgacacactggctcgagcaaacatgaacgttggagttgcccacagtgaagtgaatccaaatacccgtgtcatgaacagccggggtatgtggctgacatatgcattgggagttggcttgcttcatattgtcttactcagcattcccttcttcagtgttcctgttgcttggactttaacaaatattatacataatctggggatgtacgtatttttgcatgcagtgaaaggaacacctttcgaaactcctgaccagggtaaagcaaggctcctaactcattgggaacaactggactatggagtacagtttacatcttcacggaagtttttcacaatttctccaataattctatattttctggcaagtttctatacgaagtatgatccaactcacttcatcctaaacacagcttctctcctgagtgtactaattcccaaaatgccacaactacatggtgttcggatctttggaattaataagtattgaaatgttttgaaactgaaaaaaaattttacagctactgaatttcttataaggaaggagtggttagtaaactgcactgtttctgtgataatgtgaaatgagaagtatttacattggagggccaatggctggtccttcaagtgctgttttgaagtgcagatttccattaaatgatgcctctgtttaatacacctggtacatttctgaagaggggctttataagcaggctgggcaggcccagcttataagttaaagggcatcacagtgagggtgtagtagataaattcaaggaaataagagatttgtaagaaactaggaccagcttaacttataatgaatgggcattgtgttaagaaaagaacatttccagtcattcagctgtggttatttaaagcagacttacatgtaaaccggaatcctctctatacaagtttattaaagattatttttattaccgtacatatttctcgttttatgtaagcggatgtatatcctcttgttttatacaagccagttcccacttatgagggtacttttttggttttgctggcttaatattgtgtattggtcaatgaggccatttttacatttattacgttacagagttcatggaggttcacctttgtgactgattggtgataaaagatagccaagtgtcttacaagcagcttctgagtcaagtgttctaattttggaacaaagcaggttttactgcttttccagacacaaggctgctaaaccaattaagaaaataattaatttctttcaagcaactaaaaaatatatggtaatttaaaggtgtctgcttatttggttgaacaatttaattgggaaagtttgtcatcatttgaaaaaggaaatataaaaggaacaaccatatagccaacctgtggtctggcagaaacaacgtctctagcaatagtaccaaagtaagtaatggagtcttttttttggcaggtctgcagtaaaagataacattttcttttcttagtcctcctgctctcaacccccatattttgcctttgaatacgtgggttttagtatatatagcccaaaatggtaactgtctccagaacagcaaccacattgaattcttgtgacttaggaaagcttcttatagttgctgacattaattgcaagaaataactatatactactttgagaagtaaacatgtcaaaaaaaacaaagttcagatatgggacaaaatttaaaaattcagtaacatttataaacagaattgaatgaaaagagttacagaccaacttaaacatcaattcgtgtcagtaaactgacttttgggggtaatgatcattgttttgtatctcaaaagtattgagtttagaaatcagttgtatgatactacctttgtatgtctgtcttttcccgtgtatttttaaataactggtgatctataatttaataaaatttttcgttggtgtaatattatttcaaaagccctccaaatttagtcatcaaaattaaaatgacatttttcaagtttatttttaagcaactgaattcgtaaaattaaagtaacaaaaagcattcatttttctttattttaaagttcctctcaaaaggcttacatttttttaacatacttcagagatagaagtctccctcttagacatgctttcttcactgctttctcccgtcaatgttttaaaaatatttactcagtagatatttgaagggcccactctgtaacaggaattatgttaggtattgaggatagtttgtagacaagaaaaaccaactcccttccctttggtgcctacattccagtttaaaacaaaatctaaaaatgactattacttggaacaaaataaattgccatgccataaatgctcctgacttcaagtcaggagacataatggcaatttctaaggagtcatgagcttagaaatgccacaaattttagcattcattggtggatctttcttgcagcaattactattgtggagttctagtgatgattttctgtttcccttattctataattatttattagaatctttttataaggaagatttgtcccttctttatttacttattaaatcacttatactctgg

SEQ ID NO: 3836 - protein, 153 aa, Homo sapiens; identical to SEQ ID NO: 346

SEQ ID NO: 3837 - DNA, 3000 bp, Homo sapiens
ggcgtgtatccgcggccgtagcagccgggctggtcctgctgcgagccggcggcccggagtggggcggcgggtaagtgggcacgaacgcggtggacgctgtacagtcgccttcgtcggtagggaactgctggcggcctaggggtcgtcctgagagggaaaagcgggctccggctgcatctgcggcgccctgcgtggccgtaagagccaagtggcctcagaggctcgccccctacgcaaatcctcgttgtcttgccagggtcctgacgtgacgtgcggccgcgagaaggaaggggcgggttgggggaggcgctgaggtggtagcagcggcggcttttgctgagttttctctggcccagagcgctcgggctgtcggtctagcaggggggactcccctgaggggccgctgcgggtcgccgtcttcggaggcaccggcgagggcagagccaacagcctcttcacgagcaaacatgaacgttggagttgcccacagtgaagtgaatccaaatacccgtgtcatgaacagccggggtatgtggctgacatatgcattgggagttggcttgcttcatattgtcttactcagcattcccttcttcagtgttcctgttgcttggactttaacaaatattatacataatctggggatgtacgtatttttgcatgcagtgaaaggaacacctttcgaaactcctgaccagggtaaagcaaggctcctaactcattgggaacaactggactatggagtacagtttacatcttcacggaagtttttcacaatttctccaataattctatattttctggcaagtttctatacgaagtatgatccaactcacttcatcctaaacacagcttctctcctgagtgtactaattcccaaaatgccacaactacatggtgttcggatctttggaattaataagtattgaaatgttttgaaactgaaaaaaaattttacagctactgaatttcttataaggaaggagtggttagtaaactgcactgtttctgtgataatgtgaaatgagaagtatttacattggagggccaatggctggtccttcaagtgctgttttgaagtgcagatttccattaaatgatgcctctgtttaatacacctggtacatttctgaagaggggctttataagcaggctgggcaggcccagcttataagttaaagggcatcacagtgagggtgtagtagataaattcaaggaaataagagatttgtaagaaactaggaccagcttaacttataatgaatgggcattgtgttaagaaaagaacatttccagtcattcagctgtggttatttaaagcagacttacatgtaaaccggaatcctctctatacaagtttattaaagattatttttattaccgtacatatttctcgttttatgtaagcggatgtatatcctcttgttttatacaagccagttcccacttatgagggtacttttttggttttgctggcttaatattgtgtattggtcaatgaggccatttttacatttattacgttacagagttcatggaggttcacctttgtgactgattggtgataaaagatagccaagtgtcttacaagcagcttctgagtcaagtgttctaattttggaacaaagcaggttttactgcttttccagacacaaggctgctaaaccaattaagaaaataattaatttctttcaagcaactaaaaaatatatggtaatttaaaggtgtctgcttatttggttgaacaatttaattgggaaagtttgtcatcatttgaaaaaggaaatataaaaggaacaaccatatagccaacctgtggtctggcagaaacaacgtctctagcaatagtaccaaagtaagtaatggagtcttttttttggcaggtctgcagtaaaagataacattttcttttcttagtcctcctgctctcaacccccatattttgcctttgaatacgtgggttttagtatatatagcccaaaatggtaactgtctccagaacagcaaccacattgaattcttgtgacttaggaaagcttcttatagttgctgacattaattgcaagaaataactatatactactttgagaagtaaacatgtcaaaaaaaacaaagttcagatatgggacaaaatttaaaaattcagtaacatttataaacagaattgaatgaaaagagttacagaccaacttaaacatcaattcgtgtcagtaaactgacttttgggggtaatgatcattgttttgtatctcaaaagtattgagtttagaaatcagttgtatgatactacctttgtatgtctgtcttttcccgtgtatttttaaataactggtgatctataatttaataaaatttttcgttggtgtaatattatttcaaaagccctccaaatttagtcatcaaaattaaaatgacatttttcaagtttatttttaagcaactgaattcgtaaaattaaagtaacaaaaagcattcatttttctttattttaaagttcctctcaaaaggcttacatttttttaacatacttcagagatagaagtctccctcttagacatgctttcttcactgctttctcccgtcaatgttttaaaaatatttactcagtagatatttgaagggcccactctgtaacaggaattatgttaggtattgaggatagtttgtagacaagaaaaaccaactcccttccctttggtgcctacattccagtttaaaacaaaatctaaaaatgactattacttggaacaaaataaattgccatgccataaatgctcctgacttcaagtcaggagacataatggcaatttctaaggagtcatgagcttagaaatgccacaaattttagcattcattggtggatctttcttgcagcaattactattgtggagttctagtgatgattttctgtttcccttattctataattatttattagaatctttttataaggaagatttgtcccttctttatttacttattaaatcacttatactctgg

SEQ ID NO: 3838 - protein, 153 aa, Homo sapiens; identical to SEQ ID NO: 346

SEQ ID NO: 3839 - DNA, 3181 bp, Homo sapiens
ctgagggcgtgtatccgcggccgtagcagccgggctggtcctgctgcgagccggcggcccggagtggggcggcgggtaagtgggcacgaacgcggtggacgctgtacagtcgccttcgtcggtagggaactgctggcggcctaggggtcgtcctgagagggaaaagcgggctccggctgcatctgcggcgccctgcgtggccgtaagagccaagtggcctcagaggctcgccccctacgcaaatcctcgttgtcttgccagggtcctgacgtgacgtgcggccgcgagaaggaaggggcgggttgggggaggcgctgaggtggtagcagcggcggcttttgctgagttttctctggcccagagcgctcgggctgtcggtctagcaggggggactcccctgaggggccgctgcgggtcgccgtcttcggaggcaccggcgagggcagagccaacagcctcttcacggtctgtaaggtcattgtttgccagtcgtgggcagcgcggcaaacctgctgggaaaaggttttctggttggaataggatgagtaccgcaccagctttgccttccagctgagatgtaaatttcaggcctccatcctgtggaacgtgggaaaactatcttgagtgttggcatgttctaaagcaaacatgaacgttggagttgcccacagtgaagtgaatccaaatacccgtgtcatgaacagccggggtatgtggctgacatatgcattgggagttggcttgcttcatattgtcttactcagcattcccttcttcagtgttcctgttgcttggactttaacaaatattatacataatctggggatgtacgtatttttgcatgcagtgaaaggaacacctttcgaaactcctgaccagggtaaagcaaggctcctaactcattgggaacaactggactatggagtacagtttacatcttcacggaagtttttcacaatttctccaataattctatattttctggcaagtttctatacgaagtatgatccaactcacttcatcctaaacacagcttctctcctgagtgtactaattcccaaaatgccacaactacatggtgttcggatctttggaattaataagtattgaaatgttttgaaactgaaaaaaaattttacagctactgaatttcttataaggaaggagtggttagtaaactgcactgtttctgtgataatgtgaaatgagaagtatttacattggagggccaatggctggtccttcaagtgctgttttgaagtgcagatttccattaaatgatgcctctgtttaatacacctggtacatttctgaagaggggctttataagcaggctgggcaggcccagcttataagttaaagggcatcacagtgagggtgtagtagataaattcaaggaaataagagatttgtaagaaactaggaccagcttaacttataatgaatgggcattgtgttaagaaaagaacatttccagtcattcagctgtggttatttaaagcagacttacatgtaaaccggaatcctctctatacaagtttattaaagattatttttattaccgtacatatttctcgttttatgtaagcggatgtatatcctcttgttttatacaagccagttcccacttatgagggtacttttttggttttgctggcttaatattgtgtattggtcaatgaggccatttttacatttattacgttacagagttcatggaggttcacctttgtgactgattggtgataaaagatagccaagtgtcttacaagcagcttctgagtcaagtgttctaattttggaacaaagcaggttttactgcttttccagacacaaggctgctaaaccaattaagaaaataattaatttctttcaagcaactaaaaaatatatggtaatttaaaggtgtctgcttatttggttgaacaatttaattgggaaagtttgtcatcatttgaaaaaggaaatataaaaggaacaaccatatagccaacctgtggtctggcagaaacaacgtctctagcaatagtaccaaagtaagtaatggagtcttttttttggcaggtctgcagtaaaagataacattttcttttcttagtcctcctgctctcaacccccatattttgcctttgaatacgtgggttttagtatatatagcccaaaatggtaactgtctccagaacagcaaccacattgaattcttgtgacttaggaaagcttcttatagttgctgacattaattgcaagaaataactatatactactttgagaagtaaacatgtcaaaaaaaacaaagttcagatatgggacaaaatttaaaaattcagtaacatttataaacagaattgaatgaaaagagttacagaccaacttaaacatcaattcgtgtcagtaaactgacttttgggggtaatgatcattgttttgtatctcaaaagtattgagtttagaaatcagttgtatgatactacctttgtatgtctgtcttttcccgtgtatttttaaataactggtgatctataatttaataaaatttttcgttggtgtaatattatttcaaaagccctccaaatttagtcatcaaaattaaaatgacatttttcaagtttatttttaagcaactgaattcgtaaaattaaagtaacaaaaagcattcatttttctttattttaaagttcctctcaaaaggcttacatttttttaacatacttcagagatagaagtctccctcttagacatgctttcttcactgctttctcccgtcaatgttttaaaaatatttactcagtagatatttgaagggcccactctgtaacaggaattatgttaggtattgaggatagtttgtagacaagaaaaaccaactcccttccctttggtgcctacattccagtttaaaacaaaatctaaaaatgactattacttggaacaaaataaattgccatgccataaatgctcctgacttcaagtcaggagacataatggcaatttctaaggagtcatgagcttagaaatgccacaaattttagcattcattggtggatctttcttgcagcaattactattgtggagttctagtgatgattttctgtttcccttattctataattatttattagaatctttttataaggaagatttgtcccttctttatttacttattaaatcacttatactctgg

SEQ ID NO: 3840 - protein, 153 aa, Homo sapiens; identical to SEQ ID NO: 346

SEQ ID NO: 3841 - DNA, 2636 bp, Homo sapiens
gcaagctgcgcagcgccgggcctgagggcgtgtatccgcggccgtagcagccgggctggtcctgctgcgagccggcggcccggagtggggcggcggagcaaacatgaacgttggagttgcccacagtgaagtgaatccaaatacccgtgtcatgaacagccggggtatgtggctgacatatgcattgggagttggcttgcttcatattgtcttactcagcattcccttcttcagtgttcctgttgcttggactttaacaaatattatacataatctggggatgtacgtatttttgcatgcagtgaaaggaacacctttcgaaactcctgaccagggtaaagcaaggctcctaactcattgggaacaactggactatggagtacagtttacatcttcacggaagtttttcacaatttctccaataattctatattttctggcaagtttctatacgaagtatgatccaactcacttcatcctaaacacagcttctctcctgagtgtactaattcccaaaatgccacaactacatggtgttcggatctttggaattaataagtattgaaatgttttgaaactgaaaaaaaattttacagctactgaatttcttataaggaaggagtggttagtaaactgcactgtttctgtgataatgtgaaatgagaagtatttacattggagggccaatggctggtccttcaagtgctgttttgaagtgcagatttccattaaatgatgcctctgtttaatacacctggtacatttctgaagaggggctttataagcaggctgggcaggcccagcttataagttaaagggcatcacagtgagggtgtagtagataaattcaaggaaataagagatttgtaagaaactaggaccagcttaacttataatgaatgggcattgtgttaagaaaagaacatttccagtcattcagctgtggttatttaaagcagacttacatgtaaaccggaatcctctctatacaagtttattaaagattatttttattaccgtacatatttctcgttttatgtaagcggatgtatatcctcttgttttatacaagccagttcccacttatgagggtacttttttggttttgctggcttaatattgtgtattggtcaatgaggccatttttacatttattacgttacagagttcatggaggttcacctttgtgactgattggtgataaaagatagccaagtgtcttacaagcagcttctgagtcaagtgttctaattttggaacaaagcaggttttactgcttttccagacacaaggctgctaaaccaattaagaaaataattaatttctttcaagcaactaaaaaatatatggtaatttaaaggtgtctgcttatttggttgaacaatttaattgggaaagtttgtcatcatttgaaaaaggaaatataaaaggaacaaccatatagccaacctgtggtctggcagaaacaacgtctctagcaatagtaccaaagtaagtaatggagtcttttttttggcaggtctgcagtaaaagataacattttcttttcttagtcctcctgctctcaacccccatattttgcctttgaatacgtgggttttagtatatatagcccaaaatggtaactgtctccagaacagcaaccacattgaattcttgtgacttaggaaagcttcttatagttgctgacattaattgcaagaaataactatatactactttgagaagtaaacatgtcaaaaaaaacaaagttcagatatgggacaaaatttaaaaattcagtaacatttataaacagaattgaatgaaaagagttacagaccaacttaaacatcaattcgtgtcagtaaactgacttttgggggtaatgatcattgttttgtatctcaaaagtattgagtttagaaatcagttgtatgatactacctttgtatgtctgtcttttcccgtgtatttttaaataactggtgatctataatttaataaaatttttcgttggtgtaatattatttcaaaagccctccaaatttagtcatcaaaattaaaatgacatttttcaagtttatttttaagcaactgaattcgtaaaattaaagtaacaaaaagcattcatttttctttattttaaagttcctctcaaaaggcttacatttttttaacatacttcagagatagaagtctccctcttagacatgctttcttcactgctttctcccgtcaatgttttaaaaatatttactcagtagatatttgaagggcccactctgtaacaggaattatgttaggtattgaggatagtttgtagacaagaaaaaccaactcccttccctttggtgcctacattccagtttaaaacaaaatctaaaaatgactattacttggaacaaaataaattgccatgccataaatgctcctgacttcaagtcaggagacataatggcaatttctaaggagtcatgagcttagaaatgccacaaattttagcattcattggtggatctttcttgcagcaattactattgtggagttctagtgatgattttctgtttcccttattctataattatttattagaatctttttataaggaagatttgtcccttctttatttacttattaaatcacttatactctgg

SEQ ID NO: 3842 - protein, 153 aa, Homo sapiens; identical to SEQ ID NO: 346

SEQ ID NO: 3843 - DNA, 2406 bp, Homo sapiens
gagcgctcgggctgtcggtctagcaggggggactcccctgaggggccgctgcgggtcgccgtcttcggaggcaccggcgagggcagagccaacagcctcttcacggtgttcttcaggacagttttattttaagcaattcttagtctcaagtaaacaccatcattaaaagaactgagaactattatcaattcttcctttggagtccatcttcaatggaaaggagaagggaaaaccttttttaaaaagaagaaagaaaactgaagtttttgatttgactagagaaatattcagaagactccttattttcacctagtttaatcacaaaattgagaaacaaacattatcccttgaccatgtaaattttacaccacattatgtcaacagcatgtaccttccacattgagtattcagaaagaagtgatctgaactctgaccattctttatggatacattaagtcaaatataagagtctgactacttgacacactggctcgagcaaacatgaacgttggagttgcccacagtgaagtgaatccaaatacccgtgtcatgaacagccggggtatgtggctgacatatgcattgggagttggcttgcttcatattgtcttactcagcattcccttcttcagtgttcctgttgcttggactttaacaaatattatacataatctggggatgtacgtatttttgcatgcagtgaaaggaacacctttcgaaactcctgaccagggtaaagcaaggctcctaactcattgggaacaactggactatggagtacagtttacatcttcacggaagtttttcacaatttctccaataattctatattttctggcaagtttctatacgaagtatgatccaactcacttcatcctaaacacagcttctctcctgagtgtactaattcccaaaatgccacaactacatggtgttcggatctttggaattaataagtattgaaatgttttgaaactgaaaaaaaattttacagctactgaatttcttataaggaaggagtggttagtaaactgcactgtttctgtgataatgtgaaatgagaagtatttacattggagggccaatggctggtccttcaagtgctgttttgaagtgcagatttccattaaatgatgcctctgtttaatacacctggtacatttctgaagaggggctttataagcaggctgggcaggcccagcttataagttaaagggcatcacagtgagggtgtagtagataaattcaaggaaataagagatttgtaagaaactaggaccagcttaacttataatgaatgggcattgtgttaagaaaagaacatttccagtcattcagctgtggttatttaaagcagacttacatgtaaaccggaatcctctctatacaagtttattaaagattatttttattaccgtacatatttctcgttttatgtaagcggatgtatatcctcttgttttatacaagccagttcccacttatgagggtacttttttggttttgctggcttaatattgtgtattggtcaatgaggccatttttacatttattacgttacagagttcatggaggttcacctttgtgactgattggtgataaaagatagccaagtgtcttacaagcagcttctgagtcaagtgttctaattttggaacaaagcaggttttactgcttttccagacacaaggctgctaaaccaattaagaaaataattaatttctttcaagcaactaaaaaatatatggtaatttaaaggtgtctgcttatttggttgaacaatttaattgggaaagtttgtcatcatttgaaaaaggaaatataaaaggaacaaccatatagccaacctgtggtctggcagaaacaacgtctctagcaatagtaccaaagtaagtaatggagtcttttttttggcaggtctgcagtaaaagataacattttcttttcttagtcctcctgctctcaacccccatattttgcctttgaatacgtgggttttagtatatatagcccaaaatggtaactgtctccagaacagcaaccacattgaattcttgtgacttaggaaagcttcttatagttgctgacattaattgcaagaaataactatatactactttgagaagtaaacatgtcaaaaaaaacaaagttcagatatgggacaaaatttaaaaattcagtaacatttataaacagaattgaatgaaaagagttacagaccaacttaaacatcaattcgtgtcagtaaactgacttttgggggtaatgatcattgttttgtatctcaaaagtattgagtttagaaatcagttgtatgatactacctttgtatgtctgtcttttcccgtgtatttttaaataactggtgatctataatttaataaaatttttcgttggtgtaatatt

SEQ ID NO: 3844 - protein, 153 aa, Homo sapiens; identical to SEQ ID NO: 346

SEQ ID NO: 3845 - DNA, 3327 bp, Homo sapiens
cagcggcggcttttgctgagttttctctggcccagagcgctcgggctgtcggtctagcaggggggactcccctgaggggccgctgcgggtcgccgtcttcggaggcaccggcgagggcagagccaacagcctcttcacggtctgtaaggtcattgtttgccagtcgtgggcagcgcggcaaacctgctgggaaaaggttttctggttggaataggatgagtaccgcaccagctttgccttccagctgagatgtaaatttcaggcctccatcctgtggaacgtgggaaaactatcttgagtgttggcatgttctaagtatgacataatagtttaatgtatgataaatcatgggtgtttagacgaaagatttacacatataaattggaggctttagcggtcttagtgtaactaacttttcgtccccttaacccttgatgcctgttctatgggtctctagagcggaaggagcattatactccggaaacatttgctggaaggggttatgagaaattcctctctgtatgctaactccgtaatacaagcgtttgtgtattttaaaatcacagctgttccaaatataatctagcctcgttttccccctccgtcggatgataggtgttcttcaggacagttttattttaagcaattcttagtctcaagtaaacaccatcattaaaagaactgagaactattatcaattcttcctttggagtccatcttcaatggaaaggagaagggaaaaccttttttaaaaagaagaaagaaaactgaagtttttgatttgactagagaaatattcagaagactccttattttcacctagtttaatcacaaaattgagaaacaaacattatcccttgaccatgtaaattttacaccacattatgtcaacagcatgtaccttccacattgagtattcagaaagaagtgatctgaactctgaccattctttatggatacattaagtcaaatataagagtctgactacttgacacactggctcggtgagttctgctttttctttttaatataaatttattatgttggtaaatttagcttttggcttttcactttgctctcatgatataagaaaatgtaggttttctctttcagtttgaattttcctattcagtaaaacaacatgctagaaaacaaacttttggaaaggcattgtaactattttttcaaatagaaccataataacaagtcttgtcttaccctaaagtcaaatgctgaagattctttactgctgtcatcagcatctacaagtagcatattttggatggtgtttgtgtgctacttcaaagtaactaggaaaaaataatcctcgcaacacaggtaccttgtcatgtcagaattgggggtgttaggttgccagttgtatcagtgttgattcatttcattacttcctacagagcaaacatgaacgttggagttgcccacagtgaagtgaatccaaatacccgtgtcatgaacagccggggtatgtggctgacatatgcattgggagttggcttgcttcatattgtcttactcagcattcccttcttcagtgttcctgttgcttggactttaacaaatattatacataatctggggatgtacgtatttttgcatgcagtgaaaggaacacctttcgaaactcctgaccagggtaaagcaaggctcctaactcattgggaacaactggactatggagtacagtttacatcttcacggaagtttttcacaatttctccaataattctatattttctggcaagtttctatacgaagtatgatccaactcacttcatcctaaacacagcttctctcctgagtgtactaattcccaaaatgccacaactacatggtgttcggatctttggaattaataagtattgaaatgttttgaaactgaaaaaaaattttacagctactgaatttcttataaggaaggagtggttagtaaactgcactgtttctgtgataatgtgaaatgagaagtatttacattggagggccaatggctggtccttcaagtgctgttttgaagtgcagatttccattaaatgatgcctctgtttaatacacctggtacatttctgaagaggggctttataagcaggctgggcaggcccagcttataagttaaagggcatcacagtgagggtgtagtagataaattcaaggaaataagagatttgtaagaaactaggaccagcttaacttataatgaatgggcattgtgttaagaaaagaacatttccagtcattcagctgtggttatttaaagcagacttacatgtaaaccggaatcctctctatacaagtttattaaagattatttttattaccgtacatatttctcgttttatgtaagcggatgtatatcctcttgttttatacaagccagttcccacttatgagggtacttttttggttttgctggcttaatattgtgtattggtcaatgaggccatttttacatttattacgttacagagttcatggaggttcacctttgtgactgattggtgataaaagatagccaagtgtcttacaagcagcttctgagtcaagtgttctaattttggaacaaagcaggttttactgcttttccagacacaaggctgctaaaccaattaagaaaataattaatttctttcaagcaactaaaaaatatatggtaatttaaaggtgtctgcttatttggttgaacaatttaattgggaaagtttgtcatcatttgaaaaaggaaatataaaaggaacaaccatatagccaacctgtggtctggcagaaacaacgtctctagcaatagtaccaaagtaagtaatggagtcttttttttggcaggtctgcagtaaaagataacattttcttttcttagtcctcctgctctcaacccccatattttgcctttgaatacgtgggttttagtatatatagcccaaaatggtaactgtctccagaacagcaaccacattgaattcttgtgacttaggaaagcttcttatagttgctgacattaattgcaagaaataactatatactactttgagaagtaaacatgtcaaaaaaaacaaagttcagatatgggacaaaatttaaaaattcagtaacatttataaacagaattgaatgaaaagagttacagaccaacttaaacatcaattcgtgtcagtaaactgacttttgggggtaatgatcattgttttgtatctcaaaagtattgagtttagaaatcagttgtatgatactacctttgtatgtctgtcttttcccgtgtatttttaaataactggtgatctataatttaataaaatttttcgttggtgtaatatt

SEQ ID NO: 3846 - protein, 153 aa, Homo sapiens; identical to SEQ ID NO: 346

SEQ ID NO: 3847 - DNA, 2357 bp, Homo sapiens
cctgctgcgagccggcggcccggagtggggcggcgggtaagtgggcacgaacgcggtggacgctgtacagtcgccttcgtcggtagggaactgctggcggcctaggggtcgtcctgagagggaaaagcgggctccggctgcatctgcggcgccctgcgtggccgtaagagccaagtggcctcagaggctcgccccctacgcaaatcctcgttgtcttgccagggtcctgacgtgacgtgcggccgcgagaaggaaggggcgggttgggggaggcgctgaggtggtagcagcggcggcttttgctgagttttctctggcccagagcgctcgggctgtcggtctagcaggggggactcccctgaggggccgctgcgggtcgccgtcttcggaggcaccggcgagggcagagccaacagcctcttcacggtctgtaaggtcattgtttgccagtcgtgggcagcgcggcaaacctgctgggaaaaggttttctggttggaataggatgagtaccgcaccagctttgccttccagctgagatgtaaatttcaggcctccatcctgtggaacgtgggaaaactatcttgagtgttggcatgttctaagtatgacataatagtttaatgtatgataaatcatgggtgtttagacgaaagatttacacatataaattggaggctttagcggtcttagtgtaactaacttttcgtccccttaacccttgatgcctgttctatgggtctctagagcggaaggagcattatactccggaaacatttgctggaaggggttatgagaaattcctctctgtatgctaactccgtaatacaagcgtttgtgtattttaaaatcacagctgttccaaatataatctagcctcgttttccccctccgtcggatgataggtgttcttcaggacagttttattttaagcaattcttagtctcaagtaaacaccatcattaaaagaactgagaactattatcaattcttcctttggagtccatcttcaatggaaaggagaagggaaaaccttttttaaaaagaagaaagaaaactgaagtttttgatttgactagagaaatattcagaagactccttattttcacctagtttaatcacaaaattgagaaacaaacattatcccttgaccatgtaaattttacaccacattatgtcaacagcatgtaccttccacattgagtattcagaaagaagtgatctgaactctgaccattctttatggatacattaagtcaaatataagaaaaagaacatttccagtcattcagctgtggttatttaaagcagacttacatgtaaaccggaatcctctctatacaagtttattaaagattatttttattaccgtacatatttctcgttttatgtaagcggatgtatatcctcttgttttatacaagccagttcccacttatgagggtacttttttggttttgctggcttaatattgtgtattggtcaatgaggccatttttacatttattacgttacagagttcatggaggttcacctttgtgactgattggtgataaaagatagccaagtgtcttacaagcagcttctgagtcaagtgttctaattttggaacaaagcaggttttactgcttttccagacacaaggctgctaaaccaattaagaaaataattaatttctttcaagcaactaaaaaatatatggtaatttaaaggtgtctgcttatttggttgaacaatttaattgggaaagtttgtcatcatttgaaaaaggaaatataaaaggaacaaccatatagccaacctgtggtctggcagaaacaacgtctctagcaatagtaccaaagtaagtaatggagtcttttttttggcaggtctgcagtaaaagataacattttcttttcttagtcctcctgctctcaacccccatattttgcctttgaatacgtgggttttagtatatatagcccaaaatggtaactgtctccagaacagcaaccacattgaattcttgtgacttaggaaagcttcttatagttgctgacattaattgcaagaaataactatatactactttgagaagtaaacatgtcaaaaaaaacaaagttcagatatgggacaaaatttaaaaattcagtaacatttataaacagaattgaatgaaaagagttacagaccaacttaaacatcaattcgtgtcagtaaactgacttttgggggtaatgatcattgttttgtatctcaaaagtattgagtttagaaatcagttgtatgatactacctttgtatgtctgtcttttcccgtgtatttttaaataactggtgatctataatttaataaaatttttcgttggtgtaatatt

SEQ ID NO: 3848 - protein, 47 aa, Homo sapiens
MYILLFYTSQFPLMRVLFWFCWLNIVYWSMRPFLHLLRYRVHGGSPL

SEQ ID NO: 3849 - DNA, 2493 bp, Homo sapiens
cgcggccgtagcagccgggctggtcctgctgcgagccggcggcccggagtggggcggcggcatgtaccttccacattgagtattcagaaagaagtgatctgaactctgaccattctttatggatacattaagtcaaatataagagtctgactacttgacacactggctcggtgagttctgctttttctttttaatataaatttattatgttggtaaatttagcttttggcttttcactttgctctcatgatataagaaaatgtaggttttctctttcagtttgaattttcctattcagtaaaacaacatgctagaaaacaaacttttggaaaggcattgtaactattttttcaaatagaaccataataacaagtcttgtcttaccctaaagtcaaatgctgaagattctttactgctgtcatcagcatctacaagtagcatattttggatggtgtttgtgtgctacttcaaagtaactaggaaaaaataatcctcgcaacacaggtaccttgtcatgtcagaattgggggtgttaggttgccagttgtatcagtgttgattcatttcattacttcctacagagcaaacatgaacgttggagttgcccacagtgaagtgaatccaaatacccgtgtcatgaacagccggggtatgtggctgacatatgcattgggagttggcttgcttcatattgtcttactcagcattcccttcttcagtgttcctgttgcttggactttaacaaatattatacataatctggggatgtacgtatttttgcatgcagtgaaaggaacacctttcgaaactcctgaccagggtaaagcaaggctcctaactcattgggaacaactggactatggagtacagtttacatcttcacggaagtttttcacaatttctccaataattctatattttctggcaagtttctatacgaagtatgatccaactcacttcatcctaaacacagcttctctcctgagtgtactaattcccaaaatgccacaactacatggtgttcggatctttggaattaataagtattgaaatgttttgaaactgaaaaaaaattttacagctactgaatttcttataaggaaggagtggttagtaaactgcactgtttctgtgataatgtgaaatgagaagtatttacattggagggccaatggctggtccttcaagtgctgttttgaagtgcagatttccattaaatgatgcctctgtttaatacacctggtacatttctgaagaggggctttataagcaggctgggcaggcccagcttataagttaaagggcatcacagtgagggtgtagtagataaattcaaggaaataagagatttgtaagaaactaggaccagcttaacttataatgaatgggcattgtgttaagaaaagaacatttccagtcattcagctgtggttatttaaagcagacttacatgtaaaccggaatcctctctatacaagtttattaaagattatttttattaccgtacatatttctcgttttatgtaagcggatgtatatcctcttgttttatacaagccagttcccacttatgagggtacttttttggttttgctggcttaatattgtgtattggtcaatgaggccatttttacatttattacgttacagagttcatggaggttcacctttgtgactgattggtgataaaagatagccaagtgtcttacaagcagcttctgagtcaagtgttctaattttggaacaaagcaggttttactgcttttccagacacaaggctgctaaaccaattaagaaaataattaatttctttcaagcaactaaaaaatatatggtaatttaaaggtgtctgcttatttggttgaacaatttaattgggaaagtttgtcatcatttgaaaaaggaaatataaaaggaacaaccatatagccaacctgtggtctggcagaaacaacgtctctagcaatagtaccaaagtaagtaatggagtcttttttttggcaggtctgcagtaaaagataacattttcttttcttagtcctcctgctctcaacccccatattttgcctttgaatacgtgggttttagtatatatagcccaaaatggtaactgtctccagaacagcaaccacattgaattcttgtgacttaggaaagcttcttatagttgctgacattaattgcaagaaataactatatactactttgagaagtaaacatgtcaaaaaaaacaaagttcagatatgggacaaaatttaaaaattcagtaacatttataaacagaattgaatgaaaagagttacagaccaacttaaacatcaattcgtgtcagtaaactgacttttgggggtaatgatcattgttttgtatctcaaaagtattgagtttagaaatcagttgtatgatactacctttgtatgtctgtcttttcccgtgtatttttaaataactggtgatctataatttaataaaatttttcgttggtgtaatatt

SEQ ID NO: 3850 - protein, 153 aa, Homo sapiens; identical to SEQ ID NO: 346

SEQ ID NO: 3851 - DNA, 2085 bp, Homo sapiens
atccgcggccgtagcagccgggctggtcctgctgcgagccggcggcccggagtggggcggcggcatgtaccttccacattgagtattcagaaagaagtgatctgaactctgaccattctttatggatacattaagtcaaatataagagtctgactacttgacacactggctcgagcaaacatgaacgttggagttgcccacagtgaagtgaatccaaatacccgtgtcatgaacagccggggtatgtggctgacatatgcattgggagttggcttgcttcatattgtcttactcagcattcccttcttcagtgttcctgttgcttggactttaacaaatattatacataatctggggatgtacgtatttttgcatgcagtgaaaggaacacctttcgaaactcctgaccagggtaaagcaaggctcctaactcattgggaacaactggactatggagtacagtttacatcttcacggaagtttttcacaatttctccaataattctatattttctggcaagtttctatacgaagtatgatccaactcacttcatcctaaacacagcttctctcctgagtgtactaattcccaaaatgccacaactacatggtgttcggatctttggaattaataagtattgaaatgttttgaaactgaaaaaaaattttacagctactgaatttcttataaggaaggagtggttagtaaactgcactgtttctgtgataatgtgaaatgagaagtatttacattggagggccaatggctggtccttcaagtgctgttttgaagtgcagatttccattaaatgatgcctctgtttaatacacctggtacatttctgaagaggggctttataagcaggctgggcaggcccagcttataagttaaagggcatcacagtgagggtgtagtagataaattcaaggaaataagagatttgtaagaaactaggaccagcttaacttataatgaatgggcattgtgttaagaaaagaacatttccagtcattcagctgtggttatttaaagcagacttacatgtaaaccggaatcctctctatacaagtttattaaagattatttttattaccgtacatatttctcgttttatgtaagcggatgtatatcctcttgttttatacaagccagttcccacttatgagggtacttttttggttttgctggcttaatattgtgtattggtcaatgaggccatttttacatttattacgttacagagttcatggaggttcacctttgtgactgattggtgataaaagatagccaagtgtcttacaagcagcttctgagtcaagtgttctaattttggaacaaagcaggttttactgcttttccagacacaaggctgctaaaccaattaagaaaataattaatttctttcaagcaactaaaaaatatatggtaatttaaaggtgtctgcttatttggttgaacaatttaattgggaaagtttgtcatcatttgaaaaaggaaatataaaaggaacaaccatatagccaacctgtggtctggcagaaacaacgtctctagcaatagtaccaaagtaagtaatggagtcttttttttggcaggtctgcagtaaaagataacattttcttttcttagtcctcctgctctcaacccccatattttgcctttgaatacgtgggttttagtatatatagcccaaaatggtaactgtctccagaacagcaaccacattgaattcttgtgacttaggaaagcttcttatagttgctgacattaattgcaagaaataactatatactactttgagaagtaaacatgtcaaaaaaaacaaagttcagatatgggacaaaatttaaaaattcagtaacatttataaacagaattgaatgaaaagagttacagaccaacttaaacatcaattcgtgtcagtaaactgacttttgggggtaatgatcattgttttgtatctcaaaagtattgagtttagaaatcagttgtatgatactacctttgtatgtctgtcttttcccgtgtatttttaaataactggtgatctataatttaataaaatttttcgttggtgtaatatt

SEQ ID NO: 3852 - protein, 153 aa, Homo sapiens; identical to SEQ ID NO: 346

SEQ ID NO: 3853 - DNA, 2372 bp, Homo sapiens
ggcgtgtatccgcggccgtagcagccgggctggtcctgctgcgagccggcggcccggagtggggcggcgggtaagtgggcacgaacgcggtggacgctgtacagtcgccttcgtcggtagggaactgctggcggcctaggggtcgtcctgagagggaaaagcgggctccggctgcatctgcggcgccctgcgtggccgtaagagccaagtggcctcagaggctcgccccctacgcaaatcctcgttgtcttgccagggtcctgacgtgacgtgcggccgcgagaaggaaggggcgggttgggggaggcgctgaggtggtagcagcggcggcttttgctgagttttctctggcccagagcgctcgggctgtcggtctagcaggggggactcccctgaggggccgctgcgggtcgccgtcttcggaggcaccggcgagggcagagccaacagcctcttcacgagcaaacatgaacgttggagttgcccacagtgaagtgaatccaaatacccgtgtcatgaacagccggggtatgtggctgacatatgcattgggagttggcttgcttcatattgtcttactcagcattcccttcttcagtgttcctgttgcttggactttaacaaatattatacataatctggggatgtacgtatttttgcatgcagtgaaaggaacacctttcgaaactcctgaccagggtaaagcaaggctcctaactcattgggaacaactggactatggagtacagtttacatcttcacggaagtttttcacaatttctccaataattctatattttctggcaagtttctatacgaagtatgatccaactcacttcatcctaaacacagcttctctcctgagtgtactaattcccaaaatgccacaactacatggtgttcggatctttggaattaataagtattgaaatgttttgaaactgaaaaaaaattttacagctactgaatttcttataaggaaggagtggttagtaaactgcactgtttctgtgataatgtgaaatgagaagtatttacattggagggccaatggctggtccttcaagtgctgttttgaagtgcagatttccattaaatgatgcctctgtttaatacacctggtacatttctgaagaggggctttataagcaggctgggcaggcccagcttataagttaaagggcatcacagtgagggtgtagtagataaattcaaggaaataagagatttgtaagaaactaggaccagcttaacttataatgaatgggcattgtgttaagaaaagaacatttccagtcattcagctgtggttatttaaagcagacttacatgtaaaccggaatcctctctatacaagtttattaaagattatttttattaccgtacatatttctcgttttatgtaagcggatgtatatcctcttgttttatacaagccagttcccacttatgagggtacttttttggttttgctggcttaatattgtgtattggtcaatgaggccatttttacatttattacgttacagagttcatggaggttcacctttgtgactgattggtgataaaagatagccaagtgtcttacaagcagcttctgagtcaagtgttctaattttggaacaaagcaggttttactgcttttccagacacaaggctgctaaaccaattaagaaaataattaatttctttcaagcaactaaaaaatatatggtaatttaaaggtgtctgcttatttggttgaacaatttaattgggaaagtttgtcatcatttgaaaaaggaaatataaaaggaacaaccatatagccaacctgtggtctggcagaaacaacgtctctagcaatagtaccaaagtaagtaatggagtcttttttttggcaggtctgcagtaaaagataacattttcttttcttagtcctcctgctctcaacccccatattttgcctttgaatacgtgggttttagtatatatagcccaaaatggtaactgtctccagaacagcaaccacattgaattcttgtgacttaggaaagcttcttatagttgctgacattaattgcaagaaataactatatactactttgagaagtaaacatgtcaaaaaaaacaaagttcagatatgggacaaaatttaaaaattcagtaacatttataaacagaattgaatgaaaagagttacagaccaacttaaacatcaattcgtgtcagtaaactgacttttgggggtaatgatcattgttttgtatctcaaaagtattgagtttagaaatcagttgtatgatactacctttgtatgtctgtcttttcccgtgtatttttaaataactggtgatctataatttaataaaatttttcgttggtgtaatatt

SEQ ID NO: 3854 - protein, 153 aa, Homo sapiens; identical to SEQ ID NO: 346

SEQ ID NO: 3855 - DNA, 2553 bp, Homo sapiens
ctgagggcgtgtatccgcggccgtagcagccgggctggtcctgctgcgagccggcggcccggagtggggcggcgggtaagtgggcacgaacgcggtggacgctgtacagtcgccttcgtcggtagggaactgctggcggcctaggggtcgtcctgagagggaaaagcgggctccggctgcatctgcggcgccctgcgtggccgtaagagccaagtggcctcagaggctcgccccctacgcaaatcctcgttgtcttgccagggtcctgacgtgacgtgcggccgcgagaaggaaggggcgggttgggggaggcgctgaggtggtagcagcggcggcttttgctgagttttctctggcccagagcgctcgggctgtcggtctagcaggggggactcccctgaggggccgctgcgggtcgccgtcttcggaggcaccggcgagggcagagccaacagcctcttcacggtctgtaaggtcattgtttgccagtcgtgggcagcgcggcaaacctgctgggaaaaggttttctggttggaataggatgagtaccgcaccagctttgccttccagctgagatgtaaatttcaggcctccatcctgtggaacgtgggaaaactatcttgagtgttggcatgttctaaagcaaacatgaacgttggagttgcccacagtgaagtgaatccaaatacccgtgtcatgaacagccggggtatgtggctgacatatgcattgggagttggcttgcttcatattgtcttactcagcattcccttcttcagtgttcctgttgcttggactttaacaaatattatacataatctggggatgtacgtatttttgcatgcagtgaaaggaacacctttcgaaactcctgaccagggtaaagcaaggctcctaactcattgggaacaactggactatggagtacagtttacatcttcacggaagtttttcacaatttctccaataattctatattttctggcaagtttctatacgaagtatgatccaactcacttcatcctaaacacagcttctctcctgagtgtactaattcccaaaatgccacaactacatggtgttcggatctttggaattaataagtattgaaatgttttgaaactgaaaaaaaattttacagctactgaatttcttataaggaaggagtggttagtaaactgcactgtttctgtgataatgtgaaatgagaagtatttacattggagggccaatggctggtccttcaagtgctgttttgaagtgcagatttccattaaatgatgcctctgtttaatacacctggtacatttctgaagaggggctttataagcaggctgggcaggcccagcttataagttaaagggcatcacagtgagggtgtagtagataaattcaaggaaataagagatttgtaagaaactaggaccagcttaacttataatgaatgggcattgtgttaagaaaagaacatttccagtcattcagctgtggttatttaaagcagacttacatgtaaaccggaatcctctctatacaagtttattaaagattatttttattaccgtacatatttctcgttttatgtaagcggatgtatatcctcttgttttatacaagccagttcccacttatgagggtacttttttggttttgctggcttaatattgtgtattggtcaatgaggccatttttacatttattacgttacagagttcatggaggttcacctttgtgactgattggtgataaaagatagccaagtgtcttacaagcagcttctgagtcaagtgttctaattttggaacaaagcaggttttactgcttttccagacacaaggctgctaaaccaattaagaaaataattaatttctttcaagcaactaaaaaatatatggtaatttaaaggtgtctgcttatttggttgaacaatttaattgggaaagtttgtcatcatttgaaaaaggaaatataaaaggaacaaccatatagccaacctgtggtctggcagaaacaacgtctctagcaatagtaccaaagtaagtaatggagtcttttttttggcaggtctgcagtaaaagataacattttcttttcttagtcctcctgctctcaacccccatattttgcctttgaatacgtgggttttagtatatatagcccaaaatggtaactgtctccagaacagcaaccacattgaattcttgtgacttaggaaagcttcttatagttgctgacattaattgcaagaaataactatatactactttgagaagtaaacatgtcaaaaaaaacaaagttcagatatgggacaaaatttaaaaattcagtaacatttataaacagaattgaatgaaaagagttacagaccaacttaaacatcaattcgtgtcagtaaactgacttttgggggtaatgatcattgttttgtatctcaaaagtattgagtttagaaatcagttgtatgatactacctttgtatgtctgtcttttcccgtgtatttttaaataactggtgatctataatttaataaaatttttcgttggtgtaatatt

SEQ ID NO: 3856 - protein, 153 aa, Homo sapiens; identical to SEQ ID NO: 346

SEQ ID NO: 3857 - DNA, 2008 bp, Homo sapiens
gcaagctgcgcagcgccgggcctgagggcgtgtatccgcggccgtagcagccgggctggtcctgctgcgagccggcggcccggagtggggcggcggagcaaacatgaacgttggagttgcccacagtgaagtgaatccaaatacccgtgtcatgaacagccggggtatgtggctgacatatgcattgggagttggcttgcttcatattgtcttactcagcattcccttcttcagtgttcctgttgcttggactttaacaaatattatacataatctggggatgtacgtatttttgcatgcagtgaaaggaacacctttcgaaactcctgaccagggtaaagcaaggctcctaactcattgggaacaactggactatggagtacagtttacatcttcacggaagtttttcacaatttctccaataattctatattttctggcaagtttctatacgaagtatgatccaactcacttcatcctaaacacagcttctctcctgagtgtactaattcccaaaatgccacaactacatggtgttcggatctttggaattaataagtattgaaatgttttgaaactgaaaaaaaattttacagctactgaatttcttataaggaaggagtggttagtaaactgcactgtttctgtgataatgtgaaatgagaagtatttacattggagggccaatggctggtccttcaagtgctgttttgaagtgcagatttccattaaatgatgcctctgtttaatacacctggtacatttctgaagaggggctttataagcaggctgggcaggcccagcttataagttaaagggcatcacagtgagggtgtagtagataaattcaaggaaataagagatttgtaagaaactaggaccagcttaacttataatgaatgggcattgtgttaagaaaagaacatttccagtcattcagctgtggttatttaaagcagacttacatgtaaaccggaatcctctctatacaagtttattaaagattatttttattaccgtacatatttctcgttttatgtaagcggatgtatatcctcttgttttatacaagccagttcccacttatgagggtacttttttggttttgctggcttaatattgtgtattggtcaatgaggccatttttacatttattacgttacagagttcatggaggttcacctttgtgactgattggtgataaaagatagccaagtgtcttacaagcagcttctgagtcaagtgttctaattttggaacaaagcaggttttactgcttttccagacacaaggctgctaaaccaattaagaaaataattaatttctttcaagcaactaaaaaatatatggtaatttaaaggtgtctgcttatttggttgaacaatttaattgggaaagtttgtcatcatttgaaaaaggaaatataaaaggaacaaccatatagccaacctgtggtctggcagaaacaacgtctctagcaatagtaccaaagtaagtaatggagtcttttttttggcaggtctgcagtaaaagataacattttcttttcttagtcctcctgctctcaacccccatattttgcctttgaatacgtgggttttagtatatatagcccaaaatggtaactgtctccagaacagcaaccacattgaattcttgtgacttaggaaagcttcttatagttgctgacattaattgcaagaaataactatatactactttgagaagtaaacatgtcaaaaaaaacaaagttcagatatgggacaaaatttaaaaattcagtaacatttataaacagaattgaatgaaaagagttacagaccaacttaaacatcaattcgtgtcagtaaactgacttttgggggtaatgatcattgttttgtatctcaaaagtattgagtttagaaatcagttgtatgatactacctttgtatgtctgtcttttcccgtgtatttttaaataactggtgatctataatttaataaaatttttcgttggtgtaatatt

SEQ ID NO: 3858 - protein, 153 aa, Homo sapiens; identical to SEQ ID NO: 346

SEQ ID NO: 3859 - DNA, 726 bp, Homo sapiens
aggattgcattataatacatgtaaaatgcctgacattcagaagttttaatcacagctatcacacaaaaagccaactgagatgtacctgtatacagtgtccatatttctcaaaatgtatttttgaccaacagatattttctggcaagtttctatacgaagtatgatccaactcacttcatcctaaacacagcttctctcctgagtgtactaattcccaaaatgccacaactacatggtgttcggatctttggaattaataagtattgaaatgttttgaaactgaaaaaaaattttacagctactgaatttcttataaggaaggagtggttagtaaactgcactgtttctgtgataatgtgaaatgagaagtatttacattggagggccaatggctggtccttcaagtgctgttttgaagtgcagatttccattaaatgatgcctctgtttaatacacctggtacatttctgaagaggggctttataagcaggctgggcaggcccagcttataagttaaagggcatcacagtgagggtgtagtagataaattcaaggaaataagagatttgtaagaaactaggaccagcttaacttataatgaatgggcattgtgttaagaaaagaacatttccagtcattcagctgtggttatttaaagcagacttacatgtaaaccggaatcctctctatacaagtttattaaagattatttttattaccgtacat

SEQ ID NO: 3860 - protein, 42 aa, Homo sapiens
MNGHCVKKRTFPVIQLWLFKADLHVNRNPLYTSLLKIIFITV

SEQ ID NO: 3861 - DNA, 1422 bp, Homo sapiens
gagcgctcgggctgtcggtctagcaggggggactcccctgaggggccgctgcgggtcgccgtcttcggaggcaccggcgagggcagagccaacagcctcttcacggtgttcttcaggacagttttattttaagcaattcttagtctcaagtaaacaccatcattaaaagaactgagaactattatcaattcttcctttggagtccatcttcaatggaaaggagaagggaaaaccttttttaaaaagaagaaagaaaactgaagtttttgatttgactagagaaatattcagaagactccttattttcacctagtttaatcacaaaattgagaaacaaacattatcccttgaccatgtaaattttacaccacattatgtcaacagcatgtaccttccacattgagtattcagaaagaagtgatctgaactctgaccattctttatggatacattaagtcaaatataagagtctgactacttgacacactggctcgagcaaacatgaacgttggagttgcccacagtgaagtgaatccaaatacccgtgtcatgaacagccggggtatgtggctgacatatgcattgggagttggcttgcttcatattgtcttactcagcattcccttcttcagtgttcctgttgcttggactttaacaaatattatacataatctggggatgtacgtatttttgcatgcagtgaaaggaacacctttcgaaactcctgaccagggtaaagcaaggctcctaactcattgggaacaactggactatggagtacagtttacatcttcacggaagtttttcacaatttctccaataattctatattttctggcaagtttctatacgaagtatgatccaactcacttcatcctaaacacagcttctctcctgagtgtactaattcccaaaatgccacaactacatggtgttcggatctttggaattaataagtattgaaatgttttgaaactgaaaaaaaattttacagctactgaatttcttataaggaaggagtggttagtaaactgcactgtttctgtgataatgtgaaatgagaagtatttacattggagggccaatggctggtccttcaagtgctgttttgaagtgcagatttccattaaatgatgcctctgtttaatacacctggtacatttctgaagaggggctttataagcaggctgggcaggcccagcttataagttaaagggcatcacagtgagggtgtagtagataaattcaaggaaataagagatttgtaagaaactaggaccagcttaacttataatgaatgggcattgtgttaagaaaagaacatttccagtcattcagctgtggttatttaaagcagacttacatgtaaaccggaatcctctctatacaagtttattaaagattatttttattaccgtacat

SEQ ID NO: 3862 - protein, 153 aa, Homo sapiens; identical to SEQ ID NO: 346

SEQ ID NO: 3863 - DNA, 2343 bp, Homo sapiens
cagcggcggcttttgctgagttttctctggcccagagcgctcgggctgtcggtctagcaggggggactcccctgaggggccgctgcgggtcgccgtcttcggaggcaccggcgagggcagagccaacagcctcttcacggtctgtaaggtcattgtttgccagtcgtgggcagcgcggcaaacctgctgggaaaaggttttctggttggaataggatgagtaccgcaccagctttgccttccagctgagatgtaaatttcaggcctccatcctgtggaacgtgggaaaactatcttgagtgttggcatgttctaagtatgacataatagtttaatgtatgataaatcatgggtgtttagacgaaagatttacacatataaattggaggctttagcggtcttagtgtaactaacttttcgtccccttaacccttgatgcctgttctatgggtctctagagcggaaggagcattatactccggaaacatttgctggaaggggttatgagaaattcctctctgtatgctaactccgtaatacaagcgtttgtgtattttaaaatcacagctgttccaaatataatctagcctcgttttccccctccgtcggatgataggtgttcttcaggacagttttattttaagcaattcttagtctcaagtaaacaccatcattaaaagaactgagaactattatcaattcttcctttggagtccatcttcaatggaaaggagaagggaaaaccttttttaaaaagaagaaagaaaactgaagtttttgatttgactagagaaatattcagaagactccttattttcacctagtttaatcacaaaattgagaaacaaacattatcccttgaccatgtaaattttacaccacattatgtcaacagcatgtaccttccacattgagtattcagaaagaagtgatctgaactctgaccattctttatggatacattaagtcaaatataagagtctgactacttgacacactggctcggtgagttctgctttttctttttaatataaatttattatgttggtaaatttagcttttggcttttcactttgctctcatgatataagaaaatgtaggttttctctttcagtttgaattttcctattcagtaaaacaacatgctagaaaacaaacttttggaaaggcattgtaactattttttcaaatagaaccataataacaagtcttgtcttaccctaaagtcaaatgctgaagattctttactgctgtcatcagcatctacaagtagcatattttggatggtgtttgtgtgctacttcaaagtaactaggaaaaaataatcctcgcaacacaggtaccttgtcatgtcagaattgggggtgttaggttgccagttgtatcagtgttgattcatttcattacttcctacagagcaaacatgaacgttggagttgcccacagtgaagtgaatccaaatacccgtgtcatgaacagccggggtatgtggctgacatatgcattgggagttggcttgcttcatattgtcttactcagcattcccttcttcagtgttcctgttgcttggactttaacaaatattatacataatctggggatgtacgtatttttgcatgcagtgaaaggaacacctttcgaaactcctgaccagggtaaagcaaggctcctaactcattgggaacaactggactatggagtacagtttacatcttcacggaagtttttcacaatttctccaataattctatattttctggcaagtttctatacgaagtatgatccaactcacttcatcctaaacacagcttctctcctgagtgtactaattcccaaaatgccacaactacatggtgttcggatctttggaattaataagtattgaaatgttttgaaactgaaaaaaaattttacagctactgaatttcttataaggaaggagtggttagtaaactgcactgtttctgtgataatgtgaaatgagaagtatttacattggagggccaatggctggtccttcaagtgctgttttgaagtgcagatttccattaaatgatgcctctgtttaatacacctggtacatttctgaagaggggctttataagcaggctgggcaggcccagcttataagttaaagggcatcacagtgagggtgtagtagataaattcaaggaaataagagatttgtaagaaactaggaccagcttaacttataatgaatgggcattgtgttaagaaaagaacatttccagtcattcagctgtggttatttaaagcagacttacatgtaaaccggaatcctctctatacaagtttattaaagattatttttattaccgtacat

SEQ ID NO: 3864 - protein, 153 aa, Homo sapiens; identical to SEQ ID NO: 346

SEQ ID NO: 3865 - DNA, 1101 bp, Homo sapiens
atccgcggccgtagcagccgggctggtcctgctgcgagccggcggcccggagtggggcggcggcatgtaccttccacattgagtattcagaaagaagtgatctgaactctgaccattctttatggatacattaagtcaaatataagagtctgactacttgacacactggctcgagcaaacatgaacgttggagttgcccacagtgaagtgaatccaaatacccgtgtcatgaacagccggggtatgtggctgacatatgcattgggagttggcttgcttcatattgtcttactcagcattcccttcttcagtgttcctgttgcttggactttaacaaatattatacataatctggggatgtacgtatttttgcatgcagtgaaaggaacacctttcgaaactcctgaccagggtaaagcaaggctcctaactcattgggaacaactggactatggagtacagtttacatcttcacggaagtttttcacaatttctccaataattctatattttctggcaagtttctatacgaagtatgatccaactcacttcatcctaaacacagcttctctcctgagtgtactaattcccaaaatgccacaactacatggtgttcggatctttggaattaataagtattgaaatgttttgaaactgaaaaaaaattttacagctactgaatttcttataaggaaggagtggttagtaaactgcactgtttctgtgataatgtgaaatgagaagtatttacattggagggccaatggctggtccttcaagtgctgttttgaagtgcagatttccattaaatgatgcctctgtttaatacacctggtacatttctgaagaggggctttataagcaggctgggcaggcccagcttataagttaaagggcatcacagtgagggtgtagtagataaattcaaggaaataagagatttgtaagaaactaggaccagcttaacttataatgaatgggcattgtgttaagaaaagaacatttccagtcattcagctgtggttatttaaagcagacttacatgtaaaccggaatcctctctatacaagtttattaaagattatttttattaccgtacat

SEQ ID NO: 3866 - protein, 153 aa, Homo sapiens; identical to SEQ ID NO: 346

SEQ ID NO: 3867 - DNA, 1388 bp, Homo sapiens
ggcgtgtatccgcggccgtagcagccgggctggtcctgctgcgagccggcggcccggagtggggcggcgggtaagtgggcacgaacgcggtggacgctgtacagtcgccttcgtcggtagggaactgctggcggcctaggggtcgtcctgagagggaaaagcgggctccggctgcatctgcggcgccctgcgtggccgtaagagccaagtggcctcagaggctcgccccctacgcaaatcctcgttgtcttgccagggtcctgacgtgacgtgcggccgcgagaaggaaggggcgggttgggggaggcgctgaggtggtagcagcggcggcttttgctgagttttctctggcccagagcgctcgggctgtcggtctagcaggggggactcccctgaggggccgctgcgggtcgccgtcttcggaggcaccggcgagggcagagccaacagcctcttcacgagcaaacatgaacgttggagttgcccacagtgaagtgaatccaaatacccgtgtcatgaacagccggggtatgtggctgacatatgcattgggagttggcttgcttcatattgtcttactcagcattcccttcttcagtgttcctgttgcttggactttaacaaatattatacataatctggggatgtacgtatttttgcatgcagtgaaaggaacacctttcgaaactcctgaccagggtaaagcaaggctcctaactcattgggaacaactggactatggagtacagtttacatcttcacggaagtttttcacaatttctccaataattctatattttctggcaagtttctatacgaagtatgatccaactcacttcatcctaaacacagcttctctcctgagtgtactaattcccaaaatgccacaactacatggtgttcggatctttggaattaataagtattgaaatgttttgaaactgaaaaaaaattttacagctactgaatttcttataaggaaggagtggttagtaaactgcactgtttctgtgataatgtgaaatgagaagtatttacattggagggccaatggctggtccttcaagtgctgttttgaagtgcagatttccattaaatgatgcctctgtttaatacacctggtacatttctgaagaggggctttataagcaggctgggcaggcccagcttataagttaaagggcatcacagtgagggtgtagtagataaattcaaggaaataagagatttgtaagaaactaggaccagcttaacttataatgaatgggcattgtgttaagaaaagaacatttccagtcattcagctgtggttatttaaagcagacttacatgtaaaccggaatcctctctatacaagtttattaaagattatttttattaccgtacat

SEQ ID NO: 3868 - protein, 153 aa, Homo sapiens; identical to SEQ ID NO: 346

SEQ ID NO: 3869 - DNA, 1569 bp, Homo sapiens
ctgagggcgtgtatccgcggccgtagcagccgggctggtcctgctgcgagccggcggcccggagtggggcggcgggtaagtgggcacgaacgcggtggacgctgtacagtcgccttcgtcggtagggaactgctggcggcctaggggtcgtcctgagagggaaaagcgggctccggctgcatctgcggcgccctgcgtggccgtaagagccaagtggcctcagaggctcgccccctacgcaaatcctcgttgtcttgccagggtcctgacgtgacgtgcggccgcgagaaggaaggggcgggttgggggaggcgctgaggtggtagcagcggcggcttttgctgagttttctctggcccagagcgctcgggctgtcggtctagcaggggggactcccctgaggggccgctgcgggtcgccgtcttcggaggcaccggcgagggcagagccaacagcctcttcacggtctgtaaggtcattgtttgccagtcgtgggcagcgcggcaaacctgctgggaaaaggttttctggttggaataggatgagtaccgcaccagctttgccttccagctgagatgtaaatttcaggcctccatcctgtggaacgtgggaaaactatcttgagtgttggcatgttctaaagcaaacatgaacgttggagttgcccacagtgaagtgaatccaaatacccgtgtcatgaacagccggggtatgtggctgacatatgcattgggagttggcttgcttcatattgtcttactcagcattcccttcttcagtgttcctgttgcttggactttaacaaatattatacataatctggggatgtacgtatttttgcatgcagtgaaaggaacacctttcgaaactcctgaccagggtaaagcaaggctcctaactcattgggaacaactggactatggagtacagtttacatcttcacggaagtttttcacaatttctccaataattctatattttctggcaagtttctatacgaagtatgatccaactcacttcatcctaaacacagcttctctcctgagtgtactaattcccaaaatgccacaactacatggtgttcggatctttggaattaataagtattgaaatgttttgaaactgaaaaaaaattttacagctactgaatttcttataaggaaggagtggttagtaaactgcactgtttctgtgataatgtgaaatgagaagtatttacattggagggccaatggctggtccttcaagtgctgttttgaagtgcagatttccattaaatgatgcctctgtttaatacacctggtacatttctgaagaggggctttataagcaggctgggcaggcccagcttataagttaaagggcatcacagtgagggtgtagtagataaattcaaggaaataagagatttgtaagaaactaggaccagcttaacttataatgaatgggcattgtgttaagaaaagaacatttccagtcattcagctgtggttatttaaagcagacttacatgtaaaccggaatcctctctatacaagtttattaaagattatttttattaccgtacat

SEQ ID NO: 3870 - protein, 153 aa, Homo sapiens; identical to SEQ ID NO: 346

SEQ ID NO: 3871 - DNA, 1021 bp, Homo sapiens
agctgcgcagcgccgggcctgagggcgtgtatccgcggccgtagcagccgggctggtcctgctgcgagccggcggcccggagtggggcggcggagcaaacatgaacgttggagttgcccacagtgaagtgaatccaaatacccgtgtcatgaacagccggggtatgtggctgacatatgcattgggagttggcttgcttcatattgtcttactcagcattcccttcttcagtgttcctgttgcttggactttaacaaatattatacataatctggggatgtacgtatttttgcatgcagtgaaaggaacacctttcgaaactcctgaccagggtaaagcaaggctcctaactcattgggaacaactggactatggagtacagtttacatcttcacggaagtttttcacaatttctccaataattctatattttctggcaagtttctatacgaagtatgatccaactcacttcatcctaaacacagcttctctcctgagtgtactaattcccaaaatgccacaactacatggtgttcggatctttggaattaataagtattgaaatgttttgaaactgaaaaaaaattttacagctactgaatttcttataaggaaggagtggttagtaaactgcactgtttctgtgataatgtgaaatgagaagtatttacattggagggccaatggctggtccttcaagtgctgttttgaagtgcagatttccattaaatgatgcctctgtttaatacacctggtacatttctgaagaggggctttataagcaggctgggcaggcccagcttataagttaaagggcatcacagtgagggtgtagtagataaattcaaggaaataagagatttgtaagaaactaggaccagcttaacttataatgaatgggcattgtgttaagaaaagaacatttccagtcattcagctgtggttatttaaagcagacttacatgtaaaccggaatcctctctatacaagtttattaaagattatttttattaccgtacat

SEQ ID NO: 3872 - protein, 153 aa, Homo sapiens; identical to SEQ ID NO: 346

SEQ ID NO: 3873 - DNA, 1145 bp, Homo sapiens
gagcgctcgggctgtcggtctagcaggggggactcccctgaggggccgctgcgggtcgccgtcttcggaggcaccggcgagggcagagccaacagcctcttcacggtgttcttcaggacagttttattttaagcaattcttagtctcaagtaaacaccatcattaaaagaactgagaactattatcaattcttcctttggagtccatcttcaatggaaaggagaagggaaaaccttttttaaaaagaagaaagaaaactgaagtttttgatttgactagagaaatattcagaagactccttattttcacctagtttaatcacaaaattgagaaacaaacattatcccttgaccatgtaaattttacaccacattatgtcaacagcatgtaccttccacattgagtattcagaaagaagtgatctgaactctgaccattctttatggatacattaagtcaaatataagagtctgactacttgacacactggctcgagcaaacatgaacgttggagttgcccacagtgaagtgaatccaaatacccgtgtcatgaacagccggggtatgtggctgacatatgcattgggagttggcttgcttcatattgtcttactcagcattcccttcttcagtgttcctgttgcttggactttaacaaatattatacataatctggggatgtacgtatttttgcatgcagtgaaaggaacacctttcgaaactcctgaccagggtaaagcaaggctcctaactcattgggaacaactggactatggagtacagtttacatcttcacggaagtttttcacaatttctccaataattctatattttctggcaagtttctatacgaagtatgatccaactcacttcatcctaaacacagcttctctcctgagtgtactaattcccaaaatgccacaactacatggtgttcggatctttggaattaataagtattgaaatgttttgaaactgaaaaaaaattttacagctactgaatttcttataaggaaggagtggttagtaaactgcactgtttctgtgataatgtgaaatgagaagtatttacattggagggccaatggctggtccttcaagtgctgttttgaagtgcagatttccattaaatgatgcctctgttt

SEQ ID NO: 3874 - protein, 153 aa, Homo sapiens; identical to SEQ ID NO: 346

SEQ ID NO: 3875 - DNA, 824 bp, Homo sapiens
atccgcggccgtagcagccgggctggtcctgctgcgagccggcggcccggagtggggcggcggcatgtaccttccacattgagtattcagaaagaagtgatctgaactctgaccattctttatggatacattaagtcaaatataagagtctgactacttgacacactggctcgagcaaacatgaacgttggagttgcccacagtgaagtgaatccaaatacccgtgtcatgaacagccggggtatgtggctgacatatgcattgggagttggcttgcttcatattgtcttactcagcattcccttcttcagtgttcctgttgcttggactttaacaaatattatacataatctggggatgtacgtatttttgcatgcagtgaaaggaacacctttcgaaactcctgaccagggtaaagcaaggctcctaactcattgggaacaactggactatggagtacagtttacatcttcacggaagtttttcacaatttctccaataattctatattttctggcaagtttctatacgaagtatgatccaactcacttcatcctaaacacagcttctctcctgagtgtactaattcccaaaatgccacaactacatggtgttcggatctttggaattaataagtattgaaatgttttgaaactgaaaaaaaattttacagctactgaatttcttataaggaaggagtggttagtaaactgcactgtttctgtgataatgtgaaatgagaagtatttacattggagggccaatggctggtccttcaagtgctgttttgaagtgcagatttccattaaatgatgcctctgttt

SEQ ID NO: 3876 - protein, 153 aa, Homo sapiens; identical to SEQ ID NO: 346

SEQ ID NO: 3877 - DNA, 1292 bp, Homo sapiens
ctgagggcgtgtatccgcggccgtagcagccgggctggtcctgctgcgagccggcggcccggagtggggcggcgggtaagtgggcacgaacgcggtggacgctgtacagtcgccttcgtcggtagggaactgctggcggcctaggggtcgtcctgagagggaaaagcgggctccggctgcatctgcggcgccctgcgtggccgtaagagccaagtggcctcagaggctcgccccctacgcaaatcctcgttgtcttgccagggtcctgacgtgacgtgcggccgcgagaaggaaggggcgggttgggggaggcgctgaggtggtagcagcggcggcttttgctgagttttctctggcccagagcgctcgggctgtcggtctagcaggggggactcccctgaggggccgctgcgggtcgccgtcttcggaggcaccggcgagggcagagccaacagcctcttcacggtctgtaaggtcattgtttgccagtcgtgggcagcgcggcaaacctgctgggaaaaggttttctggttggaataggatgagtaccgcaccagctttgccttccagctgagatgtaaatttcaggcctccatcctgtggaacgtgggaaaactatcttgagtgttggcatgttctaaagcaaacatgaacgttggagttgcccacagtgaagtgaatccaaatacccgtgtcatgaacagccggggtatgtggctgacatatgcattgggagttggcttgcttcatattgtcttactcagcattcccttcttcagtgttcctgttgcttggactttaacaaatattatacataatctggggatgtacgtatttttgcatgcagtgaaaggaacacctttcgaaactcctgaccagggtaaagcaaggctcctaactcattgggaacaactggactatggagtacagtttacatcttcacggaagtttttcacaatttctccaataattctatattttctggcaagtttctatacgaagtatgatccaactcacttcatcctaaacacagcttctctcctgagtgtactaattcccaaaatgccacaactacatggtgttcggatctttggaattaataagtattgaaatgttttgaaactgaaaaaaaattttacagctactgaatttcttataaggaaggagtggttagtaaactgcactgtttctgtgataatgtgaaatgagaagtatttacattggagggccaatggctggtccttcaagtgctgttttgaagtgcagatttccattaaatgatgcctctgttt

SEQ ID NO: 3878 - protein, 153 aa, Homo sapiens; identical to SEQ ID NO: 346

SEQ ID NO: 3879 - DNA, 736 bp, Homo sapiens
agcgccgggcctgagggcgtgtatccgcggccgtagcagccgggctggtcctgctgcgagccggcggcccggagtggggcggcggagcaaacatgaacgttggagttgcccacagtgaagtgaatccaaatacccgtgtcatgaacagccggggtatgtggctgacatatgcattgggagttggcttgcttcatattgtcttactcagcattcccttcttcagtgttcctgttgcttggactttaacaaatattatacataatctggggatgtacgtatttttgcatgcagtgaaaggaacacctttcgaaactcctgaccagggtaaagcaaggctcctaactcattgggaacaactggactatggagtacagtttacatcttcacggaagtttttcacaatttctccaataattctatattttctggcaagtttctatacgaagtatgatccaactcacttcatcctaaacacagcttctctcctgagtgtactaattcccaaaatgccacaactacatggtgttcggatctttggaattaataagtattgaaatgttttgaaactgaaaaaaaattttacagctactgaatttcttataaggaaggagtggttagtaaactgcactgtttctgtgataatgtgaaatgagaagtatttacattggagggccaatggctggtccttcaagtgctgttttgaagtgcagatttccattaaatgatgcctctgttt

SEQ ID NO: 3880 - protein, 153 aa, Homo sapiens; identical to SEQ ID NO: 346

SEQ ID NO: 3881 - DNA, 1254 bp, Homo sapiens
gcagccgggctggtcctgctgcgagccggcggcccggagtggggcggcggagcaaacatgaacgttggagttgcccacagtgaagtgaatccaaatacccgtgtcatgaacagccggggtatgtggctgacatatgcattgggagttggcttgcttcatattgtcttactcagcattcccttcttcagtgttcctgttgcttggactttaacaaatattatacataatctggggatgtacgtatttttgcatgcagtgaaaggaacacctttcgaaactcctgaccagggtaaagcaaggctcctaactcattgggaacaactggactatggagtacagtttacatcttcacggaagtttttcacaatttctccaataattctgtaagtggcagaaatttttaggtatgaggaggattggataagaggaagatatcttttcatcagattgaattggaattagaaacatattttgttgcaaacttctatcaataagtagcacctcggatagaacataaaatatagacaaaatttttaacaagttgataataaactaattttcacttcagtcagtacatatacggagacaatattacatgctaatcagtgcacctagacatttaggatatacaggtcaaatgtattccagctcccgtccttaggtttcatataaggacacaaaatacataatcatattctatattgcactgtcagattaatctccttaagcaatgatttagataatgagaagaatttcactggccacctatcctattaagatattcagactccttgggaaagagtatggtttcgaaaaaagtaggtcaggctttcattataggatagacctgggtggagtcctatatatatcactcagccagcttggtttgctcatatataaaattctagctagtgatacctaattcaatcctaatgctgtaagaaataaatgagataataatctacctggatagcatgtaacctgtatctggtatctaatttctttctcctatctgatgttctgggccttccagaaaatagttcttacctccttttcccttgatgtaaatattttatccccacccaactcctacctggccttctaagcagcatttcttgaatatttcatgtgtagtcctatttctgtctttgttcaaatcagttcaaatcatatctcctacctgaaatgcctcctccttttttccccagctttactgaggtataattgacaaataaaaaaatgtatatatgtttt

SEQ ID NO: 3882 - protein, 109 aa, Homo sapiens
MNVGVAHSEVNPNTRVMNSRGMWLTYALGVGLLHIVLLSIPFFSVPVAWTLTNIIHNLGMYVFLHAVKGTPFETPDQGKARLLTHWEQLDYGVQFTSSRKFFTISPIIL

SEQ ID NO: 3883 - DNA, 1083 bp, Homo sapiens
cgtcaggaccctggcaagacaacgaggatttgcgtagggggcgagcctctgaggccacttggctcttacggccacgcagggcgccgcagatgcagccggagcccgcttttccctctcaggacgacccctaggccgccagcagttccctaccgacgaaggcgactgtacagcgtccaccgcgttcgtgcccacttacccgccgccccactccgggccgccggctcgcagcaggaccagcccggctgctacggccgcggatacacgccctcaggcccggcgctgcgcagcttgcggaagctttcccggacagactcgctgccagcggattggctgcgagcagcgccaatctcacgttgcccccgggcgaggcgggactcagtgccgcgctctctgcacccgctctgccgcgcgcgtgcgtgctgggtgcgggtgcgggtgcggggttgggcctgcgcatcgggtgagacgctggctgcttgcggctagtggatggtaattgcctgcctcgcgctagcaggaaggcacacctgttgtccttaactgactttccgggtcatcagcacttcttcagaagtgttccttttccctcccagcaaatatggaagactgactatcctgatattcccagacattctttgctgtgatttctgctctgttaaaagcgaaaatgaaacaattgcctgcggcaacagttcgactcctttcaagttctcagatcatcacttcggtggtcagtgttgtaaaagagcttattgaaaactccttggatgctggtgccacaagcgtagatgttaaactggagaactatggatttgataaaattgaggtgcgagataacggggagggtatcaaggctgttgatgcacctgtaatggcaatgaagtactacacctcaaaaataaatagtcatgaagatcttgaaaatttgacaacttacggttttcgtggagaagccttggggtcaatttgttgtatagctgaggttttaattacaacaagaacggctgctgataattttagcacccagtatgttttagatggcagtggccacatactttctcagaaaccttcacatcttggtca

SEQ ID NO: 3884 - protein, 137 aa, Homo sapiens
MKQLPAATVRLLSSSQIITSVVSVVKELIENSLDAGATSVDVKLENYGFDKIEVRDNGEGIKAVDAPVMAMKYYTSKINSHEDLENLTTYGFRGEALGSICCIAEVLITTRTAADNFSTQYVLDGSGHILSQKPSHL

SEQ ID NO: 3885 - DNA, 2256 bp, Homo sapiens
cgtcaggaccctggcaagacaacgaggatttgcgtagggggcgagcctctgaggccacttggctcttacggccacgcagggcgccgcagatgcagccggagcccgcttttccctctcaggacgacccctaggccgccagcagttccctaccgacgaaggcgactgtacagcgtccaccgcgttcgtgcccacttacccgccgccccactccgggccgccggctcgcagcaggaccagcccggctgctacggccgcggatacacgccctcaggcccggcgctgcgcagcttgcggaagctttcccggacagactcgctgccagcggattggctgcgagcagcgccaatctcacgttgcccccgggcgaggcgggactcagtgccgcgctctctgcacccgctctgccgcgcgcgtgcgtgctgggtgcgggtgcgggtgcggggttgggcctgcgcatcgggtgagacgctggctgcttgcggctagtggatggtaattgcctgcctcgcgctagcaggaagctgctctgttaaaagcgaaaatgaaacaattgcctgcggcaacagttcgactcctttcaagttctcagatcatcacttcggtggtcagtgttgtaaaagagcttattgaaaactccttggatgctggtgccacaagcgtagatgttaaactggagaactatggatttgataaaattgaggtgcgagataacggggagggtatcaaggctgttgatgcacctgtaatggcaatgaagtactacacctcaaaaataaatagtcatgaagatcttgaaaatttgacaacttacggttttcgtggagaagccttggggtcaatttgttgtatagctgaggttttaattacaacaagaacggctgctgataattttagcacccagtatgttttagatggcagtggccacatactttctcagaaaccttcacatcttggtcaaggtaagaaagtagctttgtatacaaacattctttaccttttctgtcttaattgttggtttaaaaaaaaaaagttactcggtgaatacaaatatattgctttgggcttggtcctgataaaggctagttaacttccaagtaaacattcagcctttattctagccaccaatttcttaaatatttagaattgttctcaaaaggaactgtatgagagactggacacttccatggactagttactcctctgtaaaaactaagagtatttattttaccagtgctggattaccagtgtcatcttcatatatgaagaagattaaaattttattgaaacatataaaacataattgatttggtaatagtggaaataaacgataccatcaagatatgattaaataatttaaaatctatttgttaattgatggaaaacttcaaacatgcataagaagttactgtacttatcactcagtttcaataatttatcaattcattgctaaagttctttcatgtaataccctcgcccatttcttccctttctatattactttgaagcaaatacgtattgtttctacttgtaatgtagttagtgttttatatacttttatgtaatattattacattttaattgatatcttatgttttttattttattttattttattttcctgagacagggtctcactctgtcacacaggctggactgcagtggcatcatcttggttcactgcaacctctgcctcccaggctcaagtgatcctcccacctcagcctcctcagtagctgggactacaggtgcataccaccacacccggctaatttttgtatttttagtagagacagggttttgctgtgttgcccagctggcctcgaactcctgagcccaagcgatacacctgccttggcctcccagagtgctgagattacagatgtgagccactgtgttcagctgataagtgtttaaatttctctaaaaactatttacttataaaggtaaaaaagatctctttaggcttcagtttcacatatctcctttaatctttttttaataatttctagtgatgggatgattaagagactattaaagctattacctctttagagtcatgttcaaaataattattagatctgaaaagggacttgtgggttttgttgttgttgtttatccttctgcttctccaatttgtgttgtaaattcatgtttaattttgtgttccctcattgcagtttatcaaagtacattctgtatattttctgtggtttttttccttcagttttaatattaaattattggattctttttttc

SEQ ID NO: 3886 - protein, 181 aa, Homo sapiens
MKQLPAATVRLLSSSQIITSVVSVVKELIENSLDAGATSVDVKLENYGFDKIEVRDNGEGIKAVDAPVMAMKYYTSKINSHEDLENLTTYGFRGEALGSICCIAEVLITTRTAADNFSTQYVLDGSGHILSQKPSHLGQGKKVALYTNILYLFCLNCWFKKKKLLGEYKYIALGLVLIKAS

SEQ ID NO: 3887 - DNA, 3235 bp, Homo sapiens
cgtcaggaccctggcaagacaacgaggatttgcgtagggggcgagcctctgaggccacttggctcttacggccacgcagggcgccgcagatgcagccggagcccgcttttccctctcaggacgacccctaggccgccagcagttccctaccgacgaaggcgactgtacagcgtccaccgcgttcgtgcccacttacccgccgccccactccgggccgccggctcgcagcaggaccagcccggctgctacggccgcggatacacgccctcaggcccggcgctgcgcagcttgcggaagctttcccggacagactcgctgccagcggattggctgcgagcagcgccaatctcacgttgcccccgggcgaggcgggactcagtgccgcgctctctgcacccgctctgccgcgcgcgtgcgtgctgggtgcgggtgcgggtgcggggttgggcctgcgcatcgggtgagacgctggctgcttgcggctagtggatggtaattgcctgcctcgcgctagcaggaagctgctctgttaaaagcgaaaatgaaacaattgcctgcggcaacagttcgactcctttcaagttctcagatcatcacttcggtggtcagtgttgtaaaagagcttattgaaaactccttggatgctggtgccacaagcgtagatgttaaactggagaactatggatttgataaaattgaggtgcgagataacggggagggtatcaaggctgttgatgcacctgtaatggcaatgaagtactacacctcaaaaataaatagtcatgaagatcttgaaaatttgacaacttacggttttcgtggagaagccttggggtcaatttgttgtatagctgaggttttaattacaacaagaacggctgctgataattttagcacccagtatgttttagatggcagtggccacatactttctcagaaaccttcacatcttggtcaaggtacaactgtaactgctttaagattatttaagaatctacctgtaagaaagcagttttactcaactgcaaaaaaatgtaaagatgaaataaaaaagatccaagatctcctcatgagctttggtatccttaaacctgacttaaggattgtctttgtacataacaaggcagttatttggcagaaaagcagagtatcagatcacaagatggctctcatgtcagttctggggactgctgttatgaacaatatggaatcctttcagtaccactctgaagaatctcagatttatctcagtggatttcttccaaagtgtgatgcagaccactctttcactagtctttcaacaccagaaagaagtttcatcttcataaacagtcgaccagtacatcaaaaagatatcttaaagttaatccgacatcattacaatctgaaatgcctaaaggaatctactcgtttgtatcctgttttctttctgaaaatcgatgttcctacagctgatgttgatgtaaatttaacaccagataaaagccaagtattattacaaaataaggaatctgttttaattgctcttgaaaatctgatgacgacttgttatggaccattacctagtacaaattcttatgaaaataataaaacagatgtttccgcagctgacatcgttcttagtaaaacagcagaaacagatgtgctttttaataaagtggaatcatctggaaagaattattcaaatgttgatacttcagtcattccattccaaaatgatatgcataatgatgaatctggaaaaaacactgatgattgtttaaatcaccagataagtattggtgactttggttatggtcattgtagtagtgaaatttctaacattgataaaaacactaagaatgcatttcaggacatttcaatgagtaatgtatcatgggagaactctcagacggaatatagtaaaacttgttttataagttccgttaagcacacccagtcagaaaatggcaataaagaccatatagatgagagtggggaaaatgaggaagaagcaggtcttgaaaactcttcggaaatttctgcagatgagtggagcaggggaaatatacttaaaaattcagtgggagagaatattgaacctgtgaaaattttagtgcctgaaaaaagtttaccatgtaaagtaagtaataataattatccaatccctgaacaaatgaatcttaatgaagattcatgtaacaaaaaatcaaatgtaatagataataaatctggaaaagttacagcttatgatttacttagcaatcgagtaatcaagaaacccatgtcagcaagtgctctttttgttcaagatcatcgtcctcagtttctcatagaaaatcctaagactagtttagaggatgcaacactacaaattgaagaactgtggaagacattgagtgaagaggaaaaactgaaatatgaagagaaggctactaaagacttggaacgatacaatagtcaaatgaagagagccattgaacaggagtcacaaatgtcactaaaagatggcagaaaaaagataaaacccaccagcgcatggaatttggcccagaagcacaagttaaaaacctcattatctaatcaaccaaaacttgatgaactccttcagtcccaaattgaaaaaagaaggagtcaaaatattaaaatggtacagatccccttttctatgaaaaacttaaaaataaattttaagaaacaaaacaaagttgacttagaagagaaggatgaaccttgcttgatccacaatctcaggtttcctgatgcatggctaatgacatccaaaacagaggtaatgttattaaatccatatagagtagaagaagccctgctatttaaaagacttcttgagaatcataaacttcctgcagagccactggaaaagccaattatgttaacagagaggtatgatgatacaatactttttaagagtaaaaatatttattataatagttcatactagattaaaatcgaaggtagaaggttgggaatgtttcctagtaaggattagtggtatttatttattttaatcttttaaacatttgatttctaggccgggcgcagtggctcatgcctgtaatcccagcactttgggaggccaaggtgggtggatcacgaggtcaggagtttgagaccagcctggccaacatagtgaaaccctgtctctactaaaaatacaaaagttagccgggtgtgatggcacgcacctgtagtcccagctacttgggaggctgaggcaggagaatcgcttgaacct

SEQ ID NO: 3888 - protein, 799 aa, Homo sapiens [sequence omitted]

SEQ ID NO: 3889 - DNA, 3545 bp, Homo sapiens
cgtcaggaccctggcaagacaacgaggatttgcgtagggggcgagcctctgaggccacttggctcttacggccacgcagggcgccgcagatgcagccggagcccgcttttccctctcaggacgacccctaggccgccagcagttccctaccgacgaaggcgactgtacagcgtccaccgcgttcgtgcccacttacccgccgccccactccgggccgccggctcgcagcaggaccagcccggctgctacggccgcggatacacgccctcaggcccggcgctgcgcagcttgcggaagctttcccggacagactcgctgccagcggattggctgcgagcagcgccaatctcacgttgcccccgggcgaggcgggactcagtgccgcgctctctgcacccgctctgccgcgcgcgtgcgtgctgggtgcgggtgcgggtgcggggttgggcctgcgcatcgggtgagacgctggctgcttgcggctagtggatggtaattgcctgcctcgcgctagcaggaagctgctctgttaaaagcgaaaatgaaacaattgcctgcggcaacagttcgactcctttcaagttctcagatcatcacttcggtggtcagtgttgtaaaagagcttattgaaaactccttggatgctggtgccacaagcgtagatgttaaactggagaactatggatttgataaaattgaggtgcgagataacggggagggtatcaaggctgttgatgcacctgtaatggcaatgaagtactacacctcaaaaataaatagtcatgaagatcttgaaaatttgacaacttacggttttcgtggagaagccttggggtcaatttgttgtatagctgaggttttaattacaacaagaacggctgctgataattttagcacccagtatgttttagatggcagtggccacatactttctcagaaaccttcacatcttggtcaaggtacaactgtaactgctttaagattatttaagaatctacctgtaagaaagcagttttactcaactgcaaaaaaatgtaaagatgaaataaaaaagatccaagatctcctcatgagctttggtatccttaaacctgacttaaggattgtctttgtacataacaaggcagttatttggcagaaaagcagagtatcagatcacaagatggctctcatgtcagttctggggactgctgttatgaacaatatggaatcctttcagtaccactctgaagaatctcagatttatctcagtggatttcttccaaagtgtgatgcagaccactctttcactagtctttcaacaccagaaagaagtttcatcttcataaacagtcgaccagtacatcaaaaagatatcttaaagttaatccgacatcattacaatctgaaatgcctaaaggaatctactcgtttgtatcctgttttctttctgaaaatcgatgttcctacagctgatgttgatgtaaatttaacaccagataaaagccaagtattattacaaaataaggaatctgttttaattgctcttgaaaatctgatgacgacttgttatggaccattacctagtacaaattcttatgaaaataataaaacagatgtttccgcagctgacatcgttcttagtaaaacagcagaaacagatgtgctttttaataaagtggaatcatctggaaagaattattcaaatgttgatacttcagtcattccattccaaaatgatatgcataatgatgaatctggaaaaaacactgatgattgtttaaatcaccagataagtattggtgactttggttatggtcattgtagtagtgaaatttctaacattgataaaaacactaagaatgcatttcaggacatttcaatgagtaatgtatcatgggagaactctcagacggaatatagtaaaacttgttttataagttccgttaagcacacccagtcagaaaatggcaataaagaccatatagatgagagtggggaaaatgaggaagaagcaggtcttgaaaactcttcggaaatttctgcagatgagtggagcaggggaaatatacttaaaaattcagtgggagagaatattgaacctgtgaaaattttagtgcctgaaaaaagtttaccatgtaaagtaagtaataataattatccaatccctgaacaaatgaatcttaatgaagattcatgtaacaaaaaatcaaatgtaatagataataaatctggaaaagttacagcttatgatttacttagcaatcgagtaatcaagaaacccatgtcagcaagtgctctttttgttcaagatcatcgtcctcagtttctcatagaaaatcctaagactagtttagaggatgcaacactacaaattgaagaactgtggaagacattgagtgaagaggaaaaactgaaatatgaagagaaggctactaaagacttggaacgatacaatagtcaaatgaagagagccattgaacaggagtcacaaatgtcactaaaagatggcagaaaaaagataaaacccaccagcgcatggaatttggcccagaagcacaagttaaaaacctcattatctaatcaaccaaaacttgatgaactccttcagtcccaaattgaaaaaagaaggagtcaaaatattaaaatggtacagatccccttttctatgaaaaacttaaaaataaattttaagaaacaaaacaaagttgacttagaagagaaggatgaaccttgcttgatccacaatctcaggtttcctgatgcatggctaatgacatccaaaacagaggtaatgttattaaatccatatagagtagaagaagccctgctatttaaaagacttcttgagaatcataaacttcctgcagagccactggaaaagccaattatgttaacagagagtctttttaatggatctcattatttagacgttttatataaaatgacagcagatgaccaaagatacagtggatcaacttacctgtctgatcctcgtcttacagcgaatggtttcaagataaaattgataccaggagtttcaattactgaaaattacttggaaatagaaggaatggctaattgtctcccattctatggagtagcagatttaaaagaaattcttaatgctatattaaacagaaatgcaaaggaagtttatgaatgtagacctcgcaaagtgataagttatttagagggagaagcagtgcgtctatccagacaattacccatgtacttatcaaaagaggacatccaagacattatctacagaatgaagcaccagtttggaaatgaaattaaagagtgtgttcatggtcgcccattttttcatcatttaacctatcttccagaaactacatgattaaatatgtttaagaagattagttaccattgaaattggttctgtcataaaacagcatgagtctggttttaaattatctttgtattatgtgtcacatggttattttttaaatgaggattcactgacttgtttttatattgaaaaaagttccacgtattgtagaaaacgtaaataaactaatatagactattcatttgattctcaa

SEQ ID NO: 3890 - protein, 932 aa, Homo sapiens; identical to SEQ ID NO: 348

SEQ ID NO: 3891 - DNA, 1131 bp, Homo sapiens
aaaaaccatacatcatttttattgttaagtcataaagaggtatcaaaattaaaagcaaaaattacagggtaagacttaacaaaactactaggagcgtcaaaggaagtgaaaatgggactaggcgcggggcaatatgaattaattaatgaacatgggaaggacaaggatggggaaaacagtgagcatgtgctgaagatactaggggagaggatctggtgaaaaatttgatcttagacaagcgcctaggtaaagaaataatgggataagatttctaaaccccactatgtgcttaagagtcatcctcgccattggcgctgtctctgtcatcctctccttcctcagcctctttttcatcatccttgatcaactccagctggtcatccccccatcttcattatcatcatcatccagtaggtccccctcctcagcagagtcatctgcacccccctcagactccatcttcacattagtctcatctttcttcacggagctgctgctctgctcctcttctgacttaacattgttcatctctactgcttgtttgctctgttccttttcaattttttccaggttttccaggaaagaatccactttttgttttatctgggtcagctccctcttaatggcctgaaggtcatctcctttcaactttccagacttggaagatccccgctgtccactcttagaattgaagccattttggctctgcagccaggttaatatctaaaacctggccagcaatcattctgccatcctctcctgctacagcagcccgggcatttctctcattaacatactgaaagaaggcaaagcccttatgaacagagcagcccacaattttgccatacttcgaaaagattgcctccacatcagatttcttgaccacaagagtgttgagattcccaatgaatacacgggagttcatggaacgaggatctgtcttgttggtaacgttgctggccattgtgtttgatggtaaggtttctcacaaagccgaaaacaagaaggggagggagaagagattcgattctgagtctcctactcccgggttctgcgtagagaagccgactgctgctggaggtcggcaacgcggccgcaaccgctcagtcttcgtctcttcacaaaatggcc

SEQ ID NO: 3892 - protein, 115 aa, Homo sapiens
MCLRVILAIGAVSVILSFLSLFFIILDQLQLVIPPSSLSSSSSRSPSSAESSAPPSDSIFTLVSSFFTELLLCSSSDLTLFISTACLLCSFSIFSRFSRKESTFCFIWVSSLLMA

SEQ ID NO: 3893 - DNA, 1119 bp, Homo sapiens
ggccattttgtgaagagacgaagactgagcggttgcggccgcgttgccgacctccagcagcagtcggcttctctacgcagaacccgggagtaggagactcagaatcgaatctcttctccctccccttcttgttttcggctttgtgagaaaccttaccatcaaacacaatggccagcaacgttaccaacaagacagatcctcgttccatgaactcccgtgtattcattgggaatctcaacactcttgtggtcaagaaatctgatgtggaggcaatcttttcgaagtatggcaaaattgtgggctgctctgttcataagggctttgccttctttcagtatgttaatgagagaaatgcccgggctgctgtagcaggagaggatggcagaatgattgctggccaggttttagatattaacctggctgcagagccaaaagtgaaccgaggaaaagcaggtgtgaaacgatctgcagcggagatatgaccttcaggccattaagagggagctgacccagataaaacaaaaagtggattctttcctggaaaacctggaaaaaattgaaaaggaacagagcaaacaagcagtagagatgaacaatgttaagtcagaagaggagcagagcagcagctccgtgaagaaagatgagactaatgtgaagatggagtctgaggggggtgcagatgactctgctgaggagggggacctactggatgatgatgataatgaagatggggggatgaccagctggagttgatcaaggatgatgaaaaagaggctgaggaaggagaggatgacagagacagcgccaatggcgaggatgactcttaagcacatagtggggtttagaaatcttatcccattatttctttacctaggcgcttgtctaagatcaaatttttcaccagatcctctcccctagtatcttcagcacatgctcactgttttccccatccttgtccttcccatgttcattaattaattcatattgccccgcgcctagtcccattttcacttcctttgacgctcctagtagttttgttaagtcttaccctgtaatttttgcttttaattttgatacctctttatgacttaacaataaaaatgatgtatggtttttatc

SEQ ID NO: 3894 - protein, 104 aa, Homo sapiens
MASNVTNKTDPRSMNSRVFIGNLNTLVVKKSDVEAIFSKYGKIVGCSVHKGFAFFQYVNERNARAAVAGEDGRMIAGQVLDINLAAEPKVNRGKAGVKRSAAEI

SEQ ID NO: 3895 - DNA, 1129 bp, Homo sapiens
ggccattttgtgaagagacgaagactgagcggttgcggccgcgttgccgacctccagcagcagtcggcttctctacgcagaacccgggagtaggagactcagaatcgaatctcttctccctccccttcttgttttcggctttgtgagaaaccttaccatcaaacacaatggccagcaacgttaccaacaagacagatcctcgttccatgaactcccgtgtattcattgggaatctcaacactcttgtggtcaagaaatctgatgtggaggcaatcttttcgaagtatggcaaaattgtgggctgctctgttcataagggctttgccttctttcagtatcacgtgtacctcctcctcctcctattgctcgggctgtagtgccctcgaaacgtcagcgtgtatcaggaaacacttcacaaaggggcataagtggcttcaattctaagagtggacagcggggatcttccaagtctggaaagttgaaaggagatgaccttcaggccattaagagggagctgacccagataaaacaaaaagtggattctttcctggaaaacctggaaaaaattgaaaaggaacagagcaaacaagcagtagagatgaacaatgttaagtcagaagaggagcagagcagcagctccgtgaagaaagatgagactaatgtgaagatggagtctgaggggggtgcagatgactctgctgaggagggggacctactggatgatgatgataatgaagatggggggatgaccagctggagttgatcaaggatgatgaaaaagaggctgaggaaggagaggatgacagagacagcgccaatggcgaggatgactcttaagcacatagtggggtttagaaatcttatcccattatttctttacctaggcgcttgtctaagatcaaatttttcaccagatcctctcccctagtatcttcagcacatgctcactgttttccccatccttgtccttcccatgttcattaattaattcatattgccccgcgcctagtcccattttcacttcctttgacgctcctagtagttttgttaagtcttaccctgtaatttttgcttttaattttgatacctctttatgacttaacaataaaaatgatgtatggtttttatc

SEQ ID NO: 3896 - protein, 69 aa, Homo sapiens
MASNVTNKTDPRSMNSRVFIGNLNTLVVKKSDVEAIFSKYGKIVGCSVHKGFAFFQYHVYLLLLLLLGL

SEQ ID NO: 3897 - DNA, 1173 bp, Homo sapiens
ggccattttgtgaagagacgaagactgagcggttgcggccgcgttgccgacctccagcagcagtcggcttctctacgcagaacccgggagtaggagactcagaatcgaatctcttctccctccccttcttgttttcggctttgtgagaaaccttaccatcaaacacaatggccagcaacgttaccaacaagacagatcctcgttccatgaactcccgtgtattcattgggaatctcaacactcttgtggtcaagaaatctgatgtggaggcaatcttttcgaagtatggcaaaattgtgggctgctctgttcataagggctttgccttctttcagtatgttaatgagagaaatgcccgggctgctgtagcaggagaggatggcagaatgattgctggccaggttttagatattaactgtagtgccctcgaaacgtcagcgtgtatcaggaaacacttcacaaaggggcataagtggcttcaattctaagagtggacagcggggatcttccaagtctggaaagttgaaaggagatgaccttcaggccattaagagggagctgacccagataaaacaaaaagtggattctttcctggaaaacctggaaaaaattgaaaaggaacagagcaaacaagcagtagagatgaacaatgttaagtcagaagaggagcagagcagcagctccgtgaagaaagatgagactaatgtgaagatggagtctgaggggggtgcagatgactctgctgaggagggggacctactggatgatgatgataatgaagatggggggatgaccagctggagttgatcaaggatgatgaaaaagaggctgaggaaggagaggatgacagagacagcgccaatggcgaggatgactcttaagcacatagtggggtttagaaatcttatcccattatttctttacctaggcgcttgtctaagatcaaatttttcaccagatcctctcccctagtatcttcagcacatgctcactgttttccccatccttgtccttcccatgttcattaattaattcatattgccccgcgcctagtcccattttcacttcctttgacgctcctagtagttttgttaagtcttaccctgtaatttttgcttttaattttgatacctctttatgacttaacaataaaaatgatgtatggtttttatc

SEQ ID NO: 3898 - protein, 106 aa, Homo sapiens
MASNVTNKTDPRSMNSRVFIGNLNTLVVKKSDVEAIFSKYGKIVGCSVHKGFAFFQYVNERNARAAVAGEDGRMIAGQVLDINCSALETSACIRKHFTKGHKWLQF

SEQ ID NO: 3899 - DNA, 1093 bp, Homo sapiens
ggccattttgtgaagagacgaagactgagcggttgcggccgcgttgccgacctccagcagcagtcggcttctctacgcagaacccgggagtaggagactcagaatcgaatctcttctccctccccttcttgttttcggctttgtgagaaaccttaccatcaaacacaatggccagcaacgttaccaacaagacagatcctcgttccatgaactcccgtgtattcattgggaatctcaacactcttgtggtcaagaaatctgatgtggaggcaatcttttcgaagtatggcaaaattgtgggctgctctgttcataagggctttgccttctttcagtatgttaatgagagaaatgcccgggctgctgtagcaggagaggatggcagaatgattgctggccaggttttagatattaacctggctgcagagccaaaagtgaaccgaggaaaagcaggtgtgaaacgatctgcagcggagatgtacggctcctcttttgacttggattgtgactttcaacgggactattatgataggatgtacagttacccagcacgtgtacctcctcctcctcctattgctcgggctgtagtgccctcgaaacctccgtgaagaaagatgagactaatgtgaagatggagtctgaggggggtgcagatgactctgctgaggagggggacctactggatgatgatgataatgaagatggggggatgaccagctggagttgatcaaggatgatgaaaaagaggctgaggaaggagaggatgacagagacagcgccaatggcgaggatgactcttaagcacatagtggggtttagaaatcttatcccattatttctttacctaggcgcttgtctaagatcaaatttttcaccagatcctctcccctagtatcttcagcacatgctcactgttttccccatccttgtccttcccatgttcattaattaattcatattgccccgcgcctagtcccattttcacttcctttgacgctcctagtagttttgttaagtcttaccctgtaatttttgcttttaattttgatacctctttatgacttaacaataaaaatgatgtatggtttttatc

SEQ ID NO: 3900 - protein, 146 aa, Homo sapiens
MASNVTNKTDPRSMNSRVFIGNLNTLVVKKSDVEAIFSKYGKIVGCSVHKGFAFFQYVNERNARAAVAGEDGRMIAGQVLDINLAAEPKVNRGKAGVKRSAAEMYGSSFDLDCDFQRDYYDRMYSYPARVPPPPPIARAVVPSKPP

SEQ ID NO: 3901 - DNA, 766 bp, Homo sapiens
ggccattttgtgaagagacgaagactgagcggttgcggccgcgttgccgacctccagcagcagtcggcttctctacgcagaacccgggagtaggagactcagaatcgaatctcttctccctccccttcttgttttcggctttgtgagaaaccttaccatcaaacacaatggccagcaacgttaccaacaagacagatcctcgttccatgaactcccgtgtattcattgggaatctcaacactcttgtggtcaagaaatctgatgtggaggcaatcttttcgaaaaagatgagactaatgtgaagatggagtctgaggggggtgcagatgactctgctgaggagggggacctactggatgatgatgataatgaagatggggggatgaccagctggagttgatcaaggatgatgaaaaagaggctgaggaaggagaggatgacagagacagcgccaatggcgaggatgactcttaagcacatagtggggtttagaaatcttatcccattatttctttacctaggcgcttgtctaagatcaaatttttcaccagatcctctcccctagtatcttcagcacatgctcactgttttccccatccttgtccttcccatgttcattaattaattcatattgccccgcgcctagtcccattttcacttcctttgacgctcctagtagttttgttaagtcttaccctgtaatttttgcttttaattttgatacctctttatgacttaacaataaaaatgatgtatggtttttatc

SEQ ID NO: 3902 - protein, 44 aa, Homo sapiens
MASNVTNKTDPRSMNSRVFIGNLNTLVVKKSDVEAIFSKKMRLM

SEQ ID NO: 3903 - DNA, 867 bp, Homo sapiens
ggccattttgtgaagagacgaagactgagcggttgcggccgcgttgccgacctccagcagcagtcggcttctctacgcagaacccgggagtaggagactcagaatcgaatctcttctccctccccttcttgttttcggctttgtgagaaaccttaccatcaaacacaatggccagcaacgttaccaacaagacagatcctcgttccatgaactcccgtgtattcattgggaatctcaacactcttgtggtcaagaaatctgatgtggaggcaatcttttcgaagtatggcaaaattgtgggctgctctgttcataagggctttgccttctttcagtatgttaatgagagaaatgcccgggctgctgtagcaggagaggatggcagaatgattgctggccaggttttagatattaacctggctgcagaatgactctgctgaggagggggacctactggatgatgatgataatgaagatggggggatgaccagctggagttgatcaaggatgatgaaaaagaggctgaggaaggagaggatgacagagacagcgccaatggcgaggatgactcttaagcacatagtggggtttagaaatcttatcccattatttctttacctaggcgcttgtctaagatcaaatttttcaccagatcctctcccctagtatcttcagcacatgctcactgttttccccatccttgtccttcccatgttcattaattaattcatattgccccgcgcctagtcccattttcacttcctttgacgctcctagtagttttgttaagtcttaccctgtaatttttgcttttaattttgatacctctttatgacttaacaataaaaatgatgtatggtttttatc

SEQ ID NO: 3904 - protein, 87 aa, Homo sapiens
MASNVTNKTDPRSMNSRVFIGNLNTLVVKKSDVEAIFSKYGKIVGCSVHKGFAFFQYVNERNARAAVAGEDGRMIAGQVLDINLAAE

SEQ ID NO: 3905 - DNA, 1139 bp, Homo sapiens
ggccattttgtgaagagacgaagactgagcggttgcggccgcgttgccgacctccagcagcagtcggcttctctacgcagaacccgggagtaggagactcagaatcgaatctcttctccctccccttcttgttttcggctttgtgagaaaccttaccatcaaacacaatggccagcaacgttaccaacaagacagatcctcgttccatgaactcccgtgtattcattgggaatctcaacactcttgtggtcaagaaatctgatgtggaggcaatcttttcgaactcctcttttgacttggattgtgactttcaacgggactattatgataggatgtacagttacccagcacgtgtacctcctcctcctcctattgctcgggctgtagtgccctcgaaacgtcagcgtgtatcaggaaacacttcacaaaggggcataagtggcttcaattctaagagtggacagcggggatcttccaagtctggaaagttgaaaggagatgaccttcaggccattaagagggagctgacccagataaaacaaaaagtggattctttcctggaaaacctggaaaaaattgaaaaggaacagagcaaacaagcagtagagatgaacaatgttaagtcagaagaggagcagagcagcagctccgtgaagaaagatgagactaatgtgaagatggagtctgaggggggtgcagatgactctgctgaggagggggacctactggatgatgatgataatgaagatggggggatgaccagctggagttgatcaaggatgatgaaaaagaggctgaggaaggagaggatgacagagacagcgccaatggcgaggatgactcttaagcacatagtggggtttagaaatcttatcccattatttctttacctaggcgcttgtctaagatcaaatttttcaccagatcctctcccctagtatcttcagcacatgctcactgttttccccatccttgtccttcccatgttcattaattaattcatattgccccgcgcctagtcccattttcacttcctttgacgctcctagtagttttgttaagtcttaccctgtaatttttgcttttaattttgatacctctttatgacttaacaataaaaatgatgtatggtttttatc

SEQ ID NO: 3906 - protein, 201 aa, Homo sapiens
MASNVTNKTDPRSMNSRVFIGNLNTLVVKKSDVEAIFSNSSFDLDCDFQRDYYDRMYSYPARVPPPPPIARAVVPSKRQRVSGNTSQRGISGFNSKSGQRGSSKSGKLKGDDLQAIKRELTQIKQKVDSFLENLEKIEKEQSKQAVEMNNVKSEEEQSSSSVKKDETNVKMESEGGADDSAEEGDLLDDDDNEDGGMTSWS

SEQ ID NO: 3907 - DNA, 1250 bp, Homo sapiens
ggccattttgtgaagagacgaagactgagcggttgcggccgcgttgccgacctccagcagcagtcggcttctctacgcagaacccgggagtaggagactcagaatcgaatctcttctccctccccttcttgttttcggctttgtgagaaaccttaccatcaaacacaatggccagcaacgttaccaacaagacagatcctcgttccatgaactcccgtgtattcattgggaatctcaacactcttgtggtcaagaaatctgatgtggaggcaatcttttcgaagtatggcaaaattgtgggctgctctgttcataagggctttgccttctttcagtatgttaatgagagaaatgcccgggctgctgtagcaggagaggatggcagaatgattgctggccaggttttagatattaacctggctgcagagccaaaagtgaaccgaggaaaagcaggtgtgaaacgatctgcagcggagatgtacggctcctcttttgacttggattgtgactttcaacgggactattatgataggatgtacagttacccagcacgtgtacctcctcctcctcctattgctcgggctgtagtgccctcgaaacgtcagcgtgtatcaggaaacacttcacaaaggggcataagtggcttcaattctaagatggattctttcctggaaaacctggaaaaaattgaaaaggaacagagcaaacaagcagtagagatgaacaatgttaagtcagaagaggagcagagcagcagctccgtgaagaaagatgagactaatgtgaagatggagtctgaggggggtgcagatgactctgctgaggagggggacctactggatgatgatgataatgaagatggggggatgaccagctggagttgatcaaggatgatgaaaaagaggctgaggaaggagaggatgacagagacagcgccaatggcgaggatgactcttaagcacatagtggggtttagaaatcttatcccattatttctttacctaggcgcttgtctaagatcaaatttttcaccagatcctctcccctagtatcttcagcacatgctcactgttttccccatccttgtccttcccatgttcattaattaattcatattgccccgcgcctagtcccattttcacttcctttgacgctcctagtagttttgttaagtcttaccctgtaatttttgcttttaattttgatacctctttatgacttaacaataaaaatgatgtatggtttttatc

SEQ ID NO: 3908 - protein, 238 aa, Homo sapiens
MASNVTNKTDPRSMNSRVFIGNLNTLVVKKSDVEAIFSKYGKIVGCSVHKGFAFFQYVNERNARAAVAGEDGRMIAGQVLDINLAAEPKVNRGKAGVKRSAAEMYGSSFDLDCDFQRDYYDRMYSYPARVPPPPPIARAVVPSKRQRVSGNTSQRGISGFNSKMDSFLENLEKIEKEQSKQAVEMNNVKSEEEQSSSSVKKDETNVKMESEGGADDSAEEGDLLDDDDNEDGGMTSWS

SEQ ID NO: 3909 - DNA, 1267 bp, Homo sapiens
ggccattttgtgaagagacgaagactgagcggttgcggccgcgttgccgacctccagcagcagtcggcttctctacgcagaacccgggagtaggagactcagaatcgaatctcttctccctccccttcttgttttcggctttgtgagaaaccttaccatcaaacacaatggccagcaacgttaccaacaagacagatcctcgttccatgaactcccgtgtattcattgggaatctcaacactcttgtggtcaagaaatctgatgtggaggcaatcttttcgaagtatggcaaaattgtgggctgctctgttcataagggctttgccttctttcagtatgttaatgagagaaatagccaaaagtgaaccgaggaaaagcaggtgtgaaacgatctgcagcggagatgtacggctcctcttttgacttggattgtgactttcaacgggactattatgataggatgtacagttacccagcacgtgtacctcctcctcctcctattgctcgggctgtagtgccctcgaaacgtcagcgtgtatcaggaaacacttcacaaaggggcataagtggcttcaattctaagagtggacagcggggatcttccaagtctggaaagttgaaaggagatgaccttcaggccattaagagggagctgacccagataaaacaaaaagtggattctttcctggaaaacctggaaaaaattgaaaaggaacagagcaaacaagcagtagagatgaacaatgttaagtcagaagaggagcagagcagcagctccgtgaagaaagatgagactaatgtgaagatggagtctgaggggggtgcagatgactctgctgaggagggggacctactggatgatgatgataatgaagatggggggatgaccagctggagttgatcaaggatgatgaaaaagaggctgaggaaggagaggatgacagagacagcgccaatggcgaggatgactcttaagcacatagtggggtttagaaatcttatcccattatttctttacctaggcgcttgtctaagatcaaatttttcaccagatcctctcccctagtatcttcagcacatgctcactgttttccccatccttgtccttcccatgttcattaattaattcatattgccccgcgcctagtcccattttcacttcctttgacgctcctagtagttttgttaagtcttaccctgtaatttttgcttttaattttgatacctctttatgacttaacaataaaaatgatgtatggtttttatc

SEQ ID NO: 3910 - protein, 65 aa, Homo sapiens
MASNVTNKTDPRSMNSRVFIGNLNTLVVKKSDVEAIFSKYGKIVGCSVHKGFAFFQYVNERNSQK

SEQ ID NO: 3911 - DNA, 1117 bp, Homo sapiens
ggccattttgtgaagagacgaagactgagcggttgcggccgcgttgccgacctccagcagcagtcggcttctctacgcagaacccgggagtaggagactcagaatcgaatctcttctccctccccttcttgttttcggctttgtgagaaaccttaccatcaaacacaatggccagcaacgttaccaacaagacagatcctcgttccatgaactcccgtgtattcattgggaatctcaacactcttgtggtcaagaaatctgatgtggaggcaatcttttcgaagtatggcaaaattgtgggctgctctgttcataagggctttgccttctttcagtatgttaatgagagaaatgcccgggtgtagtgccctcgaaacgtcagcgtgtatcaggaaacacttcacaaaggggcataagtggcttcaattctaagagtggacagcggggatcttccaagtctggaaagttgaaaggagatgaccttcaggccattaagagggagctgacccagataaaacaaaaagtggattctttcctggaaaacctggaaaaaattgaaaaggaacagagcaaacaagcagtagagatgaacaatgttaagtcagaagaggagcagagcagcagctccgtgaagaaagatgagactaatgtgaagatggagtctgaggggggtgcagatgactctgctgaggagggggacctactggatgatgatgataatgaagatggggggatgaccagctggagttgatcaaggatgatgaaaaagaggctgaggaaggagaggatgacagagacagcgccaatggcgaggatgactcttaagcacatagtggggtttagaaatcttatcccattatttctttacctaggcgcttgtctaagatcaaatttttcaccagatcctctcccctagtatcttcagcacatgctcactgttttccccatccttgtccttcccatgttcattaattaattcatattgccccgcgcctagtcccattttcacttcctttgacgctcctagtagttttgttaagtcttaccctgtaatttttgcttttaattttgatacctctttatgacttaacaataaaaatgatgtatggtttttatc

SEQ ID NO: 3912 - protein, 65 aa, Homo sapiens
MASNVTNKTDPRSMNSRVFIGNLNTLVVKKSDVEAIFSKYGKIVGCSVHKGFAFFQYVNERNARV

SEQ ID NO: 3913 - DNA, 1272 bp, Homo sapiens
ggccattttgtgaagagacgaagactgagcggttgcggccgcgttgccgacctccagcagcagtcggcttctctacgcagaacccgggagtaggagactcagaatcgaatctcttctccctccccttcttgttttcggctttgtgagaaaccttaccatcaaacacaatggccagcaacgttaccaacaagacagatcctcgttccatgaactcccgtgtattcattgggaatctcaacactcttgtggtcaagaaatctgatgtggaggcaatcttttcgaagtatggcaaaattgtgggctgctctgttcataagggctttgccttctttcagtatgttaatgagagaaatgcccgggctgctgtagcaggagaggatggcagaatgattgctggccaggttttagatattaacctggctgcagagccaaaagtgaaccgaggaaaagcaggtgtgaaacgatctgcagcggagatgtacggctcctcttttgacttggattgtgactttcaacgggactattatgataggatgtacagttacccagcacgtgtacctcctcctcctcctattgctcgggctgtagtgccctcgaaacgtcagcgtgtatcaggaaacattgaaaggagatgaccttcaggccattaagagggagctgacccagataaaacaaaaagtggattctttcctggaaaacctggaaaaaattgaaaaggaacagagcaaacaagcagtagagatgaacaatgttaagtcagaagaggagcagagcagcagctccgtgaagaaagatgagactaatgtgaagatggagtctgaggggggtgcagatgactctgctgaggagggggacctactggatgatgatgataatgaagatggggggatgaccagctggagttgatcaaggatgatgaaaaagaggctgaggaaggagaggatgacagagacagcgccaatggcgaggatgactcttaagcacatagtggggtttagaaatcttatcccattatttctttacctaggcgcttgtctaagatcaaatttttcaccagatcctctcccctagtatcttcagcacatgctcactgttttccccatccttgtccttcccatgttcattaattaattcatattgccccgcgcctagtcccattttcacttcctttgacgctcctagtagttttgttaagtcttaccctgtaatttttgcttttaattttgatacctctttatgacttaacaataaaaatgatgtatggtttttatc

SEQ ID NO: 3914 - protein, 155 aa, Homo sapiens
MASNVTNKTDPRSMNSRVFIGNLNTLVVKKSDVEAIFSKYGKIVGCSVHKGFAFFQYVNERNARAAVAGEDGRMIAGQVLDINLAAEPKVNRGKAGVKRSAAEMYGSSFDLDCDFQRDYYDRMYSYPARVPPPPPIARAVVPSKRQRVSGNIERR

SEQ ID NO: 3915 - DNA, 1029 bp, Homo sapiens
ggccattttgtgaagagacgaagactgagcggttgcggccgcgttgccgacctccagcagcagtcggcttctctacgcagaacccgggagtaggagactcagaatcgaatctcttctccctccccttcttgttttcggctttgtgtgaaacgatctgcagcggagatgtacggctcctcttttgacttggattgtgactttcaacgggactattatgataggatgtacagttacccagcacgtgtacctcctcctcctcctattgctcgggctgtagtgccctcgaaacgtcagcgtgtatcaggaaacacttcacaaaggggcataagtggcttcaattctaagagtggacagcggggatcttccaagtctggaaagttgaaaggagatgaccttcaggccattaagagggagctgacccagataaaacaaaaagtggattctttcctggaaaacctggaaaaaattgaaaaggaacagagcaaacaagcagtagagatgaacaatgttaagtcagaagaggagcagagcagcagctccgtgaagaaagatgagactaatgtgaagatggagtctgaggggggtgcagatgactctgctgaggagggggacctactggatgatgatgataatgaagatggggggatgaccagctggagttgatcaaggatgatgaaaaagaggctgaggaaggagaggatgacagagacagcgccaatggcgaggatgactcttaagcacatagtggggtttagaaatcttatcccattatttctttacctaggcgcttgtctaagatcaaatttttcaccagatcctctcccctagtatcttcagcacatgctcactgttttccccatccttgtccttcccatgttcattaattaattcatattgccccgcgcctagtcccattttcacttcctttgacgctcctagtagttttgttaagtcttaccctgtaatttttgcttttaattttgatacctctttatgacttaacaataaaaatgatgtatggtttttatc

SEQ ID NO: 3916 - protein, 165 aa, Homo sapiens
MYGSSFDLDCDFQRDYYDRMYSYPARVPPPPPIARAVVPSKRQRVSGNTSQRGISGFNSKSGQRGSSKSGKLKGDDLQAIKRELTQIKQKVDSFLENLEKIEKEQSKQAVEMNNVKSEEEQSSSSVKKDETNVKMESEGGADDSAEEGDLLDDDDNEDGGMTSWS

SEQ ID NO: 3917 - DNA, 1212 bp, Homo sapiens
ggccattttgtgaagagacgaagactgagcggttgcggccgcgttgccgacctccagcagcagtcggcttctctacgcagaacccgggagtaggagactcagaatcgaatctcttctccctccccttcttgttttcggctttgtgagaaaccttaccatcaaacacaatggccagcaacgttaccaacaagacagatcctcgttccatgaactcccgtgtattcattgggaatctcaacactcttgtggtcaagaaatctgatgtggaggcaatcttttcgaagtatggcaaaattgtgggctgctctgttcataagggctttgccttctttcagtatgttaatgagagaaatgcccgggctgctgtagcaggagaggatggcagaatgattgctggccaggttttagatattaacctggctgcagagccaaaagtgaaccgaggaaaagcaggtgtgaaacgatctgcagcggagatgtacggctcctcttttgacttggattgtgactttcaacgggactattatgataggatgtacagttacccagcacgtgtacctcctcctcctcctattgcttcaggccattaagagggagctgacccagataaaacaaaaagtggattctttcctggaaaacctggaaaaaattgaaaaggaacagagcaaacaagcagtagagatgaacaatgttaagtcagaagaggagcagagcagcagctccgtgaagaaagatgagactaatgtgaagatggagtctgaggggggtgcagatgactctgctgaggagggggacctactggatgatgatgataatgaagatggggggatgaccagctggagttgatcaaggatgatgaaaaagaggctgaggaaggagaggatgacagagacagcgccaatggcgaggatgactcttaagcacatagtggggtttagaaatcttatcccattatttctttacctaggcgcttgtctaagatcaaatttttcaccagatcctctcccctagtatcttcagcacatgctcactgttttccccatccttgtccttcccatgttcattaattaattcatattgccccgcgcctagtcccattttcacttcctttgacgctcctagtagttttgttaagtcttaccctgtaatttttgcttttaattttgatacctctttatgacttaacaataaaaatgatgtatggtttttatc

SEQ ID NO: 3918 - protein, 140 aa, Homo sapiens
MASNVTNKTDPRSMNSRVFIGNLNTLVVKKSDVEAIFSKYGKIVGCSVHKGFAFFQYVNERNARAAVAGEDGRMIAGQVLDINLAAEPKVNRGKAGVKRSAAEMYGSSFDLDCDFQRDYYDRMYSYPARVPPPPPIASGH

SEQ ID NO: 3919 - DNA, 1160 bp, Homo sapiens
ggccattttgtgaagagacgaagactgagcggttgcggccgcgttgccgacctccagcagcagtcggcttctctacgcagaacccgggagtaggagactcagaatcgaatctcttctccctccccttcttgttttcggctttgtgagaaaccttaccatcaaacacaatggccagcaacgttaccaacaagacagatcctcgttccatgaactcccgtgtattcattgggaatctcaacactcttgtggtcaagaaatctgatgtggaggcaatcttttcgaagtatggcaaaattgtgggctgctctgttcataagggctttgccttctttcagtatgttaatgagagaaatgcccgggctgctgtagcaggagaggatggcagaatgattgctggccaggttttagatattaacctggctgcagagccaaaagtgaaccgaggaaaagcaggtgtgaaacgatctgcagcggagatgtacggctcctcttttgacttggattgtgactttcaacgggactattatgataggatgtacagttacccagcacgtgtacctcctcctcctcctattgctcgggctgtagtgccctcgaaacgtcagcgtgtatcaggaaacacttcacaaaggggcataagtggcttcaattctaagagtggacacagctccgtgaagaaagatgagactaatgtgaagatggagtctgaggggggtgcagatgactctgctgaggagggggacctactggatgatgatgataatgaagatggggggatgaccagctggagttgatcaaggatgatgaaaaagaggctgaggaaggagaggatgacagagacagcgccaatggcgaggatgactcttaagcacatagtggggtttagaaatcttatcccattatttctttacctaggcgcttgtctaagatcaaatttttcaccagatcctctcccctagtatcttcagcacatgctcactgttttccccatccttgtccttcccatgttcattaattaattcatattgccccgcgcctagtcccattttcacttcctttgacgctcctagtagttttgttaagtcttaccctgtaatttttgcttttaattttgatacctctttatgacttaacaataaaaatgatgtatggtttttatc

SEQ ID NO: 3920 - protein, 208 aa, Homo sapiens
MASNVTNKTDPRSMNSRVFIGNLNTLVVKKSDVEAIFSKYGKIVGCSVHKGFAFFQYVNERNARAAVAGEDGRMIAGQVLDINLAAEPKVNRGKAGVKRSAAEMYGSSFDLDCDFQRDYYDRMYSYPARVPPPPPIARAVVPSKRQRVSGNTSQRGISGFNSKSGHSSVKKDETNVKMESEGGADDSAEEGDLLDDDDNEDGGMTSWS

SEQ ID NO: 3921 - DNA, 991 bp, Homo sapiens
ggccattttgtgaagagacgaagactgagcggttgcggccgcgttgccgacctccagcagcagtcggcttctctacgcagaacccgggagtaggagactcagaatcgaatctcttctccctccccttcttgttttcggctttgtgagaaaccttaccatcaaacacaatggccagcaacgttaccaacaagacagatcctcgttccatgaactcccgtgtattcattgggaatctcaacactcttgtggtcaagaaatctgatgtggaggcaatcttttcgaagtatggcaaaattgtgggctgctctgttcataagggctttgccttctttcagtatgttaatgagagaaatgcccgggctgctgtagcaggagaggatggcagaatgattgctggccaggttttagatattaacctggctgcagagccaaaagtgaaccgaggaaaagcaggtgtgaaacgatctgcagcaggagcagagcagcagctccgtgaagaaagatgagactaatgtgaagatggagtctgaggggggtgcagatgactctgctgaggagggggacctactggatgatgatgataatgaagatggggggatgaccagctggagttgatcaaggatgatgaaaaagaggctgaggaaggagaggatgacagagacagcgccaatggcgaggatgactcttaagcacatagtggggtttagaaatcttatcccattatttctttacctaggcgcttgtctaagatcaaatttttcaccagatcctctcccctagtatcttcagcacatgctcactgttttccccatccttgtccttcccatgttcattaattaattcatattgccccgcgcctagtcccattttcacttcctttgacgctcctagtagttttgttaagtcttaccctgtaatttttgcttttaattttgatacctctttatgacttaacaataaaaatgatgtatggtttttatcaactgtctcc

SEQ ID NO: 3922 - protein, 112 aa, Homo sapiens
MASNVTNKTDPRSMNSRVFIGNLNTLVVKKSDVEAIFSKYGKIVGCSVHKGFAFFQYVNERNARAAVAGEDGRMIAGQVLDINLAAEPKVNRGKAGVKRSAAGAEQQLREER

SEQ ID NO: 3923 - DNA, 1304 bp, Homo sapiens
ggtttaataaggacttgtttattttgaggaaaaaaggtcccaaacatcaggctgttcacaaaaataacccacagtatcaactttagaaaacaaatcttaagactataacactaattatttttctagaggatgcatttgacatgccaactctcattcacaaaaatacattgttacatttgtgttgaactgccccacacagcacactaatgtgggggtgtaacacacatacttctaactcaaagctgctttcaagagctactcaactaaatgagattgcctttgcagttagggaagcaactactgaacttatgtatgaatgaaaagaactgtactccctgcataacaagagattattttggagacagttgataaaaaccatacatcatttttattgttaagtcataaagaggtatcaaaattaaaagcaaaaattacagggtaagacttaacaaaactactaggagcgtcaaaggaagtgaaaatgggactaggcgcggggcaatatgaattaattaatgaacatgggaaggacaaggatggggaaaacagtgagcatgtgctgaagatactaggggagaggatctggtgaaaaatttgatcttagacaagcgcctaggtaaagaaataatgggataagatttctaaaccccactatgtgcttaagagtcatcctcgccattggcgctgtctctgtcatcctctccttcctcagcctctttttcatcatccttgatcaactccagctggtcatccccccatcttcattatcatcatcatccagtagtcccgttgaaagtcacaatccaagtcaaaagaggagccgtacatctccgctgcagatcgtttcacacctgcttttcctcggttcacttttggctctgcagccaggttaatatctaaaacctggccagcaatcattctgccatcctctcctgctacagcagcccgggcatttctctcattaacatactgaaagaaggcaaagcccttatgaacagagcagcccacaattttgccatacttcgaaaagattgcctccacatcagatttcttgaccacaagagtgttgagattcccaatgaatacacgggagttcatggaacgaggatctgtcttgttggtaacgttgctggccattgtgtttgatggtaaggtttctcacaaagccgaaaacaagaaggggagggagaagagattcgattctgagtctcctactcccgggttctgcgtagagaagccgactgctgctggaggtcggcaacgcggccgcaaccgctcagtcttcgtctcttcacaaaatggcc

SEQ ID NO: 3924 - protein, 79 aa, Homo sapiens
MCLRVILAIGAVSVILSFLSLFFIILDQLQLVIPPSSLSSSSSSPVESHNPSQKRSRTSPLQIVSHLLFLGSLLALQPG

SEQ ID NO: 3925 - DNA, 1650 bp, Homo sapiens
ggccattttgtgaagagacgaagactgagcggttgcggccgcgttgccgacctccagcagcagtcggcttctctacgcagaacccgggagtaggagactcagaatcgaatctcttctccctccccttcttgttttcggctttgtgagaaaccttaccatcaaacacaatggccagcaacgttaccaacaagacagatcctcgttccatgaactcccgtgtattcattgggaatctcaacactcttgtggtcaagaaatctgatgtggaggcaatcttttcgaagtatggcaaaattgtgggctgctctgttcataagggctttgccttctttcagtatgttaatgagagaaatgcccgggctgctgtagcaggagaggatggcagaatgattgctggccaggttttagatattaacctggctgcagagccaaaagtgaaccgaggaaaagcaggtgtgaaacgatctgcagcggagatgtacggctcctcttttgacttggattgtgactttcaacgggactattatgataggatgtacagttacccagcacgtgtacctcctcctcctcctattgctcgggctgtagtgccctcgaaacgtcagcgtgtatcaggaaacattgaaaggagatgaccttcaggccattaagagggagctgacccagataaaacaaaaagtggattctttcctggaaaacctggaaaaaattgaaaaggaacagagcaaacaagcagtagagatgaacaatgttaagtcagaagaggagcagagcagcagctccgtgaagaaagatgagactaatgtgaagatggagtctgaggggggtgcagatgactctgctgaggagggggacctactggatgatgatgataatgaagatggggggatgaccagctggagttgatcaaggatgatgaaaaagaggctgaggaaggagaggatgacagagacagcgccaatggcgaggatgactcttaagcacatagtggggtttagaaatcttatcccattatttctttacctaggcgcttgtctaagatcaaatttttcaccagatcctctcccctagtatcttcagcacatgctcactgttttccccatccttgtccttcccatgttcattaattaattcatattgccccgcgcctagtcccattttcacttcctttgacgctcctagtagttttgttaagtcttaccctgtaatttttgcttttaattttgatacctctttatgacttaacaataaaaatgatgtatggtttttatcaactgtctccaaaataatctcttgttatgcagggagtacagttcttttcattcatacataagttcagtagttgcttccctaactgcaaaggcaatctcatttagttgagtagctcttgaaagcagctttgagttagaagtatgtgtgttacacccccacattagtgtgctgtgtggggcagttcaacacaaatgtaacaatgtatttttgtgaatgagagttggcatgtcaaatgcatcctctagaaaaataattagtgttatagtcttaagatttgttttctaaagttgatactgtgggttatttttgtgaacagcctgatgtttgggaccttttttcctcaaaataaacaagtccttattaaaccaggggaaaaaa

SEQ ID NO: 3926 - protein, 155 aa, Homo sapiens; identical to SEQ ID NO: 3914

SEQ ID NO: 3927 - DNA, 1538 bp, Homo sapiens
ggccattttgtgaagagacgaagactgagcggttgcggccgcgttgccgacctccagcagcagtcggcttctctacgcagaacccgggagtaggagactcagaatcgaatctcttctccctccccttcttgttttcggctttgtgagaaaccttaccatcaaacacaatggccagcaacgttaccaacaagacagatcctcgttccatgaactcccgtgtattcattgggaatctcaacactcttgtggtcaagaaatctgatgtggaggcaatcttttcgaagtatggcaaaattgtgggctgctctgttcataagggctttgccttctttcagtatgttaatgagagaaatgcccgggctgctgtagcaggagaggatggcagaatgattgctggccaggttttagatattaacctggctgcagagccaaaagtgaaccgaggaaaagcaggtgtgaaacgatctgcagcggagatgtacggctcctcttttgacttggattgtgactttcaacgggactattatgataggatgtacagttacccagcacgtgtacctcctcctcctcctattgctcgggctgtagtgccctcgaaacgtcagcgtgtatcaggaaacacttcacaaaggggcataagtggcttcaattctaagagtggacacagctccgtgaagaaagatgagactaatgtgaagatggagtctgaggggggtgcagatgactctgctgaggagggggacctactggatgatgatgataatgaagatggggggatgaccagctggagttgatcaaggatgatgaaaaagaggctgaggaaggagaggatgacagagacagcgccaatggcgaggatgactcttaagcacatagtggggtttagaaatcttatcccattatttctttacctaggcgcttgtctaagatcaaatttttcaccagatcctctcccctagtatcttcagcacatgctcactgttttccccatccttgtccttcccatgttcattaattaattcatattgccccgcgcctagtcccattttcacttcctttgacgctcctagtagttttgttaagtcttaccctgtaatttttgcttttaattttgatacctctttatgacttaacaataaaaatgatgtatggtttttatcaactgtctccaaaataatctcttgttatgcagggagtacagttcttttcattcatacataagttcagtagttgcttccctaactgcaaaggcaatctcatttagttgagtagctcttgaaagcagctttgagttagaagtatgtgtgttacacccccacattagtgtgctgtgtggggcagttcaacacaaatgtaacaatgtatttttgtgaatgagagttggcatgtcaaatgcatcctctagaaaaataattagtgttatagtcttaagatttgttttctaaagttgatactgtgggttatttttgtgaacagcctgatgtttgggaccttttttcctcaaaataaacaagtccttattaaaccaggggaaaaaa

SEQ ID NO: 3928 - protein, 208 aa, Homo sapiens; identical to SEQ ID NO: 3920

SEQ ID NO: 3929 - DNA, 1245 bp, Homo sapiens
ggccattttgtgaagagacgaagactgagcggttgcggccgcgttgccgacctccagcagcagtcggcttctctacgcagaacccgggagtaggagactcagaatcgaatctcttctccctccccttcttgttttcggctttgtgagaaaccttaccatcaaacacaatggccagcaacgttaccaacaagacagatcctcgttccatgaactcccgtgtattcattgggaatctcaacactcttgtggtcaagaaatctgatgtggaggcaatcttttcgaagtatggcaaaattgtgggctgctctgttcataagggctttgccttctttcagtatgttaatgagagaaatgcccgggctgctgtagcaggagaggatggcagaatgattgctggccaggttttagatattaacctggctgcagaatgactctgctgaggagggggacctactggatgatgatgataatgaagatggggggatgaccagctggagttgatcaaggatgatgaaaaagaggctgaggaaggagaggatgacagagacagcgccaatggcgaggatgactcttaagcacatagtggggtttagaaatcttatcccattatttctttacctaggcgcttgtctaagatcaaatttttcaccagatcctctcccctagtatcttcagcacatgctcactgttttccccatccttgtccttcccatgttcattaattaattcatattgccccgcgcctagtcccattttcacttcctttgacgctcctagtagttttgttaagtcttaccctgtaatttttgcttttaattttgatacctctttatgacttaacaataaaaatgatgtatggtttttatcaactgtctccaaaataatctcttgttatgcagggagtacagttcttttcattcatacataagttcagtagttgcttccctaactgcaaaggcaatctcatttagttgagtagctcttgaaagcagctttgagttagaagtatgtgtgttacacccccacattagtgtgctgtgtggggcagttcaacacaaatgtaacaatgtatttttgtgaatgagagttggcatgtcaaatgcatcctctagaaaaataattagtgttatagtcttaagatttgttttctaaagttgatactgtgggttatttttgtgaacagcctgatgtttgggaccttttttcctcaaaataaacaagtccttattaaaccaggggaaaaaa

SEQ ID NO: 3930 - protein, 87 aa, Homo sapiens; identical to SEQ ID NO: 3904

SEQ ID NO: 3931 - DNA, 1359 bp, Homo sapiens
ggccattttgtgaagagacgaagactgagcggttgcggccgcgttgccgacctccagcagcagtcggcttctctacgcagaacccgggagtaggagactcagaatcgaatctcttctccctccccttcttgttttcggctttgtgagaaaccttaccatcaaacacaatggccagcaacgttaccaacaagacagatcctcgttccatgaactcccgtgtattcattgggaatctcaacactcttgtggtcaagaaatctgatgtggaggcaatcttttcgaagtatggcaaaattgtgggctgctctgttcataagggctttgccttctttcagtatgttaatgagagaaatgcccgggctgctgtagcaggagaggatggcagaatgattgctggccaggttttagatattaacctggctgcagagccaaaagtgaaccgaggaaaagcaggtgtgaaacgatctgcagcaggagcagagcagcagctccgtgaagaaagatgagactaatgtgaagatggagtctgaggggggtgcagatgactctgctgaggagggggacctactggatgatgatgataatgaagatggggggatgaccagctggagttgatcaaggatgatgaaaaagaggctgaggaaggagaggatgacagagacagcgccaatggcgaggatgactcttaagcacatagtggggtttagaaatcttatcccattatttctttacctaggcgcttgtctaagatcaaatttttcaccagatcctctcccctagtatcttcagcacatgctcactgttttccccatccttgtccttcccatgttcattaattaattcatattgccccgcgcctagtcccattttcacttcctttgacgctcctagtagttttgttaagtcttaccctgtaatttttgcttttaattttgatacctctttatgacttaacaataaaaatgatgtatggtttttatcaactgtctccaaaataatctcttgttatgcagggagtacagttcttttcattcatacataagttcagtagttgcttccctaactgcaaaggcaatctcatttagttgagtagctcttgaaagcagctttgagttagaagtatgtgtgttacacccccacattagtgtgctgtgtggggcagttcaacacaaatgtaacaatgtatttttgtgaatgagagttggcatgtcaaatgcatcctctagaaaaataattagtgttatagtcttaagatttgttttctaaagttgatactgtgggttatttttgtgaacagcctgatgtttgggaccttttttcctcaaaataaacaagtccttattaaaccaggggaaaaaa

SEQ ID NO: 3932 - protein, 112 aa, Homo sapiens; identical to SEQ ID NO: 3922

SEQ ID NO: 3933 - DNA, 1407 bp, Homo sapiens
ggccattttgtgaagagacgaagactgagcggttgcggccgcgttgccgacctccagcagcagtcggcttctctacgcagaacccgggagtaggagactcagaatcgaatctcttctccctccccttcttgttttcggctttgtgtgaaacgatctgcagcggagatgtacggctcctcttttgacttggattgtgactttcaacgggactattatgataggatgtacagttacccagcacgtgtacctcctcctcctcctattgctcgggctgtagtgccctcgaaacgtcagcgtgtatcaggaaacacttcacaaaggggcataagtggcttcaattctaagagtggacagcggggatcttccaagtctggaaagttgaaaggagatgaccttcaggccattaagagggagctgacccagataaaacaaaaagtggattctttcctggaaaacctggaaaaaattgaaaaggaacagagcaaacaagcagtagagatgaacaatgttaagtcagaagaggagcagagcagcagctccgtgaagaaagatgagactaatgtgaagatggagtctgaggggggtgcagatgactctgctgaggagggggacctactggatgatgatgataatgaagatggggggatgaccagctggagttgatcaaggatgatgaaaaagaggctgaggaaggagaggatgacagagacagcgccaatggcgaggatgactcttaagcacatagtggggtttagaaatcttatcccattatttctttacctaggcgcttgtctaagatcaaatttttcaccagatcctctcccctagtatcttcagcacatgctcactgttttccccatccttgtccttcccatgttcattaattaattcatattgccccgcgcctagtcccattttcacttcctttgacgctcctagtagttttgttaagtcttaccctgtaatttttgcttttaattttgatacctctttatgacttaacaataaaaatgatgtatggtttttatcaactgtctccaaaataatctcttgttatgcagggagtacagttcttttcattcatacataagttcagtagttgcttccctaactgcaaaggcaatctcatttagttgagtagctcttgaaagcagctttgagttagaagtatgtgtgttacacccccacattagtgtgctgtgtggggcagttcaacacaaatgtaacaatgtatttttgtgaatgagagttggcatgtcaaatgcatcctctagaaaaataattagtgttatagtcttaagatttgttttctaaagttgatactgtgggttatttttgtgaacagcctgatgtttgggaccttttttcctcaaaataaacaagtccttattaaaccaggggaaaaaa

SEQ ID NO: 3934 - protein, 165 aa, Homo sapiens; identical to SEQ ID NO: 3916

SEQ ID NO: 3935 - DNA, 1497 bp, Homo sapiens
ggccattttgtgaagagacgaagactgagcggttgcggccgcgttgccgacctccagcagcagtcggcttctctacgcagaacccgggagtaggagactcagaatcgaatctcttctccctccccttcttgttttcggctttgtgagaaaccttaccatcaaacacaatggccagcaacgttaccaacaagacagatcctcgttccatgaactcccgtgtattcattgggaatctcaacactcttgtggtcaagaaatctgatgtggaggcaatcttttcgaagtatggcaaaattgtgggctgctctgttcataagggctttgccttctttcagtatgttaatgagagaaatgcccgggctgctgtagcaggagaggatggcagaatgattgctggccaggttttagatattaacctggctgcagagccaaaagtgaaccgaggaaaagcaggtgtgaaacgatctgcagcggagatatgaccttcaggccattaagagggagctgacccagataaaacaaaaagtggattctttcctggaaaacctggaaaaaattgaaaaggaacagagcaaacaagcagtagagatgaacaatgttaagtcagaagaggagcagagcagcagctccgtgaagaaagatgagactaatgtgaagatggagtctgaggggggtgcagatgactctgctgaggagggggacctactggatgatgatgataatgaagatggggggatgaccagctggagttgatcaaggatgatgaaaaagaggctgaggaaggagaggatgacagagacagcgccaatggcgaggatgactcttaagcacatagtggggtttagaaatcttatcccattatttctttacctaggcgcttgtctaagatcaaatttttcaccagatcctctcccctagtatcttcagcacatgctcactgttttccccatccttgtccttcccatgttcattaattaattcatattgccccgcgcctagtcccattttcacttcctttgacgctcctagtagttttgttaagtcttaccctgtaatttttgcttttaattttgatacctctttatgacttaacaataaaaatgatgtatggtttttatcaactgtctccaaaataatctcttgttatgcagggagtacagttcttttcattcatacataagttcagtagttgcttccctaactgcaaaggcaatctcatttagttgagtagctcttgaaagcagctttgagttagaagtatgtgtgttacacccccacattagtgtgctgtgtggggcagttcaacacaaatgtaacaatgtatttttgtgaatgagagttggcatgtcaaatgcatcctctagaaaaataattagtgttatagtcttaagatttgttttctaaagttgatactgtgggttatttttgtgaacagcctgatgtttgggaccttttttcctcaaaataaacaagtccttattaaaccaggggaaaaaa

SEQ ID NO: 3936 - protein, 104 aa, Homo sapiens; identical to SEQ ID NO: 3894

SEQ ID NO: 3937 - DNA, 1471 bp, Homo sapiens
ggccattttgtgaagagacgaagactgagcggttgcggccgcgttgccgacctccagcagcagtcggcttctctacgcagaacccgggagtaggagactcagaatcgaatctcttctccctccccttcttgttttcggctttgtgagaaaccttaccatcaaacacaatggccagcaacgttaccaacaagacagatcctcgttccatgaactcccgtgtattcattgggaatctcaacactcttgtggtcaagaaatctgatgtggaggcaatcttttcgaagtatggcaaaattgtgggctgctctgttcataagggctttgccttctttcagtatgttaatgagagaaatgcccgggctgctgtagcaggagaggatggcagaatgattgctggccaggttttagatattaacctggctgcagagccaaaagtgaaccgaggaaaagcaggtgtgaaacgatctgcagcggagatgtacggctcctcttttgacttggattgtgactttcaacgggactattatgataggatgtacagttacccagcacgtgtacctcctcctcctcctattgctcgggctgtagtgccctcgaaacctccgtgaagaaagatgagactaatgtgaagatggagtctgaggggggtgcagatgactctgctgaggagggggacctactggatgatgatgataatgaagatggggggatgaccagctggagttgatcaaggatgatgaaaaagaggctgaggaaggagaggatgacagagacagcgccaatggcgaggatgactcttaagcacatagtggggtttagaaatcttatcccattatttctttacctaggcgcttgtctaagatcaaatttttcaccagatcctctcccctagtatcttcagcacatgctcactgttttccccatccttgtccttcccatgttcattaattaattcatattgccccgcgcctagtcccattttcacttcctttgacgctcctagtagttttgttaagtcttaccctgtaatttttgcttttaattttgatacctctttatgacttaacaataaaaatgatgtatggtttttatcaactgtctccaaaataatctcttgttatgcagggagtacagttcttttcattcatacataagttcagtagttgcttccctaactgcaaaggcaatctcatttagttgagtagctcttgaaagcagctttgagttagaagtatgtgtgttacacccccacattagtgtgctgtgtggggcagttcaacacaaatgtaacaatgtatttttgtgaatgagagttggcatgtcaaatgcatcctctagaaaaataattagtgttatagtcttaagatttgttttctaaagttgatactgtgggttatttttgtgaacagcctgatgtttgggaccttttttcctcaaaataaacaagtccttattaaaccaggggaaaaaa

SEQ ID NO: 3938 - protein, 146 aa, Homo sapiens; identical to SEQ ID NO: 3900

SEQ ID NO: 3939 - DNA, 1590 bp, Homo sapiens
ggccattttgtgaagagacgaagactgagcggttgcggccgcgttgccgacctccagcagcagtcggcttctctacgcagaacccgggagtaggagactcagaatcgaatctcttctccctccccttcttgttttcggctttgtgagaaaccttaccatcaaacacaatggccagcaacgttaccaacaagacagatcctcgttccatgaactcccgtgtattcattgggaatctcaacactcttgtggtcaagaaatctgatgtggaggcaatcttttcgaagtatggcaaaattgtgggctgctctgttcataagggctttgccttctttcagtatgttaatgagagaaatgcccgggctgctgtagcaggagaggatggcagaatgattgctggccaggttttagatattaacctggctgcagagccaaaagtgaaccgaggaaaagcaggtgtgaaacgatctgcagcggagatgtacggctcctcttttgacttggattgtgactttcaacgggactattatgataggatgtacagttacccagcacgtgtacctcctcctcctcctattgcttcaggccattaagagggagctgacccagataaaacaaaaagtggattctttcctggaaaacctggaaaaaattgaaaaggaacagagcaaacaagcagtagagatgaacaatgttaagtcagaagaggagcagagcagcagctccgtgaagaaagatgagactaatgtgaagatggagtctgaggggggtgcagatgactctgctgaggagggggacctactggatgatgatgataatgaagatggggggatgaccagctggagttgatcaaggatgatgaaaaagaggctgaggaaggagaggatgacagagacagcgccaatggcgaggatgactcttaagcacatagtggggtttagaaatcttatcccattatttctttacctaggcgcttgtctaagatcaaatttttcaccagatcctctcccctagtatcttcagcacatgctcactgttttccccatccttgtccttcccatgttcattaattaattcatattgccccgcgcctagtcccattttcacttcctttgacgctcctagtagttttgttaagtcttaccctgtaatttttgcttttaattttgatacctctttatgacttaacaataaaaatgatgtatggtttttatcaactgtctccaaaataatctcttgttatgcagggagtacagttcttttcattcatacataagttcagtagttgcttccctaactgcaaaggcaatctcatttagttgagtagctcttgaaagcagctttgagttagaagtatgtgtgttacacccccacattagtgtgctgtgtggggcagttcaacacaaatgtaacaatgtatttttgtgaatgagagttggcatgtcaaatgcatcctctagaaaaataattagtgttatagtcttaagatttgttttctaaagttgatactgtgggttatttttgtgaacagcctgatgtttgggaccttttttcctcaaaataaacaagtccttattaaaccaggggaaaaaa

SEQ ID NO: 3940 - protein, 140 aa, Homo sapiens; identical to SEQ ID NO: 3918

SEQ ID NO: 3941 - DNA, 1551 bp, Homo sapiens
ggccattttgtgaagagacgaagactgagcggttgcggccgcgttgccgacctccagcagcagtcggcttctctacgcagaacccgggagtaggagactcagaatcgaatctcttctccctccccttcttgttttcggctttgtgagaaaccttaccatcaaacacaatggccagcaacgttaccaacaagacagatcctcgttccatgaactcccgtgtattcattgggaatctcaacactcttgtggtcaagaaatctgatgtggaggcaatcttttcgaagtatggcaaaattgtgggctgctctgttcataagggctttgccttctttcagtatgttaatgagagaaatgcccgggctgctgtagcaggagaggatggcagaatgattgctggccaggttttagatattaactgtagtgccctcgaaacgtcagcgtgtatcaggaaacacttcacaaaggggcataagtggcttcaattctaagagtggacagcggggatcttccaagtctggaaagttgaaaggagatgaccttcaggccattaagagggagctgacccagataaaacaaaaagtggattctttcctggaaaacctggaaaaaattgaaaaggaacagagcaaacaagcagtagagatgaacaatgttaagtcagaagaggagcagagcagcagctccgtgaagaaagatgagactaatgtgaagatggagtctgaggggggtgcagatgactctgctgaggagggggacctactggatgatgatgataatgaagatggggggatgaccagctggagttgatcaaggatgatgaaaaagaggctgaggaaggagaggatgacagagacagcgccaatggcgaggatgactcttaagcacatagtggggtttagaaatcttatcccattatttctttacctaggcgcttgtctaagatcaaatttttcaccagatcctctcccctagtatcttcagcacatgctcactgttttccccatccttgtccttcccatgttcattaattaattcatattgccccgcgcctagtcccattttcacttcctttgacgctcctagtagttttgttaagtcttaccctgtaatttttgcttttaattttgatacctctttatgacttaacaataaaaatgatgtatggtttttatcaactgtctccaaaataatctcttgttatgcagggagtacagttcttttcattcatacataagttcagtagttgcttccctaactgcaaaggcaatctcatttagttgagtagctcttgaaagcagctttgagttagaagtatgtgtgttacacccccacattagtgtgctgtgtggggcagttcaacacaaatgtaacaatgtatttttgtgaatgagagttggcatgtcaaatgcatcctctagaaaaataattagtgttatagtcttaagatttgttttctaaagttgatactgtgggttatttttgtgaacagcctgatgtttgggaccttttttcctcaaaataaacaagtccttattaaaccaggggaaaaaa

SEQ ID NO: 3942 - protein, 106 aa, Homo sapiens; identical to SEQ ID NO: 3898

SEQ ID NO: 3943 - DNA, 1645 bp, Homo sapiens
ggccattttgtgaagagacgaagactgagcggttgcggccgcgttgccgacctccagcagcagtcggcttctctacgcagaacccgggagtaggagactcagaatcgaatctcttctccctccccttcttgttttcggctttgtgagaaaccttaccatcaaacacaatggccagcaacgttaccaacaagacagatcctcgttccatgaactcccgtgtattcattgggaatctcaacactcttgtggtcaagaaatctgatgtggaggcaatcttttcgaagtatggcaaaattgtgggctgctctgttcataagggctttgccttctttcagtatgttaatgagagaaatagccaaaagtgaaccgaggaaaagcaggtgtgaaacgatctgcagcggagatgtacggctcctcttttgacttggattgtgactttcaacgggactattatgataggatgtacagttacccagcacgtgtacctcctcctcctcctattgctcgggctgtagtgccctcgaaacgtcagcgtgtatcaggaaacacttcacaaaggggcataagtggcttcaattctaagagtggacagcggggatcttccaagtctggaaagttgaaaggagatgaccttcaggccattaagagggagctgacccagataaaacaaaaagtggattctttcctggaaaacctggaaaaaattgaaaaggaacagagcaaacaagcagtagagatgaacaatgttaagtcagaagaggagcagagcagcagctccgtgaagaaagatgagactaatgtgaagatggagtctgaggggggtgcagatgactctgctgaggagggggacctactggatgatgatgataatgaagatggggggatgaccagctggagttgatcaaggatgatgaaaaagaggctgaggaaggagaggatgacagagacagcgccaatggcgaggatgactcttaagcacatagtggggtttagaaatcttatcccattatttctttacctaggcgcttgtctaagatcaaatttttcaccagatcctctcccctagtatcttcagcacatgctcactgttttccccatccttgtccttcccatgttcattaattaattcatattgccccgcgcctagtcccattttcacttcctttgacgctcctagtagttttgttaagtcttaccctgtaatttttgcttttaattttgatacctctttatgacttaacaataaaaatgatgtatggtttttatcaactgtctccaaaataatctcttgttatgcagggagtacagttcttttcattcatacataagttcagtagttgcttccctaactgcaaaggcaatctcatttagttgagtagctcttgaaagcagctttgagttagaagtatgtgtgttacacccccacattagtgtgctgtgtggggcagttcaacacaaatgtaacaatgtatttttgtgaatgagagttggcatgtcaaatgcatcctctagaaaaataattagtgttatagtcttaagatttgttttctaaagttgatactgtgggttatttttgtgaacagcctgatgtttgggaccttttttcctcaaaataaacaagtccttattaaaccaggggaaaaaa

SEQ ID NO: 3944 - protein, 65 aa, Homo sapiens; identical to SEQ ID NO: 3910

SEQ ID NO: 3945 - DNA, 1495 bp, Homo sapiens
ggccattttgtgaagagacgaagactgagcggttgcggccgcgttgccgacctccagcagcagtcggcttctctacgcagaacccgggagtaggagactcagaatcgaatctcttctccctccccttcttgttttcggctttgtgagaaaccttaccatcaaacacaatggccagcaacgttaccaacaagacagatcctcgttccatgaactcccgtgtattcattgggaatctcaacactcttgtggtcaagaaatctgatgtggaggcaatcttttcgaagtatggcaaaattgtgggctgctctgttcataagggctttgccttctttcagtatgttaatgagagaaatgcccgggtgtagtgccctcgaaacgtcagcgtgtatcaggaaacacttcacaaaggggcataagtggcttcaattctaagagtggacagcggggatcttccaagtctggaaagttgaaaggagatgaccttcaggccattaagagggagctgacccagataaaacaaaaagtggattctttcctggaaaacctggaaaaaattgaaaaggaacagagcaaacaagcagtagagatgaacaatgttaagtcagaagaggagcagagcagcagctccgtgaagaaagatgagactaatgtgaagatggagtctgaggggggtgcagatgactctgctgaggagggggacctactggatgatgatgataatgaagatggggggatgaccagctggagttgatcaaggatgatgaaaaagaggctgaggaaggagaggatgacagagacagcgccaatggcgaggatgactcttaagcacatagtggggtttagaaatcttatcccattatttctttacctaggcgcttgtctaagatcaaatttttcaccagatcctctcccctagtatcttcagcacatgctcactgttttccccatccttgtccttcccatgttcattaattaattcatattgccccgcgcctagtcccattttcacttcctttgacgctcctagtagttttgttaagtcttaccctgtaatttttgcttttaattttgatacctctttatgacttaacaataaaaatgatgtatggtttttatcaactgtctccaaaataatctcttgttatgcagggagtacagttcttttcattcatacataagttcagtagttgcttccctaactgcaaaggcaatctcatttagttgagtagctcttgaaagcagctttgagttagaagtatgtgtgttacacccccacattagtgtgctgtgtggggcagttcaacacaaatgtaacaatgtatttttgtgaatgagagttggcatgtcaaatgcatcctctagaaaaataattagtgttatagtcttaagatttgttttctaaagttgatactgtgggttatttttgtgaacagcctgatgtttgggaccttttttcctcaaaataaacaagtccttattaaaccaggggaaaaaa

SEQ ID NO: 3946 - protein, 65 aa, Homo sapiens; identical to SEQ ID NO: 3912

SEQ ID NO: 3947 - DNA, 1628 bp, Homo sapiens
ggccattttgtgaagagacgaagactgagcggttgcggccgcgttgccgacctccagcagcagtcggcttctctacgcagaacccgggagtaggagactcagaatcgaatctcttctccctccccttcttgttttcggctttgtgagaaaccttaccatcaaacacaatggccagcaacgttaccaacaagacagatcctcgttccatgaactcccgtgtattcattgggaatctcaacactcttgtggtcaagaaatctgatgtggaggcaatcttttcgaagtatggcaaaattgtgggctgctctgttcataagggctttgccttctttcagtatgttaatgagagaaatgcccgggctgctgtagcaggagaggatggcagaatgattgctggccaggttttagatattaacctggctgcagagccaaaagtgaaccgaggaaaagcaggtgtgaaacgatctgcagcggagatgtacggctcctcttttgacttggattgtgactttcaacgggactattatgataggatgtacagttacccagcacgtgtacctcctcctcctcctattgctcgggctgtagtgccctcgaaacgtcagcgtgtatcaggaaacacttcacaaaggggcataagtggcttcaattctaagatggattctttcctggaaaacctggaaaaaattgaaaaggaacagagcaaacaagcagtagagatgaacaatgttaagtcagaagaggagcagagcagcagctccgtgaagaaagatgagactaatgtgaagatggagtctgaggggggtgcagatgactctgctgaggagggggacctactggatgatgatgataatgaagatggggggatgaccagctggagttgatcaaggatgatgaaaaagaggctgaggaaggagaggatgacagagacagcgccaatggcgaggatgactcttaagcacatagtggggtttagaaatcttatcccattatttctttacctaggcgcttgtctaagatcaaatttttcaccagatcctctcccctagtatcttcagcacatgctcactgttttccccatccttgtccttcccatgttcattaattaattcatattgccccgcgcctagtcccattttcacttcctttgacgctcctagtagttttgttaagtcttaccctgtaatttttgcttttaattttgatacctctttatgacttaacaataaaaatgatgtatggtttttatcaactgtctccaaaataatctcttgttatgcagggagtacagttcttttcattcatacataagttcagtagttgcttccctaactgcaaaggcaatctcatttagttgagtagctcttgaaagcagctttgagttagaagtatgtgtgttacacccccacattagtgtgctgtgtggggcagttcaacacaaatgtaacaatgtatttttgtgaatgagagttggcatgtcaaatgcatcctctagaaaaataattagtgttatagtcttaagatttgttttctaaagttgatactgtgggttatttttgtgaacagcctgatgtttgggaccttttttcctcaaaataaacaagtccttattaaaccaggggaaaaaa

SEQ ID NO: 3948 - protein, 238 aa, Homo sapiens; identical to SEQ ID NO: 3908

SEQ ID NO: 3949 - DNA, 1517 bp, Homo sapiens
ggccattttgtgaagagacgaagactgagcggttgcggccgcgttgccgacctccagcagcagtcggcttctctacgcagaacccgggagtaggagactcagaatcgaatctcttctccctccccttcttgttttcggctttgtgagaaaccttaccatcaaacacaatggccagcaacgttaccaacaagacagatcctcgttccatgaactcccgtgtattcattgggaatctcaacactcttgtggtcaagaaatctgatgtggaggcaatcttttcgaactcctcttttgacttggattgtgactttcaacgggactattatgataggatgtacagttacccagcacgtgtacctcctcctcctcctattgctcgggctgtagtgccctcgaaacgtcagcgtgtatcaggaaacacttcacaaaggggcataagtggcttcaattctaagagtggacagcggggatcttccaagtctggaaagttgaaaggagatgaccttcaggccattaagagggagctgacccagataaaacaaaaagtggattctttcctggaaaacctggaaaaaattgaaaaggaacagagcaaacaagcagtagagatgaacaatgttaagtcagaagaggagcagagcagcagctccgtgaagaaagatgagactaatgtgaagatggagtctgaggggggtgcagatgactctgctgaggagggggacctactggatgatgatgataatgaagatggggggatgaccagctggagttgatcaaggatgatgaaaaagaggctgaggaaggagaggatgacagagacagcgccaatggcgaggatgactcttaagcacatagtggggtttagaaatcttatcccattatttctttacctaggcgcttgtctaagatcaaatttttcaccagatcctctcccctagtatcttcagcacatgctcactgttttccccatccttgtccttcccatgttcattaattaattcatattgccccgcgcctagtcccattttcacttcctttgacgctcctagtagttttgttaagtcttaccctgtaatttttgcttttaattttgatacctctttatgacttaacaataaaaatgatgtatggtttttatcaactgtctccaaaataatctcttgttatgcagggagtacagttcttttcattcatacataagttcagtagttgcttccctaactgcaaaggcaatctcatttagttgagtagctcttgaaagcagctttgagttagaagtatgtgtgttacacccccacattagtgtgctgtgtggggcagttcaacacaaatgtaacaatgtatttttgtgaatgagagttggcatgtcaaatgcatcctctagaaaaataattagtgttatagtcttaagatttgttttctaaagttgatactgtgggttatttttgtgaacagcctgatgtttgggaccttttttcctcaaaataaacaagtccttattaaaccaggggaaaaaa

SEQ ID NO: 3950 - protein, 201 aa, Homo sapiens; identical to SEQ ID NO: 3906

SEQ ID NO: 3951 - DNA, 1144 bp, Homo sapiens
ggccattttgtgaagagacgaagactgagcggttgcggccgcgttgccgacctccagcagcagtcggcttctctacgcagaacccgggagtaggagactcagaatcgaatctcttctccctccccttcttgttttcggctttgtgagaaaccttaccatcaaacacaatggccagcaacgttaccaacaagacagatcctcgttccatgaactcccgtgtattcattgggaatctcaacactcttgtggtcaagaaatctgatgtggaggcaatcttttcgaaaaagatgagactaatgtgaagatggagtctgaggggggtgcagatgactctgctgaggagggggacctactggatgatgatgataatgaagatggggggatgaccagctggagttgatcaaggatgatgaaaaagaggctgaggaaggagaggatgacagagacagcgccaatggcgaggatgactcttaagcacatagtggggtttagaaatcttatcccattatttctttacctaggcgcttgtctaagatcaaatttttcaccagatcctctcccctagtatcttcagcacatgctcactgttttccccatccttgtccttcccatgttcattaattaattcatattgccccgcgcctagtcccattttcacttcctttgacgctcctagtagttttgttaagtcttaccctgtaatttttgcttttaattttgatacctctttatgacttaacaataaaaatgatgtatggtttttatcaactgtctccaaaataatctcttgttatgcagggagtacagttcttttcattcatacataagttcagtagttgcttccctaactgcaaaggcaatctcatttagttgagtagctcttgaaagcagctttgagttagaagtatgtgtgttacacccccacattagtgtgctgtgtggggcagttcaacacaaatgtaacaatgtatttttgtgaatgagagttggcatgtcaaatgcatcctctagaaaaataattagtgttatagtcttaagatttgttttctaaagttgatactgtgggttatttttgtgaacagcctgatgtttgggaccttttttcctcaaaataaacaagtccttattaaaccaggggaaaaaa

SEQ ID NO: 3952 - protein, 44 aa, Homo sapiens; identical to SEQ ID NO: 3902

SEQ ID NO: 3953 - DNA, 1507 bp, Homo sapiens
ggccattttgtgaagagacgaagactgagcggttgcggccgcgttgccgacctccagcagcagtcggcttctctacgcagaacccgggagtaggagactcagaatcgaatctcttctccctccccttcttgttttcggctttgtgagaaaccttaccatcaaacacaatggccagcaacgttaccaacaagacagatcctcgttccatgaactcccgtgtattcattgggaatctcaacactcttgtggtcaagaaatctgatgtggaggcaatcttttcgaagtatggcaaaattgtgggctgctctgttcataagggctttgccttctttcagtatcacgtgtacctcctcctcctcctattgctcgggctgtagtgccctcgaaacgtcagcgtgtatcaggaaacacttcacaaaggggcataagtggcttcaattctaagagtggacagcggggatcttccaagtctggaaagttgaaaggagatgaccttcaggccattaagagggagctgacccagataaaacaaaaagtggattctttcctggaaaacctggaaaaaattgaaaaggaacagagcaaacaagcagtagagatgaacaatgttaagtcagaagaggagcagagcagcagctccgtgaagaaagatgagactaatgtgaagatggagtctgaggggggtgcagatgactctgctgaggagggggacctactggatgatgatgataatgaagatggggggatgaccagctggagttgatcaaggatgatgaaaaagaggctgaggaaggagaggatgacagagacagcgccaatggcgaggatgactcttaagcacatagtggggtttagaaatcttatcccattatttctttacctaggcgcttgtctaagatcaaatttttcaccagatcctctcccctagtatcttcagcacatgctcactgttttccccatccttgtccttcccatgttcattaattaattcatattgccccgcgcctagtcccattttcacttcctttgacgctcctagtagttttgttaagtcttaccctgtaatttttgcttttaattttgatacctctttatgacttaacaataaaaatgatgtatggtttttatcaactgtctccaaaataatctcttgttatgcagggagtacagttcttttcattcatacataagttcagtagttgcttccctaactgcaaaggcaatctcatttagttgagtagctcttgaaagcagctttgagttagaagtatgtgtgttacacccccacattagtgtgctgtgtggggcagttcaacacaaatgtaacaatgtatttttgtgaatgagagttggcatgtcaaatgcatcctctagaaaaataattagtgttatagtcttaagatttgttttctaaagttgatactgtgggttatttttgtgaacagcctgatgtttgggaccttttttcctcaaaataaacaagtccttattaaaccaggggaaaaaa

SEQ ID NO: 3954 - protein, 69 aa, Homo sapiens; identical to SEQ ID NO: 3896

SEQ ID NO: 3955 - DNA, 1245 bp, Homo sapiens
cattttgtgaagagacgaagactgagcggttgcggccgcgttgccgacctccagcagcagtcggcttctctacgcagaacccgggagtaggagactcagaatcgaatctcttctccctccccttcttgttttcggctttgtgagaaaccttaccatcaaaaatctgatgtggaggcaatcttttcgaagtatggcaaaattgtgggctgctctgttcataagggctttgccttctttcagtatgttaatgagagaaatgcccgggctgctgtagcaggagaggatggcagaatgattgctggccaggttttagatattaacctggctgcagagccaaaagtgaaccgaggaaaagcaggtgtgaaacgatctgcagcggagatgtacggctcctcttttgacttggattgtgactttcaacgggactattatgataggatgtacagttacccagcacgtgtacctcctcctcctcctattgctcgggctgtagtgccctcgaaacgtcagcgtgtatcaggaaacacttcacaaaggggcataagtggcttcaattctaagagtggacagcggggatcttccaagtctggaaagttgaaaggagatgaccttcaggccattaagagggagctgacccagataaaacaaaaagtggattctttcctggaaaacctggaaaaaattgaaaaggaacagagcaaacaagcagtagagatgaacaatgttaagtcagaagaggagcagagcagcagctccgtgaagaaagatgagactaatgtgaagatggagtctgaggggggtgcagatgactctgctgaggagggggacctactggatgatgatgataatgaagatggggggatgaccagctggagttgatcaaggatgatgaaaaagaggctgaggaaggagaggatgacagagacagcgccaatggcgaggatgactcttaagcacatagtggggtttagaaatcttatcccattatttctttacctaggcgcttgtctaagatcaaatttttcaccagatcctctcccctagtatcttcagcacatgctcactgttttccccatccttgtccttcccatgttcattaattaattcatattgccccgcgcctagtcccattttcacttcctttgacgctcctagtagttttgttaagtcttaccctgtaatttttgcttttaattttgatacctctttatgacttaacaataaaaatgatgtatggtttttatc

SEQ ID NO: 3956 - protein, 195 aa, Homo sapiens
MIAGQVLDINLAAEPKVNRGKAGVKRSAAEMYGSSFDLDCDFQRDYYDRMYSYPARVPPPPPIARAVVPSKRQRVSGNTSQRGISGFNSKSGQRGSSKSGKLKGDDLQAIKRELTQIKQKVDSFLENLEKIEKEQSKQAVEMNNVKSEEEQSSSSVKKDETNVKMESEGGADDSAEEGDLLDDDDNEDGGMTSWS

SEQ ID NO: 3957 - DNA, 660 bp, Homo sapiens
cattttgtgaagagacgaagactgagcggttgcggccgcgttgccgacctccagcagcagtcggcttctctacgcagaacccgggagtaggagactcagaatcgaatctcttctccctccccttcttgttttcggaatgttaagtcagaagaggagcagagcagcagctccgtgaagaaagatgagactaatgtgaagatggagtctgaggggggtgcagatgactctgctgaggagggggacctactggatgatgatgataatgaagatggggggatgaccagctggagttgatcaaggatgatgaaaaagaggctgaggaaggagaggatgacagagacagcgccaatggcgaggatgactcttaagcacatagtggggtttagaaatcttatcccattatttctttacctaggcgcttgtctaagatcaaatttttcaccagatcctctcccctagtatcttcagcacatgctcactgttttccccatccttgtccttcccatgttcattaattaattcatattgccccgcgcctagtcccattttcacttcctttgacgctcctagtagttttgttaagtcttaccctgtaatttttgcttttaattttgatacctctttatgacttaacaataaaaatgatgtatggtttttatc

SEQ ID NO: 3958 - protein, 52 aa, Homo sapiens [sequence omitted]

SEQ ID NO: 3959 - DNA, 878 bp, Homo sapiens
cattttgtgaagagacgaagactgagcggttgcggccgcgttgccgacctccagcagcagtcggcttctctacgcagaacccgggagtaggagactcagaatcgaatctcttctccctccccttcttgttttcggctttgtgagaaaccttaccatcaaacacaatggccagcaacgttaccaacaagacagatcctcgttccatgaactcccgtgtattcattgggaatctcaacactcctcctcctcctattgctcgggctgtagtgccctcgaaacgtcagcgtgtatcaggaaacacttcacaaaggggcataagtggcttcaattctaagagtggacagcggggatcttccaagtctggaaagttgaaaggaagcagcagctccgtgaagaaagatgagactaatgtgaagatggagtctgaggggggtgcagatgactctgctgaggagggggacctactggatgatgatgataatgaagatggggggatgaccagctggagttgatcaaggatgatgaaaaagaggctgaggaaggagaggatgacagagacagcgccaatggcgaggatgactcttaagcacatagtggggtttagaaatcttatcccattatttctttacctaggcgcttgtctaagatcaaatttttcaccagatcctctcccctagtatcttcagcacatgctcactgttttccccatccttgtccttcccatgttcattaattaattcatattgccccgcgcctagtcccattttcacttcctttgacgctcctagtagttttgttaagtcttaccctgtaatttttgcttttaattttgatacctctttatgacttaacaataaaaatgatgtatggtttttatc

SEQ ID NO: 3960 - protein, 115 aa, Homo sapiens
MASNVTNKTDPRSMNSRVFIGNLNTPPPPIARAVVPSKRQRVSGNTSQRGISGFNSKSGQRGSSKSGKLKGSSSSVKKDETNVKMESEGGADDSAEEGDLLDDDDNEDGGMTSWS

SEQ ID NO: 3961 - DNA, 1256 bp, Homo sapiens
cattttgtgaagagacgaagactgagcggttgcggccgcgttgccgacctccagcagcagtcggcttctctacgcagaacccgggagtaggagactcagaatcgaatctcttctccctccccttcttgttttcggctttgtgagaaaccttaccatcaaacacaatggccagcaacgttaccaacaagacagatcctcgttccatgaactcccgtgtattcattgggaatctcaacactcctcctcctcctattgctcgggctgtagtgccctcgaaacgtcagcgtgtatcaggaaacacttcacaaaggggcataagtggcttcaattctaagagtggacagcggggatcttccaagtctggaaagttgaaaggaagcagcagctccgtgaagaaagatgagactaatgtgaagatggagtctgaggggggtgcagatgactctgctgaggagggggacctactggatgatgatgataatgaagatggggggatgaccagctggagttgatcaaggatgatgaaaaagaggctgaggaaggagaggatgacagagacagcgccaatggcgaggatgactcttaagcacatagtggggtttagaaatcttatcccattatttctttacctaggcgcttgtctaagatcaaatttttcaccagatcctctcccctagtatcttcagcacatgctcactgttttccccatccttgtccttcccatgttcattaattaattcatattgccccgcgcctagtcccattttcacttcctttgacgctcctagtagttttgttaagtcttaccctgtaatttttgcttttaattttgatacctctttatgacttaacaataaaaatgatgtatggtttttatcaactgtctccaaaataatctcttgttatgcagggagtacagttcttttcattcatacataagttcagtagttgcttccctaactgcaaaggcaatctcatttagttgagtagctcttgaaagcagctttgagttagaagtatgtgtgttacacccccacattagtgtgctgtgtggggcagttcaacacaaatgtaacaatgtatttttgtgaatgagagttggcatgtcaaatgcatcctctagaaaaataattagtgttatagtcttaagatttgttttctaaagttgatactgtgggttatttttgtgaacagcctgatgtttgggaccttttttcctcaaaataaacaagtccttattaaaccaggggaaaaaa

SEQ ID NO: 3962 - protein, 115 aa, Homo sapiens; identical to SEQ ID NO: 3960

SEQ ID NO: 3963 - DNA, 1623 bp, Homo sapiens
cattttgtgaagagacgaagactgagcggttgcggccgcgttgccgacctccagcagcagtcggcttctctacgcagaacccgggagtaggagactcagaatcgaatctcttctccctccccttcttgttttcggctttgtgagaaaccttaccatcaaaaatctgatgtggaggcaatcttttcgaagtatggcaaaattgtgggctgctctgttcataagggctttgccttctttcagtatgttaatgagagaaatgcccgggctgctgtagcaggagaggatggcagaatgattgctggccaggttttagatattaacctggctgcagagccaaaagtgaaccgaggaaaagcaggtgtgaaacgatctgcagcggagatgtacggctcctcttttgacttggattgtgactttcaacgggactattatgataggatgtacagttacccagcacgtgtacctcctcctcctcctattgctcgggctgtagtgccctcgaaacgtcagcgtgtatcaggaaacacttcacaaaggggcataagtggcttcaattctaagagtggacagcggggatcttccaagtctggaaagttgaaaggagatgaccttcaggccattaagagggagctgacccagataaaacaaaaagtggattctttcctggaaaacctggaaaaaattgaaaaggaacagagcaaacaagcagtagagatgaacaatgttaagtcagaagaggagcagagcagcagctccgtgaagaaagatgagactaatgtgaagatggagtctgaggggggtgcagatgactctgctgaggagggggacctactggatgatgatgataatgaagatggggggatgaccagctggagttgatcaaggatgatgaaaaagaggctgaggaaggagaggatgacagagacagcgccaatggcgaggatgactcttaagcacatagtggggtttagaaatcttatcccattatttctttacctaggcgcttgtctaagatcaaatttttcaccagatcctctcccctagtatcttcagcacatgctcactgttttccccatccttgtccttcccatgttcattaattaattcatattgccccgcgcctagtcccattttcacttcctttgacgctcctagtagttttgttaagtcttaccctgtaatttttgcttttaattttgatacctctttatgacttaacaataaaaatgatgtatggtttttatcaactgtctccaaaataatctcttgttatgcagggagtacagttcttttcattcatacataagttcagtagttgcttccctaactgcaaaggcaatctcatttagttgagtagctcttgaaagcagctttgagttagaagtatgtgtgttacacccccacattagtgtgctgtgtggggcagttcaacacaaatgtaacaatgtatttttgtgaatgagagttggcatgtcaaatgcatcctctagaaaaataattagtgttatagtcttaagatttgttttctaaagttgatactgtgggttatttttgtgaacagcctgatgtttgggaccttttttcctcaaaataaacaagtccttattaaaccaggggaaaaaa

SEQ ID NO: 3964 - protein, 195 aa, Homo sapiens; identical to SEQ ID NO: 3956

SEQ ID NO: 3965 - DNA, 2818 bp, Homo sapiens
agattcactggtgtggcaagttgtctctcagactgtacatgcattaaaattttgcttggcattactcaaaagcaaaagaaaagtaaaaggaagaaacaagaacaagaaaaaagattatattgattttaaaatcatgcaaaaactgcaactctgtgtttatatttacctgtttatgctgattgttgctggtccagtggatctaaatgagaacagtgagcaaaaagaaaatgtggaaaaagaggggctgtgtaatgcatgtacttggagacaaaacactaaatcttcaagaatagaagccattaagatacaaatcctcagtaaacttcgtctggaaacagctcctaacatcagcaaagatgttataagacaacttttacccaaagctcctccactccgggaactgattgatcagtatgatgtccagagggatgacagcagcgatggctctttggaagatgacgattatcacgctacaacggaaacaatcattaccatgcctacagagtctgattttctaatgcaagtggatggaaaacccaaatgttgcttctttaaatttagctctaaaatacaatacaataaagtagtaaaggcccaactatggatatatttgagacccgtcgagactcctacaacagtgtttgtgcaaatcctgagactcatcaaacctatgaaagacggtacaaggtatactggaatccgatctctgaaacttgacatgaacccaggcactggtatttggcagagcattgatgtgaagacagtgttgcaaaattggctcaaacaacctgaatccaacttaggcattgaaataaaagctttagatgagaatggtcatgatcttgctgtaaccttcccaggaccaggagaagatgggctgaatccgtttttagaggtcaaggtaacagacacaccaaaaagatccagaagggattttggtcttgactgtgatgagcactcaacagaatcacgatgctgtcgttaccctctaactgtggattttgaagcttttggatgggattggattatcgctcctaaaagatataaggccaattactgctctggagagtgtgaatttgtatttttacaaaaatatcctcatactcatctggtacaccaagcaaaccccagaggttcagcaggcccttgctgtactcccacaaagatgtctccaattaatatgctatattttaatggcaaagaacaaataatatatgggaaaattccagcgatggtagtagaccgctgtgggtgctcatgagatttatattaagcgttcataacttcctaaaacatggaaggttttcccctcaacaattttgaagctgtgaaattaagtaccacaggctataggcctagagtatgctacagtcacttaagcataagctacagtatgtaaactaaaagggggaatatatgcaatggttggcatttaaccatccaaacaaatcatacaagaaagttttatgatttccagagtttttgagctagaaggagatcaaattacatttatgttcctatatattacaacatcggcgaggaaatgaaagcgattctccttgagttctgatgaattaaaggagtatgctttaaagtctatttctttaaagttttgtttaatatttacagaaaaatccacatacagtattggtaaaatgcaggattgttatataccatcattcgaatcatccttaaacacttgaatttatattgtatggtagtatacttggtaagataaaattccacaaaaatagggatggtgcagcatatgcaatttccattcctattataattgacacagtacattaacaatccatgccaacggtgctaatacgataggctgaatgtctgaggctaccaggtttatcacataaaaaacattcagtaaaatagtaagtttctcttttcttcaggtgcattttcctacacctccaaatgaggaatggattttctttaatgtaagaagaatcatttttctagaggttggctttcaattctgtagcatacttggagaaactgcattatcttaaaaggcagtcaaatggtgtttgtttttatcaaaatgtcaaaataacatacttggagaagtatgtaattttgtctttggaaaattacaacactgcctttgcaacactgcagtttttatggtaaaataatagaaatgatcgactctatcaatattgtataaaaagactgaaacaatgcatttatataatatgtatacaatattgttttgtaaataagtgtctccttttttatttactttggtatatttttacactaaggacatttcaaattaagtactaaggcacaaagacatgtcatgcatcacagaaaagcaactacttatatttcagagcaaattagcagattaaatagtggtcttaaaactccatatgttaatgattagatggttatattacaatcattttatatttttttacatgattaacattcacttatggattcatgatggctgtataaagtgaatttgaaatttcaatggtttactgtcattgtgtttaaatctcaacgttccattattttaatacttgcaaaaacattactaagtataccaaaataattgactctattatctgaaatgaagaataaactgatgctatctcaacaataactgttacttttattttataatttgataatgaatatatttctgcatttatttacttctgttttgtaaattgggattttgttaatcaaatttattgtactatgactaaatgaaattatttcttacatctaatttgtagaaacagtataagttatattaaagtgttttcacatttttttgaaagac

SEQ ID NO: 3966 - protein, 375 aa, Homo sapiens; identical to SEQ ID NO: 351

SEQ ID NO: 3967 - DNA, 403 bp, Homo sapiens
tagagatggggtctcattatactgcccaaactggtcttgaactcctggcctcaagcaatcctcctgcctcggtctctcaaagcactgggattacaggtgtgagccaccatgtccagcctactttcttttcttaaaggacaatggattgcagcaattttattaactaggacattattatgaggattgccagagtatgaatacagtcacctcaagaccttctgaagaccatctacaagaaatcccttaagactactaatttcagtctataccctagaactgacaaatattttgcaaatgacctctagattgcctgcaagtttgtagttggtgattacaataatatttacatttctgctttttgtaataattatgtactattaaataaacaatgttttaaaattac

SEQ ID NO: 3968 - protein, 42 aa, Homo sapiens
MGSHYTAQTGLELLASSNPPASVSQSTGITGVSHHVQPTFFS

SEQ ID NO: 3969 - DNA, 864 bp, Homo sapiens
actcctccatagttaacttgctacgtacatgaagccagaatagactagttcatatatccaagagcagggctcctgaagggcatggactctagcttattacagacataccctggcatctagcacaatacctggcacataatagacagcagtctgcagcctggaagaggaccctcaccagaacctgaccatcttagcactgtgttttggacttccaggctccataactcctccatttagaaagggagcatgagaagcactgaaaagtaaggcactgtgatctacacggaaaccatatattgggctcacagctactgaatgagaccgactggtggagacagtttagtgaacctggtaaacactacacgtgaagagtggtgaaagggaacattgattactgaagtgccctggagagggaaagcactggtcaacatcacatggacaaatttcattgttttctaaagatggcctggaagtagtctttgccactgcttcctccacaaacagctcttcataacatgggctgcatgaaatcaaagcaaactttcccatttcctaccatatatgaaggtgagaagcagcatgagagtgaagaaccctttatgccagaagagagatgtctacctaggatggcttctccagttaatgtcaaagaggaagtgaaggaacctccagggaccaatactgtgatcttggaatatgcacaccgcctgtctcaggatatcttgtgtgatgccttgcagcaatgggcatgcaataacatcaagtaccatgacattccatacattgagagtgaggggccttgaggctgtaggatgacaacactttgactgtggaggtgctagtttgaataaatgtgacaaaagc

SEQ ID NO: 3970 - protein, 95 aa, Homo sapiens
MGCMKSKQTFPFPTIYEGEKQHESEEPFMPEERCLPRMASPVNVKEEVKEPPGTNTVILEYAHRLSQDILCDALQQWACNNIKYHDIPYIESEGP

SEQ ID NO: 3971 - DNA, 1132 bp, Homo sapiens
actcctccatagttaacttgctacgtacatgaagccagaatagactagttcatatatccaagagcagggctcctgaagggcatggactctagcttattacagacataccctggcatctagcacaatacctggcacataatagacagcagtctgcagcctggaagaggaccctcaccagaacctgaccatcttagcactgtgttttggacttccaggctccataactcctccatttagaaagggagcatgagaagcactgaaaagtaaggcactgtgatctacacggaaaccatatattgggctcacagctactgaatgagaccgactggtggagacagtttagtgaacctggtaaacactacacgtgaagagtggtgaaagggaacattgattactgaagtgccctggagagggaaagcactggtcaacatcacatggacaaatttcattgttttctaaagatggcctggaagtagtctttgccactgcttcctccacaaacagctcttcataacatgggctgcatgaaatcaaagcaaactttcccatttcctaccatatatgaaggtgagaagcagcatgagagtgaagaaccctttatgccagaagagagatgtctacctaggatggcttctccagttaatgtcaaagaggaagtgaaggaacctccagggaccaatactgtgatcttggaatatgcacaccgcctgtctcaggatatcttgtgtgatgccttgcagcaatgggcatgcaataacatcaagtaccatgacattccatacattgagagtgaggggccttgaggctgtaggatgacaacactttgactgtggaggtgctagtttgaataaatgtgacaaaagcaaaaactggtgtgaaaaagtacaaataactatctggatttaaaaatgtgtctacgataatgtcactattataagaacaactaggatgaaatgcattttaagtacttctatgttaacagcaatttctgtttagtcttagattttagtcatctgaagggctgaacagaggtcctgtgacacccaataatcagctgaatgtcacagcacttcttcctaagtaatggcatcaccaaagaaaatgctaaggaataaaaactgccccaaattcc

SEQ ID NO: 3972 - protein, 95 aa, Homo sapiens; identical to SEQ ID NO: 3970

SEQ ID NO: 3973 - DNA, 1559 bp, Homo sapiens
actcctccatagttaacttgctacgtacatgaagccagaatagactagttcatatatccaagagcagggctcctgaagggcatggactctagcttattacagacataccctggcatctagcacaatacctggcacataatagacagcagtctgcagcctggaagaggaccctcaccagaacctgaccatcttagcactgtgttttggacttccaggctccataactcctccatttagaaagggagcatgagaagcactgaaaagtaaggcactgtgatctacacggaaaccatatattgggctcacagctactgaatgagaccgactggtggagacagtttagtgaacctggtaaacactacacgtgaagagtggtgaaagggaacattgattactgaagtgccctggagagggaaagcactggtcaacatcacatggacaaatttcattgttttctaaagatggcctggaagtagtctttgccactgcttcctccacaaacagctcttcataacatgggctgcatgaaatcaaagcaaactttcccatttcctaccatatatgaaggtgagaagcagcatgagagtgaagaaccctttatgccagaagagagatgtctacctaggatggcttctccagttaatgtcaaagaggaagtgaaggaacctccagggaccaatactgtgatcttggaatatgcacaccgcctgtctcaggatatcttgtgtgatgccttgcagcaatgggcatgcaataacatcaagtaccatgacattccatacattgagagtgaggggccttgaggctgtaggatgacaacactttgactgtggaggtgctagtttgaataaatgtgacaaaagcaaaaactggtgtgaaaaagtacaaataactatctggatttaaaaatgtgtctacgataatgtcactattataagaacaactaggatgaaatgcattttaagtacttctatgttaacagcaatttctgtttagtcttagattttagtcatctgaagggctgaacagaggtcctgtgacacccaataatcagctgaatgtcacagcacttcttcctaagtaatggcatcaccaaagaaaatgctaaggaataaaaactgccccaaattccaatggttgaagtttatcctttaaaataacaatttttgtttgtttatacccaaaaaaagtccagatatgaaaagggcttttctaaaatttcttggcgagggaatggcactcaaatcatagtgattaacagtaagtcttgtttgtttgtcaaggatctctacttcttgacacaaatgaaccctgtctttaataagataagatatttatttttgtagatgagaagtgtaactaccaccttggacctcagggccctaactaattacagctgttactggacgactcagactttgtgcctaaagccatcttagagataacagtttatagaagccatgacattagtgtttattgcattgaattaagcccagtgatataactatacaagaaaacaagtaggggtaccttttacaaagagcaatccaataaatctt

SEQ ID NO: 3974 - protein, 95 aa, Homo sapiens; identical to SEQ ID NO: 3970

SEQ ID NO: 3975 - DNA, 746 bp, Homo sapiens
ccagaatagactagttcatatatccaagagcagggctcctgaagggcatggactctagcttattacagacataccctggcatctagcacaatacctggcacataatagcctccatttagaaagggagcatgagaagcactgaaaagtaaggcactgtgatctacacggaaaccatatattgggctcacagctactgaatgagaccgactggtggagacagtttagtgaacctggtaaacactacacgtgaagagtggtgaaagggaacattgattactgaagtgccctggagagggaaagcactggtcaacatcacatggacaaatttcattgttttctaaagatggcctggaagtagtctttgccactgcttcctccacaaacagctcttcataacatgggctgcatgaaatcaaagcaaactttcccatttcctaccatatatgaaggtgagaagcagcatgagagtgaagaaccctttatgccagaagagagatgtctacctaggatggcttctccagttaatgtcaaagaggaagtgaaggaacctccagggaccaatactgtgatcttggaatatgcacaccgcctgtctcaggatatcttgtgtgatgccttgcagcaatgggcatgcaataacatcaagtaccatgacattccatacattgagagtgaggggccttgaggctgtaggatgacaacactttgactgtggaggtgctagtttgaataaatgtgacaaaagc

SEQ ID NO: 3976 - protein, 95 aa, Homo sapiens; identical to SEQ ID NO: 3970

SEQ ID NO: 3977 - DNA, 1014 bp, Homo sapiens
ccagaatagactagttcatatatccaagagcagggctcctgaagggcatggactctagcttattacagacataccctggcatctagcacaatacctggcacataatagcctccatttagaaagggagcatgagaagcactgaaaagtaaggcactgtgatctacacggaaaccatatattgggctcacagctactgaatgagaccgactggtggagacagtttagtgaacctggtaaacactacacgtgaagagtggtgaaagggaacattgattactgaagtgccctggagagggaaagcactggtcaacatcacatggacaaatttcattgttttctaaagatggcctggaagtagtctttgccactgcttcctccacaaacagctcttcataacatgggctgcatgaaatcaaagcaaactttcccatttcctaccatatatgaaggtgagaagcagcatgagagtgaagaaccctttatgccagaagagagatgtctacctaggatggcttctccagttaatgtcaaagaggaagtgaaggaacctccagggaccaatactgtgatcttggaatatgcacaccgcctgtctcaggatatcttgtgtgatgccttgcagcaatgggcatgcaataacatcaagtaccatgacattccatacattgagagtgaggggccttgaggctgtaggatgacaacactttgactgtggaggtgctagtttgaataaatgtgacaaaagcaaaaactggtgtgaaaaagtacaaataactatctggatttaaaaatgtgtctacgataatgtcactattataagaacaactaggatgaaatgcattttaagtacttctatgttaacagcaatttctgtttagtcttagattttagtcatctgaagggctgaacagaggtcctgtgacacccaataatcagctgaatgtcacagcacttcttcctaagtaatggcatcaccaaagaaaatgctaaggaataaaaactgccccaaattcc

SEQ ID NO: 3978 - protein, 95 aa, Homo sapiens; identical to SEQ ID NO: 3970

SEQ ID NO: 3979 - DNA, 1441 bp, Homo sapiens
ccagaatagactagttcatatatccaagagcagggctcctgaagggcatggactctagcttattacagacataccctggcatctagcacaatacctggcacataatagcctccatttagaaagggagcatgagaagcactgaaaagtaaggcactgtgatctacacggaaaccatatattgggctcacagctactgaatgagaccgactggtggagacagtttagtgaacctggtaaacactacacgtgaagagtggtgaaagggaacattgattactgaagtgccctggagagggaaagcactggtcaacatcacatggacaaatttcattgttttctaaagatggcctggaagtagtctttgccactgcttcctccacaaacagctcttcataacatgggctgcatgaaatcaaagcaaactttcccatttcctaccatatatgaaggtgagaagcagcatgagagtgaagaaccctttatgccagaagagagatgtctacctaggatggcttctccagttaatgtcaaagaggaagtgaaggaacctccagggaccaatactgtgatcttggaatatgcacaccgcctgtctcaggatatcttgtgtgatgccttgcagcaatgggcatgcaataacatcaagtaccatgacattccatacattgagagtgaggggccttgaggctgtaggatgacaacactttgactgtggaggtgctagtttgaataaatgtgacaaaagcaaaaactggtgtgaaaaagtacaaataactatctggatttaaaaatgtgtctacgataatgtcactattataagaacaactaggatgaaatgcattttaagtacttctatgttaacagcaatttctgtttagtcttagattttagtcatctgaagggctgaacagaggtcctgtgacacccaataatcagctgaatgtcacagcacttcttcctaagtaatggcatcaccaaagaaaatgctaaggaataaaaactgccccaaattccaatggttgaagtttatcctttaaaataacaatttttgtttgtttatacccaaaaaaagtccagatatgaaaagggcttttctaaaatttcttggcgagggaatggcactcaaatcatagtgattaacagtaagtcttgtttgtttgtcaaggatctctacttcttgacacaaatgaaccctgtctttaataagataagatatttatttttgtagatgagaagtgtaactaccaccttggacctcagggccctaactaattacagctgttactggacgactcagactttgtgcctaaagccatcttagagataacagtttatagaagccatgacattagtgtttattgcattgaattaagcccagtgatataactatacaagaaaacaagtaggggtaccttttacaaagagcaatccaataaatctt

SEQ ID NO: 3980 - protein, 95 aa, Homo sapiens; identical to SEQ ID NO: 3970

SEQ ID NO: 3981 - DNA, 427 bp, Homo sapiens
aggagatagtatcagatcccacaggtttgatcctacaagactgcccaacttcagatgccgactgcaaaccccaggctgtggcctgatcagctggctataaattggacttccaatgacccccaccttgaattctattaatttgctggagcagctcacagaacttggggaaacactttatttacctctactcatttattataaagaaaggatacaaagagccagatggaagagatgcataaaggaagatgctgcaacccaccgagaacaacattagactatactatgcccacattaattactttccccctcatcaccttagaaaatactttcatttttcagtattgtgtggacacctgtgagctggttattttgaaaaaggaaaaacccaaccaattaaaatggactgctctattaaagaacataacat

SEQ ID NO: 3982 - protein, 67 aa, Homo sapiens
MEEMHKGRCCNPPRTTLDYTMPTLITFPLITLENTFIFQYCVDTCELVILKKEKPNQLKWTALLKNI

SEQ ID NO: 3983 - DNA, 761 bp, Homo sapiens
aaatgggagtttccctgcacaagctctctctctttgcctgccaccatccatgtaagatgtgacttgcttctccttgccttctgccatgattgtgaggactccccagccacgtggaactgatcagcagatctgttttcactacctcaaggtacacagccccaaacactgcccatccccagctccccatgcacatctttcctgttggagaaaccaggagagagatgagcatttctgttccagttccgaactccccagagagattctgatgggcccagcttaggtcaggggatagtcttcactcaagagttcctgagataacagagactggagtagcaggcattgcagaactgattttataaaggaagaacgtgtaccataaatattgctagttaagagcatgtatactgttgagttctacctcctcagaagtctaaaaggtttccttcctttgagggtgaagaagcagtaacaggcgtcctccatcagacccctctctgtgggcacctagaacacttcccattgacgtctgcttcaaggggaggtcactaaaagtgccccacatgatgcagcagacatttcgctggtcccagtgccctccccaagaccttccagatggtgaagtgttaagagtctaaaatggagtaaatgatctgcagaaattcagtggtgtcagaggagccagtccaaagtcactcggctctaaacgctgcgattctattattttaatgatgcccaggaacacaaagaggcacgacagaccc

SEQ ID NO: 3984 - protein, 64 aa, Homo sapiens
MIVRTPQPRGTDQQICFHYLKVHSPKHCPSPAPHAHLSCWRNQERDEHFCSSSELPREILMGPA

SEQ ID NO: 3985 - DNA, 2400 bp, Homo sapiens
gccgccgccgcggccaagcgagcgccgtcggggcgggtgggcgggaagaagcggcgggcccgaggtgggggggagcagagagagcgcgcccaccaccttcccttcccccctcgatgggagcgggggcgtcccggctcctgcagccgccagaggagggagagccgggggccgtcgcttcggagttggggctgagcagtcctcggggagagcgcgccaagaccgctgcagccgctggctgacggaaggagagttttacatggaagtggcttacagaaacttggcgctgaggtgcagggaagccagaaactctttgtgtctctaaggccgatgaggaatttggaaacacatgtgggacatacaagcgttggatatagaggactgagcagggggaggaacatttaagctgatggaagtggaagtggaagttgctgtacattggcagcaaggcctccgagttagcttttgaatgcagttaactggtttctcttaactgtggaattcattgaaaagtcagactccgagtggtcgttccaggatatcttgaaaagcccaggttaaacccatccagagtaatggctgcggccttacccaggaccctgggggagttgcagctgtatagaatattacaaaaagccaatctactttcttattttgatgcctttatccaacaaggtggtgatgatgtccagcaactctgtgaagcaggagaagaggagtttttggaaatcatggcactcgtgggcatggctagcaagccccttcatgttagaaggctgcagaaggctttgagagactgggtcacaaaccctgggcttttcaatcagccactgacttcccttcctgtcagtagcatacccatctataaattaccagagggatcaccaacatggctgggaatatcctgcagtagttatgaaaggagtagcaatgcccgggaacctcatttaaaaatccccaaatgtgctgccaccacctgtgtgcagagcttgggacaggggaagtcagatgtggttgggagcctagcactgcagagtgttggtgagtccagactctggcaaggccaccatgccactgagagcgagcacagcctctccccagcagacctgggctcccccgcgtccccaaaggagagcagtgaggcgctggatgctgctgctgcgctctctgtggctgagtgtgtggagcggatggcccccacactgccaaaaagtgacttgaatgaagtgaaagagctgctaaaaaccaacaagaagttggccaaaatgattggtcacatctttgagatgaacgatgatgatccacacaaagaggaggaaattcggaaatacagtgcaatatatggcagatttgactcaaagaggaaggatgggaaacatctcacacttcatgagctcactgttaatgaagcggctgctcaactctgtgtgaaggataatgccctgctgacaagaagagatgagctttttgccttggctcgacagatttctcgagaagtcacctataaatatacttacagaaccaccaagtcaaaatgtggagaaagagatgaattatccccaaagagaattaaagtggaggatgggtttccagatttccaggattctgtgcaaacactcttccagcaggctagagctaagagtgaagaacttgcagctcttagttcacagcagcctgaaaaggtgatggcaaagcagatggagttcctttgcaaccaagctggctatgagagactgcagcatgccgagaggaggttgtctgcagggctttacaggcagagctcagaagagcacagtcctaacggcttgacttccgataactcagatggacaaggagaaagacctttgaatctccgaatgcctaatttacagaacagacaaccccatcattttgtggtggatggggagctgagcagactttaccccagtgaggcaaagtcccactcatcagagagccttgggattttaaaagactaccctcattcagcttttaccttagaaaagaaagtcatcaaaacagagcctgaagattcaagatagctgtgatttctctcaccgttctctggaaatggcatcagatttaaggataatactccatcatagaaataagccttaataaccagtgttgcctcattcagctcaaacagatttcatagccaaagcaaaaggactggtacggtagtctgtggaaaccaggaagataaaacaacagccacaaaagagaaaatcaagagtgttgcaatctataacagtaatattgattcattcacattcctgtgttaagtcattttatatggaaaggcttacaaatcaatattgtaagcattcattatttaagaatgtacaatgtatttgtgtaatttatagaagtaaaatctagatgttgagacctgtttggtctaat

SEQ ID NO: 3986 - protein, 487 aa, Homo sapiens; identical to SEQ ID NO: 355

SEQ ID NO: 3987 - DNA, 4471 bp, Homo sapiens
gccgccgccgcggccaagcgagcgccgtcggggcgggtgggcgggaagaagcggcgggcccgaggtgggggggagcagagagagcgcgcccaccaccttcccttcccccctcgatgggagcgggggcgtcccggctcctgcagccgccagaggagggagagccgggggccgtcgcttcggagttggggctgagcagtcctcggggagagcgcgccaagaccgctgcagccgctggctgacggaaggagagttttacatggaagtggcttacagaaacttggcgctgaggtgcagggaagccagaaactctttgtgtctctaaggccgatgaggaatttggaaacacatgtgggacatacaagcgttggatatagaggactgagcagggggaggaacatttaagctgatggaagtggaagtggaagttgctgtacattggcagcaaggcctccgagttagcttttgaatgcagttaactggtttctcttaactgtggaattcattgaaaagtcagactccgagtggtcgttccaggatatcttgaaaagcccaggttaaacccatccagagtaatggctgcggccttacccaggaccctgggggagttgcagctgtatagaatattacaaaaagccaatctactttcttattttgatgcctttatccaacaaggtggtgatgatgtccagcaactctgtgaagcaggagaagaggagtttttggaaatcatggcactcgtgggcatggctagcaagccccttcatgttagaaggctgcagaaggctttgagagactgggtcacaaaccctgggcttttcaatcagccactgacttcccttcctgtcagtagcatacccatctataaattaccagagggatcaccaacatggctgggaatatcctgcagtagttatgaaaggagtagcaatgcccgggaacctcatttaaaaatccccaaatgtgctgccaccacctgtgtgcagagcttgggacaggggaagtcagatgtggttgggagcctagcactgcagagtgttggtgagtccagactctggcaaggccaccatgccactgagagcgagcacagcctctccccagcagacctgggctcccccgcgtccccaaaggagagcagtgaggcgctggatgctgctgctgcgctctctgtggctgagtgtgtggagcggatggcccccacactgccaaaaagtgacttgaatgaagtgaaagagctgctaaaaaccaacaagaagttggccaaaatgattggtcacatctttgagatgaacgatgatgatccacacaaagaggaggaaattcggaaatacagtgcaatatatggcagatttgactcaaagaggaaggatgggaaacatctcacacttcatgagctcactgttaatgaagcggctgctcaactctgtgtgaaggataatgccctgctgacaagaagagatgagctttttgccttggctcgacagatttctcgagaagtcacctataaatatacttacagaaccaccaagtcaaaatgtggagaaagagatgaattatccccaaagagaattaaagtggaggatgggtttccagatttccaggattctgtgcaaacactcttccagcaggctagagctaagagtgaagaacttgcagctcttagttcacagcagcctgaaaaggtgatggcaaagcagatggagttcctttgcaaccaagctggctatgagagactgcagcatgccgagaggaggttgtctgcagggctttacaggcagagctcagaagagcacagtcctaacggcttgacttccgataactcagatggacaaggagaaagacctttgaatctccgaatgcctaatttacagaacagacaaccccatcattttgtggtggatggggagctgagcagactttaccccagtgaggcaaagtcccactcatcagagagccttgggattttaaaagactaccctcattcagcttttaccttagaaaagaaagtcatcaaaacagagcctgaagattcaagatagctgtgatttctctcaccgttctctggaaatggcatcagatttaaggataatactccatcatagaaataagccttaataaccagtgttgcctcattcagctcaaacagatttcatagccaaagcaaaaggactggtacggtagtctgtggaaaccaggaagataaaacaacagccacaaaagagaaaatcaagagtgttgcaatctataacagtaatattgattcattcacattcctgtgttaagtcattttatatggaaaggcttacaaatcaatattgtaagcattcattatttaagaatgtacaatgtatttgtgtaatttatagaagtaaaatctagatgttgagacctgtttggtctaatagatgtggatacagtttattttacttgaaattttgttgtctactttgtgtgtttaacgtaaatatatgtcagagtttagaatctgcctgcagttgtgaaaaagaaagcttaagtgatgcagttattggcaagattgcaatgattatggaaaaatagaaagcgaatactcagtttaagccaaggaaaatattgtggatttaatatttgataaaactgattttgtttaacaggaaatttttagcattcagtcatataacatctggttatcaatgcacgtttacacaataaatacttgagtggaggaaagttaaaaagatgagcaatagagtagaaaatatatcttaaactagttgacctagattgtattaatagctacttaagatgtttcaaagataggaagctattgcttggacagagaacttgaaataagtggacccatgtataaaagctttgacttaaacattgatatttcagaatgtgttaaatagattaagacacagtaagttaaccctacatgttataaagatggcgactgttaacaaaggctgtaacagattaagtactattttatatccagaaagtcttctctatgtagagaagtcagagagactagatgctttcactagggaatgtcttcccacccagccatcacaaatgtggacaatcactgcatccacatctgtaggcatatttctatggaagtttaattgacagctatattcattatttattttacaatttcatttttctacacctttgagatttatgaatgcagttttttcttaaaatttattttaacttgacagtatgtttttagttcccccaatttaattaatggaccatgtgcatatatatgggagtgtgcttacatgttaataatttacttgcatacttatgagaatttcacattggaattcataatggtaaaacaacatacatctgccaatatacgttttttctgttggtttaagagaagataactgacagctttacctacttcctacagatgcatctaaacccagatattactgagaagagtgtattgactctgagtgtaagagagtatgtgtttttttgtttttagttctgctctagatcataattgtaaaaaatattaagtcataatctgttacactaaaatttgtcagccaaatgttagatgaaatgtctgcactgtagtctcagatcactgtcacgtatataaattgcttcttcattttaatttgtagaagtactttacagtaggaaacgccagtaaacaacttttatactgttaaaaggcttttttccccttcctaaatgttttaattgtaccatagtgttttgctcactgaagaagcttcttatggaccttgcaactttgttgctagcttgaggttgattattgtggttgtattgttcactgtgtgtagaaatagtatgagtacgatttcaatagactgttcagtttttaatattagccatagcactggttagtatatctcagtagtttcatgaaacgtttcctgtattctaatctattttgaaacattttgtttttttttaattgtgtcttacagtcaagtttgtagattttcataagccacaattttaaaagatgcagtaatcttccaacttccaatatttatccattcgttgtggacccacagattgcatctttaaattcataataagtttccttaactatcttatgtttctagtctttcaagcttagtgataaggtggaagcacaagaaaaatttcagtagaatacagtttttattttgtaaacactaatgtattaaacttgctatacattaaagcaaataatatatatttttatttgaattgtatatgtgaattggaagttataattagttgattttttcattttgttagaggtattttcactgaacaaggtcaattggttacctcagtattacagccaatatagtccaagggaccatttctccccgagtctcttacactttattgtgcgatgtccacgtttttgtgactcttcaagctgttggtgaggtgggacgaatgcacttgcttcctgtggcaataaagattttctgtgcctcacaca

SEQ ID NO: 3988 - protein, 487 aa, Homo sapiens; identical to SEQ ID NO: 355

SEQ ID NO: 3989 - DNA, 1174 bp, Homo sapiens
agagaagaaaaagacctaggatctcatgactgaacttgaattcttaaaaggactgagcagggggaggaacatttaagctgatggaagtggaagtggaagttgctgtacattggcagcaaggcctccgagttagcttttgaatgcagttaactggtttctcttaactgtggaattcattgaaaagtcagactccgagtggtcgttccaggatatcttgaaaagcccaggtaacagtggtgatgatgtccagcaactctgtgaagcaggagaagaggagtttttggaaatcatggcactcgtgggcatggctagcaagccccttcatgttagaaggctgcagaaggctttgagagactgggtcacaaaccctgggcttttcaatcagccactgacttcccttcctgtcagtagcatacccatctataaattaccagagggatcaccaacatggctgggaatatcctgcagtagttatgaaaggagtagcaatgcccgggaacctcatttaaaaatccccaaatgtgctgccaccacctgtgtgcagagcttgggacaggggaagtcagatgtggttgggagcctagcactgcagagtgttggtgagtccagactctggcaaggccaccatgccactgagagcgagcacagcctctccccagcagacctgggctcccccgcgtccccaaaggagagcagtgaggcgctggatgctgctgctgcgctctctgtggctgagtgtgtggagcggatggcccccacactgccaaaaagtgacttgaatgaagtgaaagagctgctaaaaaccaacaagaagttggccaaaatgattggtcacatctttgagatgaacgatgatgatccacacaaagaggaggaaattcggaaatacagtgcaatatatggcagatttgactcaaagaggaaggatgggaaacatctcacacttcatgaggtacaaagcccgcgttgttccttctgtgtgtgtatgtggcatgttgctagtcgttagagataaatttggtaatagtttgccacaaatgtgatacactacctgaaagcagtattaaaaacattgaggtgttagcaacatgtagcacttttgtgaaaatagaccatatttattgtgttcagggtatatttgtattgaacttgaacatgtttgagctttggaact

SEQ ID NO: 3990 - protein, 239 aa, Homo sapiens
MALVGMASKPLHVRRLQKALRDWVTNPGLFNQPLTSLPVSSIPIYKLPEGSPTWLGISCSSYERSSNAREPHLKIPKCAATTCVQSLGQGKSDVVGSLALQSVGESRLWQGHHATESEHSLSPADLGSPASPKESSEALDAAAALSVAECVERMAPTLPKSDLNEVKELLKTNKKLAKMIGHIFEMNDDDPHKEEEIRKYSAIYGRFDSKRKDGKHLTLHEVQSPRCSFCVCMWHVASR

SEQ ID NO: 3991 - DNA, 1651 bp, Homo sapiens
ttgaagcaagtatgatgagtttttacttttttttttttttttggcaggttaaacccatccagagtaatggctgcggccttacccaggaccctgggggagttgcagctgtatagaatattacaaaaagccaatctactttcttattttgatgcctttatccaacaaggtggtgatgatgtccagcaactctgtgaagcaggagaagaggagtttttggaaatcatggcactcgtgggcatggctagcaagccccttcatgttagaaggctgcagaaggctttgagagactgggtcacaaaccctgggcttttcaatcagccactgacttcccttcctgtcagtagcatacccatctataaattaccagagggatcaccaacatggctgggaatatcctgcagtagttatgaaaggagtagcaatgcccgggaacctcatttaaaaatccccaaatgtgctgccaccacctgtgtgcagagcttgggacaggggaagtcagatgtggttgggagcctagcactgcagagtgttggtgagtccagactctggcaaggccaccatgccactgagagcgagcacagcctctccccagcagacctgggctcccccgcgtccccaaaggagagcagtgaggcgctggatgctgctgctgcgctctctgtggctgagtgtgtggagcggatggcccccacactgccaaaaagtgacttgaatgaagtgaaagagctgctaaaaaccaacaagaagttggccaaaatgattggtcacatctttgagatgaacgatgatgatccacacaaagaggaggaaattcggaaatacagtgcaatatatggcagatttgactcaaagaggaaggatgggaaacatctcacacttgacccacaggatgggtttccagatttccaggattctgtgcaaacactcttccagcaggctagagctaagagtgaagaacttgcagctcttagttcacagagactgcagcatgccgagaggaggttgtctgcagggctttacaggcagagctcagaagagcacagtcctaacggcttgacttccgataactcagatggacaaggagaaagacctttgaatctccgaatgcctaatttacagaacagacaaccccatcattttgtggtggatggggagctgagcagactttaccccagtgaggcaaagtcccactcatcagagagccttgggattttaaaagactaccctcattcagcttttaccttagaaaagaaagtcatcaaaacagagcctgaagattcaagatagctgtgatttctctcaccgttctctggaaatggcatcagatttaaggataatactccatcatagaaataagccttaataaccagtgttgcctcattcagctcaaacagatttcatagccaaagcaaaaggactggtacggtagtctgtggaaaccaggaagataaaacaacagccacaaaagagaaaatcaagagtgttgcaatctataacagtaatattgattcattcacattcctgtgttaagtcattttatatggaaaggcttacaaatcaatattgtaagcattcattatttaagaatgtacaatgtatttgtgtaatttatagaagtaaaatctagatgttgagacctgtttggtctaat

SEQ ID NO: 3992 - protein, 406 aa, Homo sapiens
MAAALPRTLGELQLYRILQKANLLSYFDAFIQQGGDDVQQLCEAGEEEFLEIMALVGMASKPLHVRRLQKALRDWVTNPGLFNQPLTSLPVSSIPIYKLPEGSPTWLGISCSSYERSSNAREPHLKIPKCAATTCVQSLGQGKSDVVGSLALQSVGESRLWQGHHATESEHSLSPADLGSPASPKESSEALDAAAALSVAECVERMAPTLPKSDLNEVKELLKTNKKLAKMIGHIFEMNDDDPHKEEEIRKYSAIYGRFDSKRKDGKHLTLDPQDGFPDFQDSVQTLFQQARAKSEELAALSSQRLQHAERRLSAGLYRQSSEEHSPNGLTSDNSDGQGERPLNLRMPNLQNRQPHHFVVDGELSRLYPSEAKSHSSESLGILKDYPHSAFTLEKKVIKTEPEDSR

SEQ ID NO: 3993 - DNA, 3476 bp, Homo sapiens
ttgaagcaagtatgatgagtttttacttttttttttttttttggcaggttaaacccatccagagtaatggctgcggccttacccaggaccctgggggagttgcagctgtatagaatattacaaaaagccaatctactttcttattttgatgcctttatccaacaaggtggtgatgatgtccagcaactctgtgaagcaggagaagaggagtttttggaaatcatggcactcgtgggcatggctagcaagccccttcatgttagaaggctgcagaaggctttgagagactgggtcacaaaccctgggcttttcaatcagccactgacttcccttcctgtcagtagcatacccatctataaattaccagagggatcaccaacatggctgggaatatcctgcagtagttatgaaaggagtagcaatgcccgggaacctcatttaaaaatccccaaatgtgctgccaccacctgtgtgcagagcttgggacaggggaagtcagatgtggttgggagcctagcactgcagagtgttggtgagtccagactctggcaaggccaccatgccactgagagcgagcacagcctctccccagcagacctgggctcccccgcgtccccaaaggagagcagtgaggcgctggatgctgctgctgcgctctctgtggctgagtgtgtggagcggatggcccccacactgccaaaaagtgacttgaatgaagtgaaagagctgctaaaaaccaacaagaagttggccaaaatgattggtcacatctttgagatgaacgatgatgatccacacaaagaggaggaaattcggaaatacagtgcaatatatggcagatttgactcaaagaggaaggatgggaaacatctcacacttgacccacaggatgggtttccagatttccaggattctgtgcaaacactcttccagcaggctagagctaagagtgaagaacttgcagctcttagttcacagagactgcagcatgccgagaggaggttgtctgcagggctttacaggcagagctcagaagagcacagtcctaacggcttgacttccgataactcagatggacaaggagaaagacctttgaatctccgaatgcctaatttacagaacagacaaccccatcattttgtggtggatggggagctgagcagactttaccccagtgaggcaaagtcccactcatcagagagccttgggattttaaaagactaccctcattcagcttttaccttagaaaagaaagtcatcaaaacagagcctgaagattcaagatagctgtgatttctctcaccgttctctggaaatggcatcagatttaaggataatactccatcatagaaataagccttaataaccagtgttgcctcattcagctcaaacagatttcatagccaaagcaaaaggactggtacggtagtctgtggaaaccaggaagataaaacaacagccacaaaagagaaaatcaagagtgttgcaatctataacagtaatattgattcattcacattcctgtgttaagtcattttatatggaaaggcttacaaatcaatattgtaagcattcattatttaagaatgtacaatgtatttgtgtaatttatagaagtaaaatctagatgttgagacctgtttggtctaatagatgtggatacagtttattttacttgaaattttgttgtctactttgtgtgtttaacgtaaatatatgtcagagtttagaatctgcctgcagttgtgaaaaagaaagcttaagtgatgcagttattggcaagattgcaatgattatggaaaaatagaaagcgaatactcagtttaagccaaggaaaatattgtggatttaatatttgataaaactgattttgtttaacaggaaatttttagcattcagtcatataacatctggttatcaatgcacgtttacacaataaatacttgagtggaggaaagttaaaaagatgagcaatagagtagaaaatatatcttaaactagttgacctagattgtattaatagctacttaagatgtttcaaagataggaagctattgcttggacagagaacttgaaataagtggacccatgtataaaagctttgacttaaacattgatatttcagaatgtgttaaatagattaagacacagtaagttaaccctacatgttataaagatggcgactgttaacaaaggctgtaacagattaagtactattttatatccagaaagtcttctctatgtagagaagtcagagagactagatgctttcactagggaatgtcttcccacccagccatcacaaatgtggacaatcactgcatccacatctgtaggcatatttctatggaagtttaattgacagctatattcattatttattttacaatttcatttttctacacctttgagatttatgaatgcagttttttcttaaaatttattttaacttgacagtatgtttttagttcccccaatttaattaatggaccatgtgcatatatatgggagtgtgcttacatgttaataatttacttgcatacttatgagaatttcacattggaattcataatggtaaaacaacatacatctgccaatatacgttttttctgttggtttaagagaagataactgacagctttacctacttcctacagatgcatctaaacccagatattactgagaagagtgtattgactctgagtgtaagagagtatgtgtttttttgtttttagttctgctctagatcataattgtaaaaaatattaagtcataatctgttacactaaaatttgtcagccaaatgttagatgaaatgtctgcactgtagtctcagatcactgtcacgtatataaattgcttcttcattttaatttgtagaagtactttacagtaggaaacgccagtaaacaacttttatactgttaaaaggcttttttccccttcctaaatgttttaattgtaccatagtgttttgctcactgaagaagcttcttatggaccttgcaactttgttgctagcttgaggttgattattgtggttgtattgttcactgtgtgtagaaatagtatgagtacgatttcaatagactgttcagtttttaatattagccatagcactggttagtatatctcagtagtttcatgaaacgtttcctgtattctaatctattttgaaacattttgtttttttttaattgtgtcttacagtcaagtttgtagattttcataagccacaattttaaaagatgcagtaatcttccaacttccaatatttatccattcgttgtggacccacagattgcatctttaaattcataataagtttccttaactatcttatgtttctagtctttcaagcttagtgataaggtggaagcacaagaaaaatttcagtagaatacagtttttattttgtaaacactaatgtattaaacttgctatacattaaagcaaataatatatatttttatttg

SEQ ID NO: 3994 - protein, 406 aa, Homo sapiens; identical to SEQ ID NO: 3992

SEQ ID NO: 3995 - DNA, 3722 bp, Homo sapiens
ttgaagcaagtatgatgagtttttacttttttttttttttttggcaggttaaacccatccagagtaatggctgcggccttacccaggaccctgggggagttgcagctgtatagaatattacaaaaagccaatctactttcttattttgatgcctttatccaacaaggtggtgatgatgtccagcaactctgtgaagcaggagaagaggagtttttggaaatcatggcactcgtgggcatggctagcaagccccttcatgttagaaggctgcagaaggctttgagagactgggtcacaaaccctgggcttttcaatcagccactgacttcccttcctgtcagtagcatacccatctataaattaccagagggatcaccaacatggctgggaatatcctgcagtagttatgaaaggagtagcaatgcccgggaacctcatttaaaaatccccaaatgtgctgccaccacctgtgtgcagagcttgggacaggggaagtcagatgtggttgggagcctagcactgcagagtgttggtgagtccagactctggcaaggccaccatgccactgagagcgagcacagcctctccccagcagacctgggctcccccgcgtccccaaaggagagcagtgaggcgctggatgctgctgctgcgctctctgtggctgagtgtgtggagcggatggcccccacactgccaaaaagtgacttgaatgaagtgaaagagctgctaaaaaccaacaagaagttggccaaaatgattggtcacatctttgagatgaacgatgatgatccacacaaagaggaggaaattcggaaatacagtgcaatatatggcagatttgactcaaagaggaaggatgggaaacatctcacacttgacccacaggatgggtttccagatttccaggattctgtgcaaacactcttccagcaggctagagctaagagtgaagaacttgcagctcttagttcacagagactgcagcatgccgagaggaggttgtctgcagggctttacaggcagagctcagaagagcacagtcctaacggcttgacttccgataactcagatggacaaggagaaagacctttgaatctccgaatgcctaatttacagaacagacaaccccatcattttgtggtggatggggagctgagcagactttaccccagtgaggcaaagtcccactcatcagagagccttgggattttaaaagactaccctcattcagcttttaccttagaaaagaaagtcatcaaaacagagcctgaagattcaagatagctgtgatttctctcaccgttctctggaaatggcatcagatttaaggataatactccatcatagaaataagccttaataaccagtgttgcctcattcagctcaaacagatttcatagccaaagcaaaaggactggtacggtagtctgtggaaaccaggaagataaaacaacagccacaaaagagaaaatcaagagtgttgcaatctataacagtaatattgattcattcacattcctgtgttaagtcattttatatggaaaggcttacaaatcaatattgtaagcattcattatttaagaatgtacaatgtatttgtgtaatttatagaagtaaaatctagatgttgagacctgtttggtctaatagatgtggatacagtttattttacttgaaattttgttgtctactttgtgtgtttaacgtaaatatatgtcagagtttagaatctgcctgcagttgtgaaaaagaaagcttaagtgatgcagttattggcaagattgcaatgattatggaaaaatagaaagcgaatactcagtttaagccaaggaaaatattgtggatttaatatttgataaaactgattttgtttaacaggaaatttttagcattcagtcatataacatctggttatcaatgcacgtttacacaataaatacttgagtggaggaaagttaaaaagatgagcaatagagtagaaaatatatcttaaactagttgacctagattgtattaatagctacttaagatgtttcaaagataggaagctattgcttggacagagaacttgaaataagtggacccatgtataaaagctttgacttaaacattgatatttcagaatgtgttaaatagattaagacacagtaagttaaccctacatgttataaagatggcgactgttaacaaaggctgtaacagattaagtactattttatatccagaaagtcttctctatgtagagaagtcagagagactagatgctttcactagggaatgtcttcccacccagccatcacaaatgtggacaatcactgcatccacatctgtaggcatatttctatggaagtttaattgacagctatattcattatttattttacaatttcatttttctacacctttgagatttatgaatgcagttttttcttaaaatttattttaacttgacagtatgtttttagttcccccaatttaattaatggaccatgtgcatatatatgggagtgtgcttacatgttaataatttacttgcatacttatgagaatttcacattggaattcataatggtaaaacaacatacatctgccaatatacgttttttctgttggtttaagagaagataactgacagctttacctacttcctacagatgcatctaaacccagatattactgagaagagtgtattgactctgagtgtaagagagtatgtgtttttttgtttttagttctgctctagatcataattgtaaaaaatattaagtcataatctgttacactaaaatttgtcagccaaatgttagatgaaatgtctgcactgtagtctcagatcactgtcacgtatataaattgcttcttcattttaatttgtagaagtactttacagtaggaaacgccagtaaacaacttttatactgttaaaaggcttttttccccttcctaaatgttttaattgtaccatagtgttttgctcactgaagaagcttcttatggaccttgcaactttgttgctagcttgaggttgattattgtggttgtattgttcactgtgtgtagaaatagtatgagtacgatttcaatagactgttcagtttttaatattagccatagcactggttagtatatctcagtagtttcatgaaacgtttcctgtattctaatctattttgaaacattttgtttttttttaattgtgtcttacagtcaagtttgtagattttcataagccacaattttaaaagatgcagtaatcttccaacttccaatatttatccattcgttgtggacccacagattgcatctttaaattcataataagtttccttaactatcttatgtttctagtctttcaagcttagtgataaggtggaagcacaagaaaaatttcagtagaatacagtttttattttgtaaacactaatgtattaaacttgctatacattaaagcaaataatatatatttttatttgaattgtatatgtgaattggaagttataattagttgattttttcattttgttagaggtattttcactgaacaaggtcaattggttacctcagtattacagccaatatagtccaagggaccatttctccccgagtctcttacactttattgtgcgatgtccacgtttttgtgactcttcaagctgttggtgaggtgggacgaatgcacttgcttcctgtggcaataaagattttctgtgcctcacaca

SEQ ID NO: 3996 - protein, 406 aa, Homo sapiens; identical to SEQ ID NO: 3992

SEQ ID NO: 3997 - DNA, 723 bp, Homo sapiens
gtgcacatagtggccctaaaggcataggatattctaaagatgtaccttgtccatctgagttatcggaagtcaagccgttaggactgtgctcttctgagctctgcctgtaaagccctgcagacaacctcctctcggcatgctgcagtctctcatagccagcttggttgcaaaggaactccatctgctttgccatcaccttttcaggctgctactgaaagtggactcacagagggctgtgttccagtggacatgttattcattccgtctaagcagaaggattccaacctcacttactaactagctgaagaaacgtttccctagagatttcattccaaatggtaggttccttaaggcacacctaagctagcaggcgatctttttctccatgtccatctcatatattctaggaattaaagttcaaaatctgttttttaatgtttaacataccctgtaaggaggaacactatttaaggacaacagattatcttgattacttctatgcaatgtgtatactgctattttttttttaaatcaaataagtaactatcctttaagggggaacaacctactacataaataagagctttccaggtagaaaaatcagacaagtcaatgaattataacttcattccacccaagccttcatgtatagatcaggaaaacacagtatttaggaacgaaagatcttactgagcttgaacacagcactacttgtattagtgt

SEQ ID NO: 3998 - protein, 54 aa, Homo sapiens
MLQSLIASLVAKELHLLCHHLFRLLLKVDSQRAVFQWTCYSFRLSRRIPTSLTN

SEQ ID NO: 3999 - DNA, 717 bp, Homo sapiens
gcctgccaccatccatgtaagatgtgacttgcttctccttgccttctgccatgattgtgaggactccccagccacgtggaactgtacagacagtgcaaaggtggtgtgcctagtgagcttggatgtatcaaacagctgtaagaaaatctctccaaccttctctgaataaaggaggaatgtggtgtttattgaggaacaggcaacccttacatttgaataaaagatgccatatactgaaagtggactcacagagggctgtgttccagtggacatgttattcattccgtctaagcagaaggattccaacctcacttactaactagctgaagaaacgtttccctagagatttcattccaaatggtaggttccttaaggcacacctaagctagcaggcgatctttttctccatgtccatctcatatattctaggaattaaagttcaaaatctgttttttaatgtttaacataccctgtaaggaggaacactatttaaggacaacagattatcttgattacttctatgcaatgtgtatactgctattttttttttaaatcaaataagtaactatcctttaagggggaacaacctactacataaataagagctttccaggtagaaaaatcagacaagtcaatgaattataacttcattccacccaagccttcatgtatagatcaggaaaacacagtatttaggaacgaaagatcttactgagc

SEQ ID NO: 4000 - protein, 66 aa, Homo sapiens
MYQTAVRKSLQPSLNKGGMWCLLRNRQPLHLNKRCHILKVDSQRAVFQWTCYSFRLSRRIPTSLTN

SEQ ID NO: 4001 - DNA, 449 bp, Homo sapiens
cctcagtaaatattagcaataacttaaatgtttataagattcatctcatggattcttggggatatgcatggaatcaggtacagacagtgcaaaggtggtgtgcctagtgagcttggatgtatcaaacagctgtaagaaaatctctccaaccttctctgaataaaggaggaatgtggtgtttattgaggaacaggcaacccttacatttgaataaaagatgccatatactgaaagtggactcacagagggctgtgttccagtggacatgttattcattccgtctaagcagaaggattccaacctcacttactaactagctgaagaaacgtttccctagagatttcattccaaatggtaggttccttaaggcacacctaagctagcaggcgatctttttctccatgtccatctcatatattctaggaattaaagttcaaaatctgtttttt

SEQ ID NO: 4002 - protein, 66 aa, Homo sapiens; identical to SEQ ID NO: 4000

SEQ ID NO: 4003 - DNA, 5127 bp, Homo sapiens
actggcgaggagatgaaggggtcgtcttcatcttcgccggatgatttccgcccacatagagggcgccagtgacgcccacacacgtgctggtgtcccgggaagagttcctggcaaagagctcaggaacgttggatcttaatcaaggctttctccgtcggggtggatgggttggactttaggctccagcaagccccgccccactcggcgggtcggtgccgccgggtcccaggtgcccgctacttcccagaacctccgcctcccgctccgggccctcgaaccagcgcggacaccacaatggaccgggcgtccgagctgctcttctacgtgaacggccgcaaggtgatagaaaaaaatgtcgatcctgaaacaatgctgttgccttatttgaggaagaagcttcgactcacaggaactaagtatggctgtggaggaggaggctgtggtgcttgtacagtgatgatatcacgatacaaccccatcaccaagaggataaggcatcacccagccaatgcctgtctgattcccatctgttctctgtatggtgctgccgtcaccacagtagaaggcataggaagcacccacaccagaattcatcctgttcaggagaggattgccaagtgtcatggcacccagtgtggcttctgcacacctgggatggtgatgtccatctacacgctgctcaggaaccacccagagcccactctggatcagttaactgatgcccttggtggtaacctgtgccgttgcactggatacaggcccataattgatgcatgcaagactttctgtaaaacttcgggctgctgtcaaagtaaagaaaatggggtttgctgtttggatcaaggaatcaatggattgccagaatttgaggaaggaagtaagacaagtccaaaactcttcgcagaagaggagtttctgccattggatccaacccaggaactgatatttcctcctgagctaatgataatggctgagaaacagtcgcaaaggaccagggtgtttggcagtgagagaatgatgtggttttcccccgtgaccctgaaggaactgctggaatttaaattcaagtatccccaggctcctgttatcatgggaaacacctctgtggggcctgaagtgaaatttaaaggcgtctttcacccagttataatttctcctgatagaattgaagaactgagtgttgtaaaccatgcatataatggactcacccttggtgctggtctcagcctagcccaggtgaaggacattttggctgatgtagtccagaagcttccagaggagaagacacagatgtaccatgctctcctgaagcatttgggaactctggctgggtcccagatcaggaacatggcttctttagggggacacatcattagcaggcatccagattcagatctgaatcccatcctggctgtgggtaactgtaccctcaacttgctatcaaaagaaggaaaacgacagattcctttaaatgagcaattcctcagcaagtgccctaatgcagatcttaagcctcaagaaatcttggtctcagtgaacatcccctactcaaggaagtgggaatttgtgtcagccttccgacaagcccagcgacaggagaatgcgctagcgatagtcaattcaggaatgagagtcttttttggagaaggggatggcattattagagagttatgcatctcatatggaggcgttggtccagccaccatctgtgccaagaattcctgccagaaactcattggaaggcactggaacgaacagatgctggatatagcctgcaggcttattctgaatgaagtctcccttttgggctcggcgccaggtgggaaagtggagttcaagaggactctcatcatcagcttcctcttcaagttctacctggaagtgtcacagattttgaaaaagatggatccagttcactatcctagccttgcagacaagtatgaaagtgctttagaagatcttcattccaaacatcactgcagtacattaaagtaccagaatataggcccaaagcagcatcctgaagacccaattggccaccccatcatgcatctgtctggtgtgaagcatgccacgggggaggccatctactgtgatgacatgcctctggtggaccaggaacttttcttgacttttgtgactagttcaagagctcatgctaagattgtgtctattgatctgtcagaagctctcagcatgcccggtgtggtggacatcatgacagcagaacatcttagtgacgtcaactccttctgcttttttactgaagctgagaaatttctggcgacagataaggtgttctgtgtgggtcagcttgtctgtgctgtgcttgccgattctgaggttcaggcaaagcgagctgctaagcgagtgaagattgtctatcaagacttggagccgctgatactaacaattgaggaaagtatacaacacaactcctccttcaagccagaaaggaaactggaatatggaaatgttgacgaagcatttaaagtggttgatcaaattcttgaaggtgaaatacatatgggaggtcaagaacatttttatatggaaacccaaagcatgcttgtcgttcccaagggagaggatcaagaaatggatgtctacgtgtccacacagtttcccaaatatatacaggacattgttgcctcaaccttgaagctcccagctaacaaggtcatgtgccatgtaaggcgtgttggtggagcgtttggagggaaggtgttaaaaaccggaatcattgcagccgtcactgcatttgccgcaaacaaacatggccgtgcagttcgctgtgttctggaacgaggagaagacatgttaataactggaggccgccatccttaccttggaaagtacaaagctggattcatgaacgatggcagaatcttggccctggacatggagcattacagcaatgcaggcgcctccttggatgaatcattattcgtgatagaaatgggacttctgaaaatggacaatgcttacaagtttcccaatctccgctgccggggttgggcatgcagaaccaaccttccatccaacacagcttttcgtgggtttggctttcctcaggcagcgctgatcaccgaatcttgtatcacggaagttgcagccaaatgtggactatcccctgagaaggtgcgaatcataaacatgtacaaggaaattgatcaaacaccctacaaacaagagatcaatgccaagaacctaatccagtgttggagagaatgtatggccatgtcttcctactccttgaggaaagttgctgtggaaaagttcaatgcagagaattattggaagaagaaaggactggccatggtccccctgaagtttcctgttggccttggctcacgtgctgctggtcaggctgctgccttggttcacatttatcttgatggctctgtgctggtcactcacggtggaattgaaatggggcagggggtccacactaaaatgattcaggtggtcagccgtgaattaagaatgccaatgtcgaatgtccacctgcgtggaacaagcacagaaactgtccctaatgcaaatatctctggaggttctgtggtggcagatctcaacggtttggcagtaaaggatgcctgtcaaactcttctaaaacgcctcgaacccatcatcagcaagaatcctaaaggaacttggaaagactgggcacagactgcttttgatgaaagcattaacctttcagctgttggatacttcagaggttatgagtcagacatgaactgggagaaaggcgaaggccagcccttcgaatactttgtttatggagctgcctgttccgaggttgaaatagactgcctgacgggggatcataagaacatcagaacagacattgtcatggatgttggctgcagtataaatccagccattgacataggccagattgaaggtgcatttattcaaggcatgggactttatacaatagaggaactgaattattctccccagggcattctgcacactcgtggtccagaccaatataaaatccctgccatctgtgacatgcccacggagttgcacattgctttgttgcctccttctcaaaactcaaatactctttattcatctaagggtctgggagagtcgggggtgttcctggggtgttccgtgtttttcgctatccatgacgcagtgagtgcagcacgacaggagagaggcctgcatggacccttgacccttaatagtccactgaccccggagaagattaggatggcctgtgaagacaagttcacaaaaatgattccgagagatgaacctggatcctacgttccttggaatgtacccatctgaatcaaatgcaaacttctggagaaaacagagtgcctcttcccagatggcaatctgtcctatctctgtgctggaagatgctagatctgaaagacagagtttccacagttcagaaatcatcccacagtgttgcttttctatggagctgatttaaagtattccatttagatttgatagatatgcttaagcaatctataaatcattttcaatgttataaacactaattggtttcctctagggtgatatccgtcattactctgtctcttcaatccatccagctaaatggaataggtgatgacttgcatgtgactcctacttggcttctatccaccaacagaaattataccatatagtgaaaggcaattttctaaataatttcattactaatatgaactgtgaagttgtcattttttcatttgtccttttctgctatcaccttcctcttgtcagaatgaatatagacactgtatctaagtgggaccaaagaaaaaatagcgaactttcaccaaagttttcatgaaaacccaaaagctttaaaagttactatcaagaaattgaaaggaaacccacagaataggataaaatatttgtaaatcatatatttgataaaagtcttgtaaccagatacataaagagctcttacaactcaataaaaggcaagtaatttaaaaataggcaaaagaattgctggatggtatggtagttctatttttagtttttaccctaactactctgacttgatcatttaacattctgtgtatgtaacaaaatatcacatgcataaatattatgtatcaataaaattttttaatgggcaaa

SEQ ID NO: 4004 - protein, 1338 aa, Homo sapiens; identical to SEQ ID NO: 357

SEQ ID NO: 4005 - DNA, 4351 bp, Homo sapiens
cgccccactcggcgggtcggtgccgccgggtcccaggtgcccgctacttcccagaacctccgcctcccgctccgggccctcgaaccagcgcggacaccacaatggaccgggcgtccgagctgctcttctacgtgaacggccgcaaggtgatagaaaaaaatgtcgatcctgaaacaatgctgttgccttatttgaggaagaagcttcgactcacaggaactaagtatggctgtggaggaggaggctgtggtgcttgtacagtgatgatatcacgatacaaccccatcaccaagaggataaggcatcacccagccaatgcctgtctgattcccatctgttctctgtatggtgctgccgtcaccacagtagaaggcataggaagcacccacaccagaattcatcctgttcaggagaggattgccaagtgtcatggcacccagtgtggcttctgcacacctgggatggtgatgtccatctacacgctgctcaggaaccacccagagcccactctggatcagttaactgatgcccttggtggtaacctgtgccgttgcactggatacaggcccataattgatgcatgcaagactttctgtaaaacttcgggctgctgtcaaagtaaagaaaatggggtttgctgtttggatcaaggaatcaatggattgccagaatttgaggaaggaagtaagacaagtccaaaactcttcgcagaagaggagtttctgccattggatccaacccaggaactgatatttcctcctgagctaatgataatggctgagaaacagtcgcaaaggaccagggtgtttggcagtgagagaatgatgtggttttcccccgtgaccctgaaggaactgctggaatttaaattcaagtatccccaggctcctgttatcatgggaaacacctctgtggggcctgaagtgaaatttaaaggcgtctttcacccagttataatttctcctgatagaattgaagaactgagtgttgtaaaccatgcatataatggactcacccttggtgctggtctcagcctagcccaggtgaaggacattttggctgatgtagtccagaagcttccagaggagaagacacagatgtaccatgctctcctgaagcatttgggaactctggctgggtcccagatcaggaacatggcttctttagggggacacatcattagcaggcatccagattcagatctgaatcccatcctggctgtgggtaactgtaccctcaacttgctatcaaaagaaggaaaacgacagattcctttaaatgagcaattcctcagcaagtgccctaatgcagatcttaagcctcaagaaatcttggtctcagtgaacatcccctactcaaggaagtgggaatttgtgtcagccttccgacaagcccagcgacaggagaatgcgctagcgatagtcaattcaggaatgagagtcttttttggagaaggggatggcattattagagagttatgcatctcatatggaggcgttggtccagccaccatctgtgccaagaattcctgccagaaactcattggaaggcactggaacgaacagatgctggatatagcctgcaggcttattctgaatgaagtctcccttttgggctcggcgccaggtgggaaagtggagttcaagaggactctcatcatcagcttcctcttcaagttctacctggaagtgtcacagattttgaaaaagatggatccagttcactatcctagccttgcagacaagtatgaaagtgctttagaagatcttcattccaaacatcactgcagtacattaaagtaccagaatataggcccaaagcagcatcctgaagacccaattggccaccccatcatgcatctgtctggtgtgaagcatgccacgggggaggccatctactgtgatgacatgcctctggtggaccaggaacttttcttgacttttgtgactagttcaagagctcatgctaagattgtgtctattgatctgtcagaagctctcagcatgcccggtgtggtggacatcatgacagcagaacatcttagtgacgtcaactccttctgcttttttactgaagctgagaaatttctggcgacagataaggtgttctgtgtgggtcagcttgtctgtgctgtgcttgccgattctgaggttcaggcaaagcgagctgctaagcgagtgaagattgtctatcaagacttggagccgctgatactaacaattgaggaaagtatacaacacaactcctccttcaagccagaaaggaaactggaatatggaaatgttgacgaagcatttaaagtggttgatcaaattcttgaaggtgaaatacatatgggaggtcaagaacatttttatatggaaacccaaagcatgcttgtcgttcccaagggagaggatcaagaaatggatgtctacgtgtccacacagtttcccaaatatatacaggacattgttgcctcaaccttgaagctcccagctaacaaggtcatgtgccatgtaaggcgtgttggtggagcgtttggagggaaggtgttaaaaaccggaatcattgcagccgtcactgcatttgccgcaaacaaacatggccgtgcagttcgctgtgttctggaacgaggagaagacatgttaataactggaggccgccatccttaccttggaaagtacaaagctggattcatgaacgatggcagaatcttggccctggacatggagcattacagcaatgcaggcgcctccttggatgaatcattattcgtgatagaaatgggacttctgaaaatggacaatgcttacaagtttcccaatctccgctgccggggttgggcatgcagaaccaaccttccatccaacacagcttttcgtgggtttggctttcctcaggcagcgctgatcaccgaatcttgtatcacggaagttgcagccaaatgtggactatcccctgagaaggtgcgaatcataaacatgtacaaggaaattgatcaaacaccctacaaacaagagatcaatgccaagaacctaatccagtgttggagagaatgtatggccatgtcttcctactccttgaggaaagttgctgtggaaaagttcaatgcagagaattattggaagaagaaaggactggccatggtccccctgaagtttcctgttggccttggctcacgtgctgctggtcaggctgctgccttggttcacatttatcttgatggctctgtgctggtcactcacggtggaattgaaatggggcagggggtccacactaaaatgattcaggtggtcagccgtgaattaagaatgccaatgtcgaatgtccacctgcgtggaacaagcacagaaactgtccctaatgcaaatatctctggaggttctgtggtggcagatctcaacggtttggcagtaaaggatgcctgtcaaactcttctaaaacgcctcgaacccatcatcagcaagaatcctaaaggaacttggaaagactgggcacagactgcttttgatgaaagcattaacctttcagctgttggatacttcagaggttatgagtcagacatgaactgggagaaaggcgaaggccagcccttcgaatactttgtttatggagctgcctgttccgaggttgaaatagactgcctgacgggggatcataagaacatcagaacagacattgtcatggatgttggctgcagtataaatccagccattgacataggccagattgaaggtgcatttattcaaggcatgggactttatacaatagaggaactgaattattctccccagggcattctgcacactcgtggtccagaccaatataaaatccctgccatctgtgacatgcccacggagttgcacattgctttgttgcctccttctcaaaactcaaatactctttattcatctaagggtctgggagagtcgggggtgttcctggggtgttccgtgtttttcgctatccatgacgcagtgagtgcagcacgacaggagagaggcctgcatggacccttgacccttaatagtccactgaccccggagaagattaggatggcctgtgaagacaagttcacaaaaatgattccgagagatgaacctggatcctacgttccttggaatgtacccatctgaatcaaatgcaaacttctggagaaaacagagtgcctcttcccagatggcaatctgtcctatctctgtgctggaagatgctagatctgaaagacagagtttccacagttcagaaatcatcccacagtgttgcttttctatggagctgatttaaagtattccatttagatttgatagatatgcttaagcaatctataaatcattttcaatgttataaacactaattggtttcctct

SEQ ID NO: 4006 - protein, 1338 aa, Homo sapiens; identical to SEQ ID NO: 357

SEQ ID NO: 4007 - DNA, 4506 bp, Homo sapiens
cgccccactcggcgggtcggtgccgccgggtcccaggtgcccgctacttcccagaacctccgcctcccgctccgggccctcgaaccagcgcggacaccacaatggaccgggcgtccgagctgctcttctacgtgaacggccgcaaggtgatagaaaaaaatgtcgatcctgaaacaatgctgttgccttatttgaggaagaagcttcgactcacaggaactaagtatggctgtggaggaggaggctgtggtgcttgtacagtgatgatatcacgatacaaccccatcaccaagaggataaggcatcacccagccaatgcctgtctgattcccatctgttctctgtatggtgctgccgtcaccacagtagaaggcataggaagcacccacaccagaattcatcctgttcaggagaggattgccaagtgtcatggcacccagtgtggcttctgcacacctgggatggtgatgtccatctacacgctgctcaggaaccacccagagcccactctggatcagttaactgatgcccttggtggtaacctgtgccgttgcactggatacaggcccataattgatgcatgcaagactttctgtaaaacttcgggctgctgtcaaagtaaagaaaatggggtttgctgtttggatcaaggaatcaatggattgccagaatttgaggaaggaagtaagacaagtccaaaactcttcgcagaagaggagtttctgccattggatccaacccaggaactgatatttcctcctgagctaatgataatggctgagaaacagtcgcaaaggaccagggtgtttggcagtgagagaatgatgtggttttcccccgtgaccctgaaggaactgctggaatttaaattcaagtatccccaggctcctgttatcatgggaaacacctctgtggggcctgaagtgaaatttaaaggcgtctttcacccagttataatttctcctgatagaattgaagaactgagtgttgtaaaccatgcatataatggactcacccttggtgctggtctcagcctagcccaggtgaaggacattttggctgatgtagtccagaagcttccagaggagaagacacagatgtaccatgctctcctgaagcatttgggaactctggctgggtcccagatcaggaacatggcttctttagggggacacatcattagcaggcatccagattcagatctgaatcccatcctggctgtgggtaactgtaccctcaacttgctatcaaaagaaggaaaacgacagattcctttaaatgagcaattcctcagcaagtgccctaatgcagatcttaagcctcaagaaatcttggtctcagtgaacatcccctactcaaggaagtgggaatttgtgtcagccttccgacaagcccagcgacaggagaatgcgctagcgatagtcaattcaggaatgagagtcttttttggagaaggggatggcattattagagagttatgcatctcatatggaggcgttggtccagccaccatctgtgccaagaattcctgccagaaactcattggaaggcactggaacgaacagatgctggatatagcctgcaggcttattctgaatgaagtctcccttttgggctcggcgccaggtgggaaagtggagttcaagaggactctcatcatcagcttcctcttcaagttctacctggaagtgtcacagattttgaaaaagatggatccagttcactatcctagccttgcagacaagtatgaaagtgctttagaagatcttcattccaaacatcactgcagtacattaaagtaccagaatataggcccaaagcagcatcctgaagacccaattggccaccccatcatgcatctgtctggtgtgaagcatgccacgggggaggccatctactgtgatgacatgcctctggtggaccaggaacttttcttgacttttgtgactagttcaagagctcatgctaagattgtgtctattgatctgtcagaagctctcagcatgcccggtgtggtggacatcatgacagcagaacatcttagtgacgtcaactccttctgcttttttactgaagctgagaaatttctggcgacagataaggtgttctgtgtgggtcagcttgtctgtgctgtgcttgccgattctgaggttcaggcaaagcgagctgctaagcgagtgaagattgtctatcaagacttggagccgctgatactaacaattgaggaaagtatacaacacaactcctccttcaagccagaaaggaaactggaatatggaaatgttgacgaagcatttaaagtggttgatcaaattcttgaaggtgaaatacatatgggaggtcaagaacatttttatatggaaacccaaagcatgcttgtcgttcccaagggagaggatcaagaaatggatgtctacgtgtccacacagtttcccaaatatatacaggacattgttgcctcaaccttgaagctcccagctaacaaggtcatgtgccatgtaaggcgtgttggtggagcgtttggagggaaggtgttaaaaaccggaatcattgcagccgtcactgcatttgccgcaaacaaacatggccgtgcagttcgctgtgttctggaacgaggagaagacatgttaataactggaggccgccatccttaccttggaaagtacaaagctggattcatgaacgatggcagaatcttggccctggacatggagcattacagcaatgcaggcgcctccttggatgaatcattattcgtgatagaaatgggacttctgaaaatggacaatgcttacaagtttcccaatctccgctgccggggttgggcatgcagaaccaaccttccatccaacacagcttttcgtgggtttggctttcctcaggcagcgctgatcaccgaatcttgtatcacggaagttgcagccaaatgtggactatcccctgagaaggtgcgaatcataaacatgtacaaggaaattgatcaaacaccctacaaacaagagatcaatgccaagaacctaatccagtgttggagagaatgtatggccatgtcttcctactccttgaggaaagttgctgtggaaaagttcaatgcagagaattattggaagaagaaaggactggccatggtccccctgaagtttcctgttggccttggctcacgtgctgctggtcaggctgctgccttggttcacatttatcttgatggctctgtgctggtcactcacggtggaattgaaatggggcagggggtccacactaaaatgattcaggtggtcagccgtgaattaagaatgccaatgtcgaatgtccacctgcgtggaacaagcacagaaactgtccctaatgcaaatatctctggaggttctgtggtggcagatctcaacggtttggcagtaaaggatgcctgtcaaactcttctaaaacgcctcgaacccatcatcagcaagaatcctaaaggaacttggaaagactgggcacagactgcttttgatgaaagcattaacctttcagctgttggatacttcagaggttatgagtcagacatgaactgggagaaaggcgaaggccagcccttcgaatactttgtttatggagctgcctgttccgaggttgaaatagactgcctgacgggggatcataagaacatcagaacagacattgtcatggatgttggctgcagtataaatccagccattgacataggccagattgaaggtgcatttattcaaggcatgggactttatacaatagaggaactgaattattctccccagggcattctgcacactcgtggtccagaccaatataaaatccctgccatctgtgacatgcccacggagttgcacattgctttgttgcctccttctcaaaactcaaatactctttattcatctaagggtctgggagagtcgggggtgttcctggggtgttccgtgtttttcgctatccatgacgcagtgagtgcagcacgacaggagagaggcctgcatggacccttgacccttaatagtccactgaccccggagaagattaggatggcctgtgaagacaagttcacaaaaatgattccgagagatgaacctggatcctacgttccttggaatgtacccatctgaatcaaatgcaaacttctggagaaaacagagtgcctcttcccagatggcaatctgtcctatctctgtgctggaagatgctagatctgaaagacagagtttccacagttcagaaatcatcccacagtgttgcttttctatggagctgatttaaagtattccatttagatttgatagatatgcttaagcaatctataaatcattttcaatgttataaacactaattggtttcctctagggtgatatccgtcattactctgtctcttcaatccatccagctaaatggaataggtgatgacttgcatgtgactcctacttggcttctatccaccaacagaaattataccatatagtgaaaggcaattttctaaataatttcattactaatatg

SEQ ID NO: 4008 - protein, 1338 aa, Homo sapiens; identical to SEQ ID NO: 357

SEQ ID NO: 4009 - DNA, 463 bp, Homo sapiens
agctgatgctgatgctgaacatccaatctgcttccaacacagaccaaaactggtcctcaatttgacaccatccctccaggagaccaactggccatttggtggcaaattgactacactgaaccctttccattcgggaaggggcaatgattcactttaacgttttctgggtagaggtttgcaccaacctataacttgaaaaaaagaaaattttaaaatagcatgaatagtttgagttcactttttagaaactatcaaaaattatgtatgcatgtatgtatctatgtatatgtgcatgggaaaattctgtacagacgcacaggaatctgatactagtttcctttgcgaagtaaacactgggatagaggattttcactttttgctttatatacttttatgtttttttaaaataagccttctatttgtaatttaaaaacaaattatgaaaaaaagtacatttaccatc

SEQ ID NO: 4010 - protein, 53 aa, Homo sapiens [sequence omitted]

SEQ ID NO: 4011 - DNA, 1067 bp, Homo sapiens
ctgcgagggaataaacagtctcatcagcccatctgcagctgtgcctttgccaccttctgcccccaaggaggcctttgtacaactgtcaccctcaggaacctatgaaaagcatttttcatcccagacttggccccaggtggacgcaccttttcccttatatttcacctcatggaactcctctccctctggtccagggcaggaccttcgcacagtccattctgccacacaagcacctttatgaagccagaaggaaaagccaggatgcgcgtgatgagtagctatcacagccattggttttagagaaatagagaagaggaaaactttgaagaaattctgcccattaactacatctgctaattgagaaaagtccagttttcaactgtagctgtgagactcctcaatcttgcttgggaaaaaataatggcctgtgagaggaaggtccccatcggcttcagttaatctaatgttctatgtttttactgtatttctgctgtccaacaatagttagccttactccacacttcaatggggtcgaagagccacagtggcccatacttcaatggcctctgagagccaaaagcactttctatatcatctagtcaaatacctaatttccagataaagcaagccaggcctagagaggttccaggattttcctaaactcacctagctacttagtggccaggccatggttagaacctgggtctcctggtgtactctgtgtttttcaatcctacatggttgcctgacaataaatgcacacatagttaattctctagtaatgtgctatattcattcataacttagtcaataattatttcttcagttggaaatttgacattagacaactcatcactgatacataggattcttataagtcaagatttaattaaaatccattttgttctttttaagctgtaagagatggaaaaataaatatgcaaagcagtggattctattatgaatcaattaggccactattctatgtgttttgttatccatggtgggtttcattcattcttgttcagtttgtgagctgtaataaagtgtgtgttttgtcattgaca

SEQ ID NO: 4012 - protein, 43 aa, Homo sapiens
MELLSLWSRAGPSHSPFCHTSTFMKPEGKARMRVMSSYHSHWF

SEQ ID NO: 4013 - DNA, 2050 bp, Homo sapiens
atagacaaactcaaaatgggagacattggacaagataactggccaaactcttccgaagtgtcaaagtcatgatgtcaaagagagaggggagacctgattcctgctccaggacacctcagagacaggacaactaaatgaaaacccagctacagcagatcagcaagagaatcaggctgtctggtttggaaaataaattttgacactgctctgtcctccctgtcctgtaacaggccaacctcccgaagatgcataaagacacctttgccgttgaccaggcagaccctgcatccacaggacatagagagaaaggtgctccctgaacactgatctggataagcattgctgggtcagtgcagaggcgtccatttccccagtctgccgagctggcctaaagctgaggacctcttagtgggagctgaggacatgtgcctgaagaggcaagcccttgactgatggaaattggagtctgagttccatgtgggggactgggaagcacagcaaggtctgaaatgggagacccagggaagggcagagaggaccaaaggaggaagggggtctacagtgtgggaaacagcctggacgcaacagccgggggaggaggcctgctctggccccagtggccccttgtaagcaggaaaggcagctggctagacctcttctgtgttattcactctgattttatcctttatcttcccctcccaacctcacctcctttctaaccccaaagccatgcagctaatatgactaagattgctgggcgtttgcttggaaatgcaaatgagaatttctggtagtttcctagtttccttgatctcctttgtcaagtttattgaggggaaaggactctcggttaaaaaaaaaaaaaaaagaaaatccagattttgaacaccagctctctttaatgccaacttcctgaggagctgcccagctctgtaacaacctggaacagaggcgccatcacagacttggctctgacgggcggcacagcaagaagccttgctcgcgtgtgggacgtgcccgttctggcctggagagagggcccagagacaccacctcgccaccgccacctgattactcattgtcaccaatgagatgacaagaactgatgacgcatttcccttttgctgcactctgacacctcagagaccacagcagagaaaaagctgcttttgtaaaactggaacatgaactacgcggacgccccagaggaggtctctgctgccctctgttgctggcttcttagtaaccctaaccatttttaagaatacagtatttggtttcagtaactttattacatgaaaagtatgctcggaggaaaaaatgtgtcaaatttaatcagtcgtgggtactatcaacattttaaattgttgccaatctaatagaggaaaatggtatctcattgctgttttaattttcattttaaaaattctaagtgaggctcaaaatagtttatttttccagtttcctgccagtgggtatacttttctttttttgtttttttaatctttttttattgatttagaaaagtttttgctgtaaatgcgtttctttttatactaatgcttttctctgttatatagtcaaatttatcagtcttttctttataacttccggctttcatgttccttaggctatggatttttttaaatgcatgcatatatttagtatagtttttagtatttaaaactttaatcaatctggaatttatttttattgtaaagtgggaaatagaagtacagctttatgtttctttgtttttaaaatggcttgcaagttgtaccaatattcttccttaaatgctccattttatggcttacttgaagtgcatttttgcttctaatgagacctgactttctggcctatttcaggactttacattgttctgttggtctgtttttctcctcctgtatcagtacctataatgtgtaactactagacatgtattaatgtaatagaatacatttcaatattatatagggctagtttcccctcttgactattcttattatacattttttatctttctagataaactttaaaatcaagtttt

SEQ ID NO: 4014 - protein, 69 aa, Homo sapiens
MGDPGKGREDQRRKGVYSVGNSLDATAGGGGLLWPQWPLVSRKGSWLDLFCVIHSDFILYLPLPTSPPF

SEQ ID NO: 4015 - DNA, 847 bp, Homo sapiens
aatccattttattctagaacatggggacaacatgttgataactggaggatggcacccactacctgggacatataagaatacctgccggaccctcgtggaatgccttgaacctattatcagatggagtactagtggcacctgggagaagtgggctaatgaagcttttgctcaaagcactagtttgtctgccactggatattttaggactgacaataggcgctggctgcagcctggcccagatgcaggacatcttggctgagagggtagctgagctcccagaggagaaaacacagacgtactgagccctcctgaagcacctgaggagtctggcaggccagcagatccggaatatggcgtccttaggggggcatgtgagaagccggcattgctattcggacctgaatccaattcttgctgtgggcaatgctaccctcaatctgatttcagcaggtacgcggcggattcctctaaatgaacattttcttgctgggttggcaagtgcagaccttaagccagaggaaattttggaatctgtgcatatcccgcactctcaaaagtgggaatttgtgtcagccttccgacaggctcaatgccagcagaatgccttgccccacgtgaatgccggcatgcgagtccttctcaaagaaggcacagacagcattgaggacctgagcatcgcctatggaggggtgggggctgccaccatcagtgcacacagatcctgctagcaactccttgggaggtgctggaatgagctgttgctggatgaggcttgcaggctgcttctggatgaagtctcgctcccaggctcagccccgggtggccgggtggaattcaagaggatgag

SEQ ID NO: 4016 - protein, 125 aa, Homo sapiens
MASLGGHVRSRHCYSDLNPILAVGNATLNLISAGTRRIPLNEHFLAGLASADLKPEEILESVHIPHSQKWEFVSAFRQAQCQQNALPHVNAGMRVLLKEGTDSIEDLSIAYGGVGAATISAHRSC

SEQ ID NO: 4017 - DNA, 1470 bp, Homo sapiens
ctggagcagctgtaacttttcatgggctccacagttcagtgaggggtggcagcattcccagacaactcctgtgtattaattatacatatatttgagtgccaattgcaccccaaatccagacttcctggtgccagacaacttgttcattccccaatcaagtccactttctcatgcttactctatgaaaagggcacccatgatagggtcggggtcccccctctagaatgcagacccacactgggacccaagacctccttacttgagaacagagatctccccaggctgccctcttggaagaacagagggcagaagccttactgagccaaatgtcctggtatctggagaagggcaagcgcaacatctcattttgagaggggacaagtggagatatccctggtttggtcagctgaacttgaagaccaaagccaagagtaactcattcaatgctggttactcagtgacccaggttccaagcaagtctctcacaaagctttaatgagtacctgcccctagagtaaagtaatgaagacaataccaagtgctgtatgggtcatgcctcacttaacaacagggatatgatctgagaaatacatctttaggcgattttgccattgtagggacatcatagagtacattttcataaatctagatggtatggcctaccacacacttaggctatatggtctagcctattgttcctaggctctaaacctgtgcagcatattactacactgaatgctgtaggcaatgataacataacgaatacctgccggaccctcgtggaatgccttgaacctattatcagatggagtactagtggcacctgggagaagtgggtgagtatcaggtgtggctgaagcctgcagagctcctgtggggccactgagtggaagcacctgttcccaggctaatgaagcttttgctcaaagcactagtttgtctgccactggatattttagtcggtctacagagaatcaacccaagagtcctccgtccagtataagaaaaagagagggaaacagtgccccgttagaccaatgtgtcaatggtaggatcagacatagatcccaaaggaagtgagtcttgggtgaaagccaaggccgtatggaccacccagtgccaactctgaggttctgaactttatttttactaagaaaagggcaatttcctcacagcactaggcaaaaatggaaagctatcctggcacacaagtatagaatgccaccagagacaagcagctggaagaaaaagccaggccaccagcaacagagacaaagaactgtgagcttgagaggctatggcagatggtgagggaaggacagtgagggagaaagagactcagatgcagcagaggctcagtggctagacttaggacccagccagggcttattgcaaaataagcacttggtaactttttatatctttgccttggcaaccaggaaactcaaagttaaattttatgcttcattt

SEQ ID NO: 4018 - protein, 30 aa, Homo sapiens
MKLLLKALVCLPLDILVGLQRINPRVLRPV

SEQ ID NO: 4019 - DNA, 2440 bp, Homo sapiens
agaatgcttgtcagatccttctgaaacgccttgagcccatcattaagaaacatccggaaggtaaatgggaagactggatagaagctgcatttgaacaaagaatcagtctctcagccactggatacttcaggggctacaaggccttcatggactgggagaagggggtgggggacccatttccttactatgtctgcagagctgcctgttctgaggttgaaattgactgcctgacaggtgctcacaagaaaatcagaacggacatcatcatggatgcatgttgcagcctaaatccagccattgatattgggcagattgaaggtttgtttattcagggaatggggctttataccactgaagaactgaaatattccccagaaggtgtcctgtactctcggagcccagatgagtacaaaattccaaccatcactgatgtcccagaggagttcaatgtctccttgctgccatcatcacaaaccccactaaccatctattcgtctaagggcctcggggagtctgggatgttcctggggtcatctgtgttctttgccattgctgacgctgtggccgcagtgcgaagagaaagagacatagctgaggacttcacggtgaagagcccagcaacgccagaatgggttcgaatggcctgtgcagatcgattcacagaaatgcaatgattacaatcacctgcctctggacagatgccctcctcagatgggcagggccgggaaaccagcaccctccacccactccaggaactcctctgtgcggatcttggcctagagatcccaagagatgaccctgagacatttaaaccttggtctatccctatagcataacactgctatcattccctaaaaggtgtttcagtttttcacaagtaaaaagatggcttgttaatcctaactgggttccaaacttatattcttatactgttgtagaaaaaaatagacacaaaatttagaaacgttatccaactttgattatgttaacccaatgaatcattatttgcaaagcatttcacttagactttccagcctagaggccaccagaaaagcactgctgtatccacagtaagcaagtttagtgctgatttgtttctgaaaagatcacgtaaatgttgctgtaaaagcaaacttttcctttctgtgtccatccaatctaaatgggctggtaatacaggttatgattatagaatgaaagacacttcttggtagataaatatatgatgacttttcccaggggtgtatttgattcagtagccacaagagagttctgcaggttttgttttgccatggattgaccataagtctatgtacgtgcatttgacagcaaaggagtggtatttccctcatgcacatctactattcaactgattaacattcttttggatttggaggaggggaaaaagcaatataaaaacattttcaatatcttgcccccaacccctctgtgttgttgttgctgttgttgaaaaacatccaatctggtatcagagtttaagaaatattgcatatttcagtttcccatagattgaagtgagaacataaagcaaaagaattataaattgtaattaccccctacattgtggtttaaaatatgcaagatcctctctaccaataactttgagaaggaaaaacaaaagaaaaaaagaaataagatatatgggatccaccaaattacattcatctgagtttagaggccttcagagagaggaaccagcgtacaaattaggccctatttgaccagaaagtcaggggcaagctgattttctactagccagatttcacacgatcaggctccccaaggcatggtctgcagtgacccctgcagtggccgaaggaggagaggcagagctgagaacgctgggtgttgggtgagagaaggtaggcaataaggcatacaatacagcccggaggaggccgaaggtccttaaagccatgggcacgttgtcatgagaggctggggcatagctgtccacaggcccatctgcggacattggaggcttccctacaccacaggagcccaagagataaagcagcacaggagcacaaagaggaggaggcaggagcagaagggtcatgggcaggacaaaaattacgcaagacacaggaacattaagagctgagaaccttagtgggagtggctggggtgaaataagttgaaagtattttttttacttttttttagctcttttgaaaataaaatccttaatctaataagaatgtgagaagtttgtcttatcatgtgtatcattttaaatgatggtaaattgtatttcttttttttagaatcttgtcagttagagctaaggatagttactgggcatttattttctatttgtcatggttcaaaactacaaagcactaaacatagaggggcttgaataaaaattatttctgtgagttgatgcactaaaatctggatggcatggatgttaata

SEQ ID NO: 4020 - protein, 175 aa, Homo sapiens
MDWEKGVGDPFPYYVCRAACSEVEIDCLTGAHKKIRTDIIMDACCSLNPAIDIGQIEGLFIQGMGLYTTEELKYSPEGVLYSRSPDEYKIPTITDVPEEFNVSLLPSSQTPLTIYSSKGLGESGMFLGSSVFFAIADAVAAVRRERDIAEDFTVKSPATPEWVRMACADRFTEMQ

SEQ ID NO: 4021 - DNA, 3796 bp, Homo sapiens
gggcttggcttggagggggcaagggagggaaagagagaagggggaaacacaaaaaacttctttctttctccctccgtttatcttcagcccgacattgtcacctcctctttgaggggttagaagaagctgagatctcccgacagagctggaaatgcattgcactttgactatggaaacagaggctattgatggctatataacgtgtgacaatgagctttcacccgaaagggagcactccaatatggcaattgacctcacctcaagcacacccaatggacagcatgcctcaccaagtcacatgacaagcacaaattcagtaaagctagaaatgcagagtgatgaagagtgtgacaggaaacccctgagccgtgaagatgagatcaggggccatgatgagggtagcagcctagaagaacccctaattgagagcagcgaggtggctgacaacaggaaagtccaggagcttcaaggcgagggaggaatccggcttccgaatggtaaactgaaatgtgacgtctgtggcatggtttgcattgggcccaatgtgcttatggtacataaaaggagtcacactggtgaacgccccttccactgtaaccagtgtggagcttcttttactcagaagggcaaccttctgagacacataaagttacactctggagagaagccgttcaaatgtcctttctgtagctacgcctgtagaagaagggacgccctcacaggacacctcaggacccattctgtgggtaaacctcacaagtgcaactactgtggacgaagctacaagcagcgcagttcactggaggagcacaaggaacgctgccacaactatctccagaatgtcagcatggaggctgctgggcaggtcatgagtcaccatgtacctcctatggaagattgtaaggaacaagagcctattatggacaacaatatttctctggtgccttttgagagacctgctgtcatagagaagctcacggggaatatgggaaaacgtaaaagctccactccacaaaagtttgtgggggaaaagctcatgcgattcagctacccagatattcactttgatatgaacttaacatatgagaaggaggctgagctgatgcagtctcatatgatggaccaagccatcaacaatgcaatcacctaccttggagctgaggcccttcaccctctgatgcagcacccgccaagcacaatcgctgaagtggccccagttataagctcagcttattctcaggtctatcatccaaataggatagaaagacccattagcagggaaactgctgatagtcatgaaaacaacatggatggccccatctctctcatcagaccaaagagtcgaccccaggaaagagaggcctctcccagcaatagctgcctggattccactgactcagaaagcagccatgatgaccaccagtcctaccaaggacaccctgccttaaatcccaagaggaaacaaagcccagcttacatgaaggaggatgtcaaagctttggatactaccaaggctcctaagggctctctgaaggacatctacaaggtcttcaatggagaaggagaacagattagggccttcaagtgtgagcactgccgagtccttttcctagaccatgtcatgtacaccattcacatgggttgccatggctaccgggacccactggaatgcaacatctgtggctacagaagccaggaccgttatgagttttcatcacacattgttcgaggggagcacacattccactaggccttttcattccaaaggggacccctatgaagtaaagaactgcacatgaagaaatactgcacttacaatcccacctttcctcaaatgttgacataccttttattttttttaatattattactgttgataattcttattttgtggaggcagtgtcatttgctctgcctaattacgataaggaagaaacagaagagagaaggggcgggaatattgtttctttatcacctggcttgtttattttgtgggaatttaagagcagtccatttctaccaaggcatatcatgctttgaaaaatcacttgattcataaagattcacctaagagattctgatttgccactgatattcagaattatgatggaagacaggaaagttcagagttttctgggtaggactttggtggtttaaaaatggtataagtaactttattcttgaaagaagaatgtgtttcaaactgtaaaccaattttttgttcttcagagatcatggaacacaaacacattgttattttcagtgataactcctaagaggagctgagttgttgtgggttctatgtttacttcccctatggaatttataattcagtatgttttacactgtaccatatagcaaaacttttaaactacaggtagttaagggccacctacaatacatctgaggtcctgtgatcttatttttctaaacgtaagcactgtttttccatagttttgatgactggcattttatagacaccctggcagccttacttttaacacctttaaggaatagtatttttatgtagttttcagaataacatatggtctaagagtggataaaaggcagtcaataatttctgggagggacttctactttcataaatttgtttgagaggttttcttttaaagttgtaatgtgatggcagcatagtatatgtatttgtttctaaaagtatgcttacgattgtcactttatcagcatttaatcagtgttaaccagtcagcagaaaaatataattatgctaacagtagggggagaaaacccacttagaaatcccttttctggtatttctcttttcactagtttttttcaagatgtgacctcccggtgttctgtccatagttcattcatcctttactcttcgagtagaaggtcttaaaagtcttcctgtcggctgtttctttcaaaatctcctcagagcaattgctaatttggcctgaatctggtaacttgaaccctgtaaggttacagaactagggctatttattttagcatttcttcagtagtatttactactcttgttgcaaagaaaagggaatgggacttctttgtaacctgtaccttggacaacagataaaagaaacaaaaaaataagaaagtttacttttacccttcttggagtctagaatgtgacagaacccccaaaggaaagtcctgcacatttttctgtttccaaaacatttaattgtgtaagtccttgtcagaaatgaatctcaatcccttagtatagaattccccttacatggtataggttgccatatttcatgtgcagattttaatttcatttatgtgggcgctctgttttttctttgcagtccagccacattagaggggaggaaccgagtgatattgattcaagtcattttagggggacatacttggaaggcagaacttgctgcttctgtttggggaggacagacctgactgtgactggattatctgataaccatttgtgaatactgaaattctgttaggcagtaactgataactgctctaaaggatcattaaataggatgctgaaattatgtatcttaatacagtgtggtatgagaattaccaagtcaagagaattgtggacataagcaagtttggccccaatactgctcttaactcattttccagcttactatttgctatttaaatggtaggcaccagctaagcacttctaagcactaacacagctagaactaggcaaaaatggttagaactcagctctcttctactagtccctgtcataattatttttgggaaaatgtccaaactgccccctttaaatctaagggaatgcacc

SEQ ID NO: 4022 - protein, 532 aa, Homo sapiens
MHCTLTMETEAIDGYITCDNELSPEREHSNMAIDLTSSTPNGQHASPSHMTSTNSVKLEMQSDEECDRKPLSREDEIRGHDEGSSLEEPLIESSEVADNRKVQELQGEGGIRLPNGKLKCDVCGMVCIGPNVLMVHKRSHTGERPFHCNQCGASFTQKGNLLRHIKLHSGEKPFKCPFCSYACRRRDALTGHLRTHSVGKPHKCNYCGRSYKQRSSLEEHKERCHNYLQNVSMEAAGQVMSHHVPPMEDCKEQEPIMDNNISLVPFERPAVIEKLTGNMGKRKSSTPQKFVGEKLMRFSYPDIHFDMNLTYEKEAELMQSHMMDQAINNAITYLGAEALHPLMQHPPSTIAEVAPVISSAYSQVYHPNRIERPISRETADSHENNMDGPISLIRPKSRPQEREASPSNSCLDSTDSESSHDDHQSYQGHPALNPKRKQSPAYMKEDVKALDTTKAPKGSLKDIYKVFNGEGEQIRAFKCEHCRVLFLDHVMYTIHMGCHGYRDPLECNICGYRSQDRYEFSSHIVRGEHTFH

SEQ ID NO: 4023 - DNA, 2006 bp, Homo sapiens
aaccctgctcctcgctgaagatggaggaagtaaaaacaggattacccttagctacagatccactgccttagtttccaccaccaactgcagtgcacaaacacacgttaggcacaggaaagaaagaaagacagaggacacattaacagtaaacacaaacaaaagggtgatgggattattttactgcatgcactgctgagcccgacattgtcacctcctctttgaggggttagaagaagctgagatctcccgacagagctggaaatggtgatgaatcttttttaatcaaaggacaatttcttttcattgcactttgactatggaaacagaggctattgatggctatataacgtgtgacaatgagctttcacccgaaagggagcactccaatatggcaattgacctcacctcaagcacacccaatggacagcatgcctcaccaagtcacatgacaagcacaaattcagtaaagctagaaatgcagagtgatgaagagtgtgacaggaaacccctgagccgtgaagatgagatcaggggccatgatgagggtagcagcctagaagaacccctaattgagagcagcgaggtggctgacaacaggaaagtccaggagcttcaaggcgagggaggaatccggcttccgaatggtgaacgccccttccactgtaaccagtgtggagcttcttttactcagaagggcaaccttctgagacacataaagttacactctggagagaagccgttcaaatgtcctttctgtagctacgcctgtagaagaagggacgccctcacaggacacctcaggacccattctgtgggtaaacctcacaagtgcaactactgtggacgaagctacaagcagcgcagttcactggaggagcacaaggaacgctgccacaactatctccagaatgtcagcatggaggctgctgggcaggtcatgagtcaccatgtacctcctatggaagattgtaaggaacaagagcctattatggacaacaatatttctctggtgccttttgagagacctgctgtcatagagaagctcacggggaatatgggaaaacgtaaaagctccactccacaaaagtttgtgggggaaaagctcatgcgattcagctacccagatattcactttgatatgaacttaacatatgagaaggaggctgagctgatgcagtctcatatgatggaccaagccatcaacaatgcaatcacctaccttggagctgaggcccttcaccctctgatgcagcacccgccaagcacaatcgctgaagtggccccagttataagctcagcttattctcaggtctatcatccaaataggatagaaagacccattagcagggaaactgctgatagtcatgaaaacaacatggatggccccatctctctcatcagaccaaagagtcgaccccaggaaagagaggcctctcccagcaatagctgcctggattccactgactcagaaagcagccatgatgaccaccagtcctaccaaggacaccctgccttaaatcccaagaggaaacaaagcccagcttacatgaaggaggatgtcaaagctttggatactaccaaggctcctaagggctctctgaaggacatctacaaggtcttcaatggagaaggagaacagattagggccttcaagtgtgagcactgccgagtccttttcctagaccatgtcatgtacaccattcacatgggttgccatggctaccgggacccactggaatgcaacatctgtggctacagaagccaggaccgttatgagttttcatcacacattgttcgaggggagcacacattccactaggccttttcattccaaaggggacccctatgaagtaaagaactgcacatgaagaaatactgcacttacaatcccacctttcctcaaatgttgacataccttttattttttttaatattattactgttgataattcttattttgtggaggcagtgtcatttgctctgcctaattacgataaggaagaaac

SEQ ID NO: 4024 - protein, 500 aa, Homo sapiens
METEAIDGYITCDNELSPEREHSNMAIDLTSSTPNGQHASPSHMTSTNSVKLEMQSDEECDRKPLSREDEIRGHDEGSSLEEPLIESSEVADNRKVQELQGEGGIRLPNGERPFHCNQCGASFTQKGNLLRHIKLHSGEKPFKCPFCSYACRRRDALTGHLRTHSVGKPHKCNYCGRSYKQRSSLEEHKERCHNYLQNVSMEAAGQVMSHHVPPMEDCKEQEPIMDNNISLVPFERPAVIEKLTGNMGKRKSSTPQKFVGEKLMRFSYPDIHFDMNLTYEKEAELMQSHMMDQAINNAITYLGAEALHPLMQHPPSTIAEVAPVISSAYSQVYHPNRIERPISRETADSHENNMDGPISLIRPKSRPQEREASPSNSCLDSTDSESSHDDHQSYQGHPALNPKRKQSPAYMKEDVKALDTTKAPKGSLKDIYKVFNGEGEQIRAFKCEHCRVLFLDHVMYTIHMGCHGYRDPLECNICGYRSQDRYEFSSHIVRGEHTFH

SEQ ID NO: 4025 - DNA, 8084 bp, Homo sapiens
atttcctataaatatcacaaatatttccaacaaaagagcatagatgtcttttatacaattcttttgagaatgattctgcagatttctgcattttctcctcattaatttgacctgggatggttttcactgaggaaaaaaatctttaagcaaacatgttaaatgtttacctatataaaaattattacttcaggtgactccgataatataacgcatgtgtggaatgaggatgatggacagaccttatctccaagcagtctggctgcacagctcctaattctggaaaactttgaagatgccctcttaaatatatcagcaaatagtccttatattccttacttggcatgtgtgagaaatgtgactgacagtttggccagaggttcaccagaaaatctaagactcctgcagtccacaatacgatttaaaaaatcttttcttcgcaatggttcctatgaagattactttcctccagttcctgaagtcctaaaatcaaaactgtctcaacttcgaaacttgaccgaacttctttgtgaatctgaaactttcagtttgatagagaagtcatgccagctctctgatatgagctttgggagcctgtgtgaagaaagtgagtttgatctgcaactcctcgaagcggcagagctgggcaccgaaatagcagccagcttactgtaccatgacaatgtcatatctaaaaaagtgagagatttgctgactggagatccaagcaaaattaatttaaatatggatcagtttctagaacaggcactgcaaatgaattacttggaaaatatcactcagttaataccgatcatagaagccatgctgcatgtcaataacagtgcagatgcttctgaaaagccaggtcagttactagaaatgtttaaaaatgttgaagagctgaaagaagatttaaggagaacaacaggaatgtccaacaggactattgacaagttgctggccattcccatccctgataatagagctgagattatttctcaggtgttctggctgcattcctgtgatactaatatcaccactcccaaactagaagatgcaatgaaagaattctgcaacctgtctctttcagagagatcccggcagtcttacctcatcggactcacccttctgcactacttaaacatttacaacttcacatacaaggtgtttttcccgaggaaagatcaaaagccagtagaaaagatgatggagctcttcataagactaaaagagattctcaatcagatggcttctggcacacatccgctgctagacaaaatgagatccctgaagcaaatgcatctgcccagaagtgttccattaacacaggcaatgtacagaagcaaccgaatgaacacaccacaaggatcatttagcaccatctcccaagcattatgttctcaaggaattaccactgaatatttaactgccatgctgccctcttcccagaggccaaaaggcaaccacaccaaggattttttgacttataaattaactaaagagcaaattgcttcaaaatatggaattcccataaattccacaccattttgcttctccctttataaagacatcattaacatgcccgctggacctgtgatttgggctttcttgaaacctatgttgttgggaagaattttgtatgcaccatataacccagtcacaaaggcaataatggaaaagtccaatgtaactctgagacagctggcggaattaagagaaaaatctcaagagtggatggataagtcgccacttttcatgaattccttccatctgttaaaccaggcaattccaatgctccagaatactctaaggaacccttttgtgcaagtttttgtaaagttctccgtgggactcgatgctgttgaactattgaaacagatagatgaactcgatattctaagactgaaattagagaacaacattgacatcatcgatcagcttaacacactatcttccctgacagtaaatatttcctcttgtgtattatatgaccgtattcaggcagcaaaaaccatagatgaaatggagagagaggctaaaaggctctacaaaagcaacgaactctttggaagtgttatttttaagcttccttctaacagaagctggcacagaggctatgactctggaaatgtctttcttcctcctgtcataaaatataccatccggatgagtctcaagaccgcacagaccacaagaagcctaagaaccaagatttgggctccagggccacacaattctccatcacacaaccagatctatggcagggcttttatttatttacaggatagtattgaaagagcaatcattgaattgcaaactggaaggaactcccaggaaatagcagtccaggttcaagcaattccttatccctgcttcatgaaagacaacttcctaaccagtgtctcttattctcttccaattgtgcttatggttgcctgggttgtatttatagctgcctttgtaaaaaagcttgtctatgagaaagacctccggcttcatgagtacatgaagatgatgggtgtgaactcctgcagccatttctttgcctggcttatagagagtgttggatttttactggttaccatcgtgatcctcatcattatactcaagtttggcaatattcttcctaaaacaaatgggttcattttgttcctgtatttttcggactacagcttctcggttattgccatgagctatcttatcagtgtcttcttcaacaacaccaacattgcagctctgatcggaagcctcatctacatcattgccttctttccatttattgttctggttacagtggagaatgagttgagctatgtattgaaagtgttcatgagcctgctgtccccaacagcattcagctatgcaagccaatacattgcacgatacgaagaacagggcattggtcttcagtgggaaaatatgtacacctccccggttcaggatgacaccacctcatttggctggctgtgctgtctaatcctagctgactctttcatttatttccttattgcttggtatgtcaggaatgtcttcccagggacatacggtatggcagctccctggtattttccaattcttccttcctattggaaggagcgatttgggtgtgcagaggtgaagcctgagaagagcaatggcctcatgtttactaacatcatgatgcagaacaccaacccatctgccagtcctgaatacatgttttcctctaacatcgagcctgaacctaaagatctcacagtcggggttgccctgcatggggtcacaaagatctatggctcaaaagttgctgttgataacctcaatctgaacttttatgaagggcatattacttcattgctggggcccaatggagctgggaaaactactaccatttccatgttaactgggctgtttggggcctcagcaggcaccatttttgtatatggaaaagatatcaaaacagacctacacacggtacggaagaacatgggagtctgtatgcagcacgacgtcttgttcagttacctcactactaaggagcaccttctcctatatggttccatcaaagttcctcactggactaaaaagcagctccacgaggaagtaaaaaggactttaaaagatactggactatatagccatcgtcataagagagttggaacactgtcaggaggcatgaagaggaagttatctatatccatagctctcattggtggatcaagggtagtaattttggatgaaccatctactggagttgacccatgttctcgccgaagtatatgggatgttatatccaagaacaaaactgccagaacaatcattctgtcaacgcaccacttggacgaggctgaagtgctgagtgaccgcatcgccttcctggagcagggtgggcttaggtgctgtgggtccccattttacctcaaggaagcctttggcgatgggtatcacctcacgcttaccaagaagaagagtccaaatttaaatgcaaatgcagtatgtgacaccatggccgtgacagcaatgatccaatcacatctccccgaagcctacctcaaggaggatattgggggagagcttgtttatgtacttcctccattcagcaccaaagtctcaggggcctacctgtcactcctacgggcactcgacaatggcatgggtgacctcaacatcgggtgctacggcatttcagataccaccgtggaggaggtctttctgaacttgaccaaagagtcacaaaaaaatagtgctatgagtcttgagcacttaacacaaaagaaaattgggaattccaatgccaatggcatctcaactcctgacgatttatctgtgagcagcagcaatttcacagacagagatgacaaaatcctgacaagaggagagaggctggatggctttggactgttgctgaagaagatcatggctatactcatcaagaggttccaccacacccgcaggaactggaaaggtctcattgctcaggttatcctccccatcgtctttgttaccactgccatgggccttggcacactgagaaattccagcaacagttatccagagattcagatctccccctctctttatggtacctccgaacagacagccttctatgctaattatcacccgagcacggaagcacttgtctcagcaatgtgggacttccctggaattgacaacatgtgtctgaacaccagtgatctacagtgtttaaacaaagacagtctggaaaaatggaacaccagtggagaacccatcactaattttggtgtttgctcctgctcagaaaatgtccaggaatgtcctaaatttaactattccccaccgcacagaagaacttactcatcccaggtaatttataacctcactgggcaacgagtggaaaattatcttatatcaactgcaaatgagtttgtccaaaaaagatatggaggttggagttttgggctgcctttgacaaaagaccttcgttttgatataacaggagtccctgccaatagaacacttgccaaggtatggtatgatccagaaggctatcactcccttccagcttacctcaacagcctgaataatttccttctgcgagttaacatgtcaaaatacgatgctgcccgacatggcatcatcatgtatagccatccttatccaggagtgcaagaccaagaacaagccacaatcagcagtttaatcgatattttagtggcactgtctatcttgatgggctactctgtcaccaccgccagctttgtcacctatgttgtaagggaacatcaaaccaaagccaaacagttgcagcacatttcaggcattggcgtgacatgctactgggtaacaaacttcatttatgacatggttttctacttggtgcctgtagcgttttcaattggtatcattgcgattttcaaattacctgcattctacagtgaaaacaacctaggcgctgtatctctcctacttctcctgtttgggtatgcaacattttcctggatgtacttgctggctgggctcttccatgaaacaggaatggccttcatcacttacgtctgtgtcaacttgttttttggcattaattccattgtttccctgtcagtggtatactttctttccaaggaaaagcctaatgatccgactttagaacttatttctgaaaccctcaagcgcattttcctgattttcccacaattctgttttggctacggtttgattgaactttctcaacaacagtcggtcctagacttcttaaaagcatatggagtggaatacccaaatgaaacctttgagatgaataaactaggtgcaatgtttgtggctttggtttctcagggcaccatgtttttttccttgcgactcttaatcaacgaatccctgataaagaaactcaggcttttcttcagaaaatttaattcttcacatgtaagggagacaatagatgaggatgaagatgtgcgggctgagagattaagagttgagagtggtgcagctgaatttgacttggtccaactttattgtctcacaaagacctaccaacttatccacaaaaagattatagctgtaaacaacatcagcattgggatacctgctggagagtgttttgggcttcttggagtgaatggagcaggaaagaccactatattcaagatgctgacaggagacatcattccttcaagtggaaacattctgatcagaaataagaccggatctctgggtcacgttgattctcacagctcattagttggctactgtcctcaggaagatgccttagatgacctggtaactgtggaagaacatttgtatttctatgccagggtacatggaattccagaaaaggatattaaagaaactgttcataaactccttaggagacttcacctgatgcccttcaaggacagagctacctctatgtgcagttatggcacaaaaagaaaattatccactgcactggccttgatagggaaaccttccattctactgctggatgagccgagctctggcatggatccgaagtcgaaacggcacctctggaagatcatttcagaagaagtacagaacaaatgttccgtcatcctcacatctcacagcatggaagaatgtgaagctctctgtaccaggttggccattatggtgaatggaaagtttcaatgtattggatctttgcagcacataaagagcaggtttggacgaggatttactgtcaaagttcacttgaagaataacaaagtgaccatggagaccctcacaaagttcatgcagctgcactttccaaaaacatacttaaaagatcagcacctcagcatgctagagtatcatgtaccagtcacagcaggaggagtcgcaaacatttttgatctgctggaaaccaacaagactgctttaaatattacaaatttcttagtgagtcagaccactctggaagaggttttcatcaactttgccaaagaccagaagtcctatgaaactgctgataccagcagccaaggttccactataagtgttgactcacaagatgaccagatggagtcttaacacttccagcaaactcaatctcagcgtgtgaccaatggcttcattttgaagaaaagccacagaagatacacttccgcaagatatcttcattttaaagtaaagtaatatactgtatggaaagttacaactgtgttagactaacaagtaattataaaaggaaatttttccttctaaggtcagtgagtgttgttgctactgaaatgaattcctgtatactcaacactgtgagcatgctaatgtatatgctggtgattcttatgcaaaggtgaagccacctcaagatgaatatcttaatttattactttcaataaaaagacagtttaaaaggcatggattttggtagttgaaatataagagtggagaagaaaagtcagatggtttgtggcaggtgccaccgggcaagcagacaacataatttatttccagaaaacaacagaatgaacatcatcatgaatacatgaatcggctgtgatgtgtgaactgctaagggccaaatgaacgtttgcagagcagtgggcacaatgtttacaatgtatgtgtatgtcactttcggtacctgtgaatgcatggggacgtgctgaacccgaaaaaaagtgcctttccataaggactgcaatagagagggcaatttaccctggtggtacacggaacctagattcactcctgccatgccttgccaatagtaagctgcagggtggaacaagaaatcacttgctctggggggaagggaggggggaatgggtgtgtcagctgggtagatacaaaccctgaaaagagaatccatgtgctactggcaggcaacattttttaaagctctttcagaaaccctcatatttggggtttcttttcaggaaacattcctgtggagggaaaacgaatatgaagataattttcagctaattatctgggtgacccagaatcgtgtatatggctataggatagacttcttaataatggcaagtgacgtggccctggggaaaggtgctttatgtaccgtgtgtgcgtgtatgtgtgtgtatctatacaagtttgtcagctttggcatgactgtttgtctcgaaaaccaataaactcaaagtttagaaaaactc

SEQ ID NO: 4026 - protein, 2277 aa, Homo sapiens; identical to SEQ ID NO: 362

SEQ ID NO: 4027 - DNA, 9099 bp, Homo sapiens
gaagagttgattgagaagtgcctcttggttaaggattaaccacagggaaaaatccagcagaaacagaagaactgtgggtttcttaccccagccctcaaggaagctatgccgtgaaaggggtactgatacactgacatacagcaagttggacggggcatcagttcttcatttgtggagtggagaaaagaagaggaaatctctcatttggggcatttgaaggatggcttccctgtttcatcagcttcagatcctggtctggaaaaattggctaggtgtaaaaaggcagccgctttggacacttgtcttgatcttatggccagtcattattttcataattttggctattactcggaccaaatttcctccaactgcaaaaccaacttgttacctcgcacctcgaaaccttcctagtactggattctttccattcctgcagaccctactctgtgacacagactctaaatgcaaagacacaccctatggcccacaagatctgcttcgtaggaaaggaattgatgatgcactatttaaagacagtgagattctgagaaagtcatccaacctggataaggacagcagtttatcattccagagcacccaagttccagaaagaaggcatgcatcactagccacagtatttcccagtccaagttctgatttggaaatccccggaacatatactttcaatggcagtcaagtgctcgcacgaattcttggcttggaaaagctgttaaagcaaaattcaacttcagaagatatacgaagagaactatgtgacagctattcaggatacattgtggatgatgccttctcttggacctttctaggaagaaatgtttttaacaaattttgcctttctaacatgacccttttagagtcttctctccaagaactaaacaaacagttctcccagctatccagtgaccccaacaatcagaagatagtgtttcaggaaatagtcagaatgctgtctttcttctcacaagtgcaagagcagaaagctgtgtggcagcttctgtctagttttccaaatgtgtttcagaatgacacatcactaagcaatctatttgatgttcttcgaaaggcaaacagtgtgctgctggttgtgcagaaggtttatccacgttttgcaactaacgaaggtttcagaaccctccagaagtctgttaaacatctgctgtacactctggactccccagctcaaggtgactccgataatataacgcatgtgtggaatgaggatgatggacagaccttatctccaagcagtctggctgcacagctcctaattctggaaaactttgaagatgccctcttaaatatatcagcaaatagtccttatattccttacttggcatgtgtgagaaatgtgactgacagtttggccagaggttcaccagaaaatctaagactcctgcagtccacaatacgatttaaaaaatcttttcttcgcaatggttcctatgaagattactttcctccagttcctgaagtcctaaaatcaaaactgtctcaacttcgaaacttgaccgaacttctttgtgaatctgaaactttcagtttgatagagaagtcatgccagctctctgatatgagctttgggagcctgtgtgaagaaagtgagtttgatctgcaactcctcgaagcggcagagctgggcaccgaaatagcagccagcttactgtaccatgacaatgtcatatctaaaaaagtgagagatttgctgactggagatccaagcaaaattaatttaaatatggatcagtttctagaacaggcactgcaaatgaattacttggaaaatatcactcagttaataccgatcatagaagccatgctgcatgtcaataacagtgcagatgcttctgaaaagccaggtcagttactagaaatgtttaaaaatgttgaagagctgaaagaagatttaaggagaacaacaggaatgtccaacaggactattgacaagttgctggccattcccatccctgataatagagctgagattatttctcaggtgttctggctgcattcctgtgatactaatatcaccactcccaaactagaagatgcaatgaaagaattctgcaacctgtctctttcagagagatcccggcagtcttacctcatcggactcacccttctgcactacttaaacatttacaacttcacatacaaggtgtttttcccgaggaaagatcaaaagccagtagaaaagatgatggagctcttcataagactaaaagagattctcaatcagatggcttctggcacacatccgctgctagacaaaatgagatccctgaagcaaatgcatctgcccagaagtgttccattaacacaggcaatgtacagaagcaaccgaatgaacacaccacaaggatcatttagcaccatctcccaagcattatgttctcaaggaattaccactgaatatttaactgccatgctgccctcttcccagaggccaaaaggcaaccacaccaaggattttttgacttataaattaactaaagagcaaattgcttcaaaatatggaattcccataaattccacaccattttgcttctccctttataaagacatcattaacatgcccgctggacctgtgatttgggctttcttgaaacctatgttgttgggaagaattttgtatgcaccatataacccagtcacaaaggcaataatggaaaagtccaatgtaactctgagacagctggcggaattaagagaaaaatctcaagagtggatggataagtcgccacttttcatgaattccttccatctgttaaaccaggcaattccaatgctccagaatactctaaggaacccttttgtgcaagtttttgtaaagttctccgtgggactcgatgctgttgaactattgaaacagatagatgaactcgatattctaagactgaaattagagaacaacattgacatcatcgatcagcttaacacactatcttccctgacagtaaatatttcctcttgtgtattatatgaccgtattcaggcagcaaaaaccatagatgaaatggagagagaggctaaaaggctctacaaaagcaacgaactctttggaagtgttatttttaagcttccttctaacagaagctggcacagaggctatgactctggaaatgtctttcttcctcctgtcataaaatataccatccggatgagtctcaagaccgcacagaccacaagaagcctaagaaccaagatttgggctccagggccacacaattctccatcacacaaccagatctatggcagggcttttatttatttacaggatagtattgaaagagcaatcattgaattgcaaactggaaggaactcccaggaaatagcagtccaggttcaagcaattccttatccctgcttcatgaaagacaacttcctaaccagtgtctcttattctcttccaattgtgcttatggttgcctgggttgtatttatagctgcctttgtaaaaaagcttgtctatgagaaagacctccggcttcatgagtacatgaagatgatgggtgtgaactcctgcagccatttctttgcctggcttatagagagtgttggatttttactggttaccatcgtgatcctcatcattatactcaagtttggcaatattcttcctaaaacaaatgggttcattttgttcctgtatttttcggactacagcttctcggttattgccatgagctatcttatcagtgtcttcttcaacaacaccaacattgcagctctgatcggaagcctcatctacatcattgccttctttccatttattgttctggttacagtggagaatgagttgagctatgtattgaaagtgttcatgagcctgctgtccccaacagcattcagctatgcaagccaatacattgcacgatacgaagaacagggcattggtcttcagtgggaaaatatgtacacctccccggttcaggatgacaccacctcatttggctggctgtgctgtctaatcctagctgactctttcatttatttccttattgcttggtatgtcaggaatgtcttcccagggacatacggtatggcagctccctggtattttccaattcttccttcctattggaaggagcgatttgggtgtgcagaggtgaagcctgagaagagcaatggcctcatgtttactaacatcatgatgcagaacaccaacccatctgccagtcctgaatacatgttttcctctaacatcgagcctgaacctaaagatctcacagtcggggttgccctgcatggggtcacaaagatctatggctcaaaagttgctgttgataacctcaatctgaacttttatgaagggcatattacttcattgctggggcccaatggagctgggaaaactactaccatttccatgttaactgggctgtttggggcctcagcaggcaccatttttgtatatggaaaagatatcaaaacagacctacacacggtacggaagaacatgggagtctgtatgcagcacgacgtcttgttcagttacctcactactaaggagcaccttctcctatatggttccatcaaagttcctcactggactaaaaagcagctccacgaggaagtaaaaaggactttaaaagatactggactatatagccatcgtcataagagagttggaacactgtcaggaggcatgaagaggaagttatctatatccatagctctcattggtggatcaagggtagtaattttggatgaaccatctactggagttgacccatgttctcgccgaagtatatgggatgttatatccaagaacaaaactgccagaacaatcattctgtcaacgcaccacttggacgaggctgaagtgctgagtgaccgcatcgccttcctggagcagggtgggcttaggtgctgtgggtccccattttacctcaaggaagcctttggcgatgggtatcacctcacgcttaccaagaagaagagtccaaatttaaatgcaaatgcagtatgtgacaccatggccgtgacagcaatgatccaatcacatctccccgaagcctacctcaaggaggatattgggggagagcttgtttatgtacttcctccattcagcaccaaagtctcaggggcctacctgtcactcctacgggcactcgacaatggcatgggtgacctcaacatcgggtgctacggcatttcagataccaccgtggaggaggtctttctgaacttgaccaaagagtcacaaaaaaatagtgctatgagtcttgagcacttaacacaaaagaaaattgggaattccaatgccaatggcatctcaactcctgacgatttatctgtgagcagcagcaatttcacagacagagatgacaaaatcctgacaagaggagagaggctggatggctttggactgttgctgaagaagatcatggctatactcatcaagaggttccaccacacccgcaggaactggaaaggtctcattgctcaggttatcctccccatcgtctttgttaccactgccatgggccttggcacactgagaaattccagcaacagttatccagagattcagatctccccctctctttatggtacctccgaacagacagccttctatgctaattatcacccgagcacggaagcacttgtctcagcaatgtgggacttccctggaattgacaacatgtgtctgaacaccagtgatctacagtgtttaaacaaagacagtctggaaaaatggaacaccagtggagaacccatcactaattttggtgtttgctcctgctcagaaaatgtccaggaatgtcctaaatttaactattccccaccgcacagaagaacttactcatcccaggtaatttataacctcactgggcaacgagtggaaaattatcttatatcaactgcaaatgagtttgtccaaaaaagatatggaggttggagttttgggctgcctttgacaaaagaccttcgttttgatataacaggagtccctgccaatagaacacttgccaaggtatggtatgatccagaaggctatcactcccttccagcttacctcaacagcctgaataatttccttctgcgagttaacatgtcaaaatacgatgctgcccgacatggcatcatcatgtatagccatccttatccaggagtgcaagaccaagaacaagccacaatcagcagtttaatcgatattttagtggcactgtctatcttgatgggctactctgtcaccaccgccagctttgtcacctatgttgtaagggaacatcaaaccaaagccaaacagttgcagcacatttcaggcattggcgtgacatgctactgggtaacaaacttcatttatgacatggttttctacttggtgcctgtagcgttttcaattggtatcattgcgattttcaaattacctgcattctacagtgaaaacaacctaggcgctgtatctctcctacttctcctgtttgggtatgcaacattttcctggatgtacttgctggctgggctcttccatgaaacaggaatggccttcatcacttacgtctgtgtcaacttgttttttggcattaattccattgtttccctgtcagtggtatactttctttccaaggaaaagcctaatgatccgactttagaacttatttctgaaaccctcaagcgcattttcctgattttcccacaattctgttttggctacggtttgattgaactttctcaacaacagtcggtcctagacttcttaaaagcatatggagtggaatacccaaatgaaacctttgagatgaataaactaggtgcaatgtttgtggctttggtttctcagggcaccatgtttttttccttgcgactcttaatcaacgaatccctgataaagaaactcaggcttttcttcagaaaatttaattcttcacatgtaagggagacaatagatgaggatgaagatgtgcgggctgagagattaagagttgagagtggtgcagctgaatttgacttggtccaactttattgtctcacaaagacctaccaacttatccacaaaaagattatagctgtaaacaacatcagcattgggatacctgctggagagtgttttgggcttcttggagtgaatggagcaggaaagaccactatattcaagatgctgacaggagacatcattccttcaagtggaaacattctgatcagaaataagaccggatctctgggtcacgttgattctcacagctcattagttggctactgtcctcaggaagatgccttagatgacctggtaactgtggaagaacatttgtatttctatgccagggtacatggaattccagaaaaggatattaaagaaactgttcataaactccttaggagacttcacctgatgcccttcaaggacagagctacctctatgtgcagttatggcacaaaaagaaaattatccactgcactggccttgatagggaaaccttccattctactgctggatgagccgagctctggcatggatccgaagtcgaaacggcacctctggaagatcatttcagaagaagtacagaacaaatgttccgtcatcctcacatctcacagcatggaagaatgtgaagctctctgtaccaggttggccattatggtgaatggaaagtttcaatgtattggatctttgcagcacataaagagcaggtttggacgaggatttactgtcaaagttcacttgaagaataacaaagtgaccatggagaccctcacaaagttcatgcagctgcactttccaaaaacatacttaaaagatcagcacctcagcatgctagagtatcatgtaccagtcacagcaggaggagtcgcaaacatttttgatctgctggaaaccaacaagactgctttaaatattacaaatttcttagtgagtcagaccactctggaagaggttttcatcaactttgccaaagaccagaagtcctatgaaactgctgataccagcagccaaggttccactataagtgttgactcacaagatgaccagatggagtcttaacacttccagcaaactcaatctcagcgtgtgaccaatggcttcattttgaagaaaagccacagaagatacacttccgcaagatatcttcattttaaagtaaagtaatatactgtatggaaagttacaactgtgttagactaacaagtaattataaaaggaaatttttccttctaaggtcagtgagtgttgttgctactgaaatgaattcctgtatactcaacactgtgagcatgctaatgtatatgctggtgattcttatgcaaaggtgaagccacctcaagatgaatatcttaatttattactttcaataaaaagacagtttaaaaggcatggattttggtagttgaaatataagagtggagaagaaaagtcagatggtttgtggcaggtgccaccgggcaagcagacaacataatttatttccagaaaacaacagaatgaacatcatcatgaatacatgaatcggctgtgatgtgtgaactgctaagggccaaatgaacgtttgcagagcagtgggcacaatgtttacaatgtatgtgtatgtcactttcggtacctgtgaatgcatggggacgtgctgaacccgaaaaaaagtgcctttccataaggactgcaatagagagggcaatttaccctggtggtacacggaacctagattcactcctgccatgccttgccaatagtaagctgcagggtggaacaagaaatcacttgctctggggggaagggaggggggaatgggtgtgtcagctgggtagatacaaaccctgaaaagagaatccatgtgctactggcaggcaacattttttaaagctctttcagaaaccctcatatttggggtttcttttcaggaaacattcctgtggagggaaaacgaatatgaagataattttcagctaattatctgggtgacccagaatcgtgtatatggctataggatagacttcttaataatggcaagtgacgtggccctggggaaaggtgctttatgtaccgtgtgtgcgtgtatgtgtgtgtatctatacaagtttgtcagctttggcatgactgtttgtctcgaaaaccaataaactcaaagtttagaaaaactc

SEQ ID NO: 4028 - protein, 2595 aa, Homo sapiens; identical to SEQ ID NO: 364

SEQ ID NO: 4029 - DNA, 7322 bp, Homo sapiens
atttcctataaatatcacaaatatttccaacaaaagagcatagatgtcttttatacaattcttttgagaatgattctgcagatttctgcattttctcctcattaatttgacctgggatggttttcactgaggaaaaaaatctttaagcaaacatgttaaatgtttacctatataaaaattattacttcaggtgactccgataatataacgcatgtgtggaatgaggatgatggacagaccttatctccaagcagtctggctgcacagctcctaattctggaaaactttgaagatgccctcttaaatatatcagcaaatagtccttatattccttacttggcatgtgtgagaaatgtgactgacagtttggccagaggttcaccagaaaatctaagactcctgcagtccacaatacgatttaaaaaatcttttcttcgcaatggttcctatgaagattactttcctccagttcctgaagtcctaaaatcaaaactgtctcaacttcgaaacttgaccgaacttctttgtgaatctgaaactttcagtttgatagagaagtcatgccagctctctgatatgagctttgggagcctgtgtgaagaaagtgagtttgatctgcaactcctcgaagcggcagagctgggcaccgaaatagcagccagcttactgtaccatgacaatgtcatatctaaaaaagtgagagatttgctgactggagatccaagcaaaattaatttaaatatggatcagtttctagaacaggcactgcaaatgaattacttggaaaatatcactcagttaataccgatcatagaagccatgctgcatgtcaataacagtgcagatgcttctgaaaagccaggtcagttactagaaatgtttaaaaatgttgaagagctgaaagaagatttaaggagaacaacaggaatgtccaacaggactattgacaagttgctggccattcccatccctgataatagagctgagattatttctcaggtgttctggctgcattcctgtgatactaatatcaccactcccaaactagaagatgcaatgaaagaattctgcaacctgtctctttcagagagatcccggcagtcttacctcatcggactcacccttctgcactacttaaacatttacaacttcacatacaaggtgtttttcccgaggaaagatcaaaagccagtagaaaagatgatggagctcttcataagactaaaagagattctcaatcagatggcttctggcacacatccgctgctagacaaaatgagatccctgaagcaaatgcatctgcccagaagtgttccattaacacaggcaatgtacagaagcaaccgaatgaacacaccacaaggatcatttagcaccatctcccaagcattatgttctcaaggaattaccactgaatatttaactgccatgctgccctcttcccagaggccaaaaggcaaccacaccaaggattttttgacttataaattaactaaagagcaaattgcttcaaaatatggaattcccataaattccacaccattttgcttctccctttataaagacatcattaacatgcccgctggacctgtgatttgggctttcttgaaacctatgttgttgggaagaattttgtatgcaccatataacccagtcacaaaggcaataatggaaaagtccaatgtaactctgagacagctggcggaattaagagaaaaatctcaagagtggatggataagtcgccacttttcatgaattccttccatctgttaaaccaggcaattccaatgctccagaatactctaaggaacccttttgtgcaagtttttgtaaagttctccgtgggactcgatgctgttgaactattgaaacagatagatgaactcgatattctaagactgaaattagagaacaacattgacatcatcgatcagcttaacacactatcttccctgacagtaaatatttcctcttgtgtattatatgaccgtattcaggcagcaaaaaccatagatgaaatggagagagaggctaaaaggctctacaaaagcaacgaactctttggaagtgttatttttaagcttccttctaacagaagctggcacagaggctatgactctggaaatgtctttcttcctcctgtcataaaatataccatccggatgagtctcaagaccgcacagaccacaagaagcctaagaaccaagatttgggctccagggccacacaattctccatcacacaaccagatctatggcagggcttttatttatttacaggatagtattgaaagagcaatcattgaattgcaaactggaaggaactcccaggaaatagcagtccaggttcaagcaattccttatccctgcttcatgaaagacaacttcctaaccagtgtctcttattctcttccaattgtgcttatggttgcctgggttgtatttatagctgcctttgtaaaaaagcttgtctatgagaaagacctccggcttcatgagtacatgaagatgatgggtgtgaactcctgcagccatttctttgcctggcttatagagagtgttggatttttactggttaccatcgtgatcctcatcattatactcaagtttggcaatattcttcctaaaacaaatgggttcattttgttcctgtatttttcggactacagcttctcggttattgccatgagctatcttatcagtgtcttcttcaacaacaccaacattgcagctctgatcggaagcctcatctacatcattgccttctttccatttattgttctggttacagtggagaatgagttgagctatgtattgaaagtgttcatgagcctgctgtccccaacagcattcagctatgcaagccaatacattgcacgatacgaagaacagggcattggtcttcagtgggaaaatatgtacacctccccggttcaggatgacaccacctcatttggctggctgtgctgtctaatcctagctgactctttcatttatttccttattgcttggtatgtcaggaatgtcttcccagggacatacggtatggcagctccctggtattttccaattcttccttcctattggaaggagcgatttgggtgtgcagaggtgaagcctgagaagagcaatggcctcatgtttactaacatcatgatgcagaacaccaacccatctgccagtcctgaatacatgttttcctctaacatcgagcctgaacctaaagatctcacagtcggggttgccctgcatggggtcacaaagatctatggctcaaaagttgctgttgataacctcaatctgaacttttatgaagggcatattacttcattgctggggcccaatggagctgggaaaactactaccatttccatgttaactgggctgtttggggcctcagcaggcaccatttttgtatatggaaaagatatcaaaacagacctacacacggtacggaagaacatgggagtctgtatgcagcacgacgtcttgttcagttacctcactactaaggagcaccttctcctatatggttccatcaaagttcctcactggactaaaaagcagctccacgaggaagtaaaaaggactttaaaagatactggactatatagccatcgtcataagagagttggaacactgtcaggaggcatgaagaggaagttatctatatccatagctctcattggtggatcaagggtagtaattttggatgaaccatctactggagttgacccatgttctcgccgaagtatatgggatgttatatccaagaacaaaactgccagaacaatcattctgtcaacgcaccacttggacgaggctgaagtgctgagtgaccgcatcgccttcctggagcagggtgggcttaggtgctgtgggtccccattttacctcaaggaagcctttggcgatgggtatcacctcacgcttaccaagaagaagagtccaaatttaaatgcaaatgcagtatgtgacaccatggccgtgacagcaatgatccaatcacatctccccgaagcctacctcaaggaggatattgggggagagcttgtttatgtacttcctccattcagcaccaaagtctcaggggcctacctgtcactcctacgggcactcgacaatggcatgggtgacctcaacatcgggtgctacggcatttcagataccaccgtggaggaggtctttctgaacttgaccaaagagtcacaaaaaaatagtgctatgagtcttgagcacttaacacaaaagaaaattgggaattccaatgccaatggcatctcaactcctgacgatttatctgtgagcagcagcaatttcacagacagagatgacaaaatcctgacaagaggagagaggctggatggctttggactgttgctgaagaagatcatggctatactcatcaagaggttccaccacacccgcaggaactggaaaggtctcattgctcaggttatcctccccatcgtctttgttaccactgccatgggccttggcacactgagaaattccagcaacagttatccagagattcagatctccccctctctttatggtacctccgaacagacagccttctatgctaattatcacccgagcacggaagcacttgtctcagcaatgtgggacttccctggaattgacaacatgtgtctgaacaccagtgatctacagtgtttaaacaaagacagtctggaaaaatggaacaccagtggagaacccatcactaattttggtgtttgctcctgctcagaaaatgtccaggaatgtcctaaatttaactattccccaccgcacagaagaacttactcatcccaggtaatttataacctcactgggcaacgagtggaaaattatcttatatcaactgcaaatgagtttgtccaaaaaagatatggaggttggagttttgggctgcctttgacaaaagaccttcgttttgatataacaggagtccctgccaatagaacacttgccaaggtatggtatgatccagaaggctatcactcccttccagcttacctcaacagcctgaataatttccttctgcgagttaacatgtcaaaatacgatgctgcccgacatggcatcatcatgtatagccatccttatccaggagtgcaagaccaagaacaagccacaatcagcagtttaatcgatattttagtggcactgtctatcttgatgggctactctgtcaccaccgccagctttgtcacctatgttgtaagggaacatcaaaccaaagccaaacagttgcagcacatttcaggcattggcgtgacatgctactgggtaacaaacttcatttatgacatggttttctacttggtgcctgtagcgttttcaattggtatcattgcgattttcaaattacctgcattctacagtgaaaacaacctaggcgctgtatctctcctacttctcctgtttgggtatgcaacattttcctggatgtacttgctggctgggctcttccatgaaacaggaatggccttcatcacttacgtctgtgtcaacttgttttttggcattaattccattgtttccctgtcagtggtatactttctttccaaggaaaagcctaatgatccgactttagaacttatttctgaaaccctcaagcgcattttcctgattttcccacaattctgttttggctacggtttgattgaactttctcaacaacagtcggtcctagacttcttaaaagcatatggagtggaatacccaaatgaaacctttgagatgaataaactaggtgcaatgtttgtggctttggtttctcagggcaccatgtttttttccttgcgactcttaatcaacgaatccctgataaagaaactcaggcttttcttcagaaaatttaattcttcacatgtaagggagacaatagatgaggatgaagatgtgcgggctgagagattaagagttgagagtggtgcagctgaatttgacttggtccaactttattgtctcacaaagacctaccaacttatccacaaaaagattatagctgtaaacaacatcagcattgggatacctgctggagagtgttttgggcttcttggagtgaatggagcaggaaagaccactatattcaagatgctgacaggagacatcattccttcaagtggaaacattctgatcagaaataagaccggatctctgggtcacgttgattctcacagctcattagttggctactgtcctcaggaagatgccttagatgacctggtaactgtggaagaacatttgtatttctatgccagggtacatggaattccagaaaaggatattaaagaaactgttcataaactccttaggagacttcacctgatgcccttcaaggacagagctacctctatgtgcagttatggcacaaaaagaaaattatccactgcactggccttgatagggaaaccttccattctactgctggatgagccgagctctggcatggatccgaagtcgaaacggcacctctggaagatcatttcagaagaagtacagaacaaatgttccgtcatcctcacatctcacagcatggaagaatgtgaagctctctgtaccaggttggccattatggtgaatggaaagtttcaatgtattggatctttgcagcacataaagagcaggtttggacgaggatttactgtcaaagttcacttgaagaataacaaagtgaccatggagaccctcacaaagttcatgcagctgcactttccaaaaacatacttaaaagatcagcacctcagcatgctagagtatcatgtaccagtcacagcaggaggagtcgcaaacatttttgatctgctggaaaccaacaagactgctttaaatattacaaatttcttagtgagtcagaccactctggaagaggttttcatcaactttgccaaagaccagaagtcctatgaaactgctgataccagcagccaaggttccactataagtgttgactcacaagatgaccagatggagtcttaacacttccagcaaactcaatctcagcgtgtgaccaatggcttcattttgaagaaaagccacagaagatacacttccgcaagatatcttcattttaaagtaaagtaatatactgtatggaaagttacaactgtgttagactaacaagtaattataaaaggaaatttttccttctaaggtcagtgagtgttgttgctactgaaatgaattcctgtatactcaacactgtgagcatgctaatgtatatgctggtgattcttatgcaaaggtgaagccacctcaagatgaatatcttaatttattactttcaataaaaagacagtttaaaaggc

SEQ ID NO: 4030 - protein, 2277 aa, Homo sapiens; identical to SEQ ID NO: 362

SEQ ID NO: 4031 - DNA, 7459 bp, Homo sapiens
cttctctccaagaactaaacaaacagttctcccagctatccagtgaccccaacaatcagaagatagtgtttcaggaaatagtcagaatgctgtctttcttctcacaagtgcaagagcagaaagctgtgtggcagcttctgtctagttttccaaatgtgtttcagaatgacacatcactaagcaatctatttgatgttcttcgaaaggcaaacagtgtgctgctggttgtgcagaaggtttatccacgttttgcaactaacgaaggtttcagaaccctccagaagtctgttaaacatctgctgtacactctggactccccagctcaaggtgactccgataatataacgcatgtgtggaatgaggatgatggacagaccttatctccaagcagtctggctgcacagctcctaattctggaaaactttgaagatgccctcttaaatatatcagcaaatagtccttatattccttacttggcatgtgtgagaaatgtgactgacagtttggccagaggttcaccagaaaatctaagactcctgcagtccacaatacgatttaaaaaatcttttcttcgcaatggttcctatgaagattactttcctccagttcctgaagtcctaaaatcaaaactgtctcaacttcgaaacttgaccgaacttctttgtgaatctgaaactttcagtttgatagagaagtcatgccagctctctgatatgagctttgggagcctgtgtgaagaaagtgagtttgatctgcaactcctcgaagcggcagagctgggcaccgaaatagcagccagcttactgtaccatgacaatgtcatatctaaaaaagtgagagatttgctgactggagatccaagcaaaattaatttaaatatggatcagtttctagaacaggcactgcaaatgaattacttggaaaatatcactcagttaataccgatcatagaagccatgctgcatgtcaataacagtgcagatgcttctgaaaagccaggtcagttactagaaatgtttaaaaatgttgaagagctgaaagaagatttaaggagaacaacaggaatgtccaacaggactattgacaagttgctggccattcccatccctgataatagagctgagattatttctcaggtgttctggctgcattcctgtgatactaatatcaccactcccaaactagaagatgcaatgaaagaattctgcaacctgtctctttcagagagatcccggcagtcttacctcatcggactcacccttctgcactacttaaacatttacaacttcacatacaaggtgtttttcccgaggaaagatcaaaagccagtagaaaagatgatggagctcttcataagactaaaagagattctcaatcagatggcttctggcacacatccgctgctagacaaaatgagatccctgaagcaaatgcatctgcccagaagtgttccattaacacaggcaatgtacagaagcaaccgaatgaacacaccacaaggatcatttagcaccatctcccaagcattatgttctcaaggaattaccactgaatatttaactgccatgctgccctcttcccagaggccaaaaggcaaccacaccaaggattttttgacttataaattaactaaagagcaaattgcttcaaaatatggaattcccataaattccacaccattttgcttctccctttataaagacatcattaacatgcccgctggacctgtgatttgggctttcttgaaacctatgttgttgggaagaattttgtatgcaccatataacccagtcacaaaggcaataatggaaaagtccaatgtaactctgagacagctggcggaattaagagaaaaatctcaagagtggatggataagtcgccacttttcatgaattccttccatctgttaaaccaggcaattccaatgctccagaatactctaaggaacccttttgtgcaagtttttgtaaagttctccgtgggactcgatgctgttgaactattgaaacagatagatgaactcgatattctaagactgaaattagagaacaacattgacatcatcgatcagcttaacacactatcttccctgacagtaaatatttcctcttgtgtattatatgaccgtattcaggcagcaaaaaccatagatgaaatggagagagaggctaaaaggctctacaaaagcaacgaactctttggaagtgttatttttaagcttccttctaacagaagctggcacagaggctatgactctggaaatgtctttcttcctcctgtcataaaatataccatccggatgagtctcaagaccgcacagaccacaagaagcctaagaaccaagatttgggctccagggccacacaattctccatcacacaaccagatctatggcagggcttttatttatttacaggatagtattgaaagagcaatcattgaattgcaaactggaaggaactcccaggaaatagcagtccaggttcaagcaattccttatccctgcttcatgaaagacaacttcctaaccagtgtctcttattctcttccaattgtgcttatggttgcctgggttgtatttatagctgcctttgtaaaaaagcttgtctatgagaaagacctccggcttcatgagtacatgaagatgatgggtgtgaactcctgcagccatttctttgcctggcttatagagagtgttggatttttactggttaccatcgtgatcctcatcattatactcaagtttggcaatattcttcctaaaacaaatgggttcattttgttcctgtatttttcggactacagcttctcggttattgccatgagctatcttatcagtgtcttcttcaacaacaccaacattgcagctctgatcggaagcctcatctacatcattgccttctttccatttattgttctggttacagtggagaatgagttgagctatgtattgaaagtgttcatgagcctgctgtccccaacagcattcagctatgcaagccaatacattgcacgatacgaagaacagggcattggtcttcagtgggaaaatatgtacacctccccggttcaggatgacaccacctcatttggctggctgtgctgtctaatcctagctgactctttcatttatttccttattgcttggtatgtcaggaatgtcttcccagggacatacggtatggcagctccctggtattttccaattcttccttcctattggaaggagcgatttgggtgtgcagaggtgaagcctgagaagagcaatggcctcatgtttactaacatcatgatgcagaacaccaacccatctgccagtcctgaatacatgttttcctctaacatcgagcctgaacctaaagatctcacagtcggggttgccctgcatggggtcacaaagatctatggctcaaaagttgctgttgataacctcaatctgaacttttatgaagggcatattacttcattgctggggcccaatggagctgggaaaactactaccatttccatgttaactgggctgtttggggcctcagcaggcaccatttttgtatatggaaaagatatcaaaacagacctacacacggtacggaagaacatgggagtctgtatgcagcacgacgtcttgttcagttacctcactactaaggagcaccttctcctatatggttccatcaaagttcctcactggactaaaaagcagctccacgaggaagtaaaaaggactttaaaagatactggactatatagccatcgtcataagagagttggaacactgtcaggaggcatgaagaggaagttatctatatccatagctctcattggtggatcaagggtagtaattttggatgaaccatctactggagttgacccatgttctcgccgaagtatatgggatgttatatccaagaacaaaactgccagaacaatcattctgtcaacgcaccacttggacgaggctgaagtgctgagtgaccgcatcgccttcctggagcagggtgggcttaggtgctgtgggtccccattttacctcaaggaagcctttggcgatgggtatcacctcacgcttaccaagaagaagagtccaaatttaaatgcaaatgcagtatgtgacaccatggccgtgacagcaatgatccaatcacatctccccgaagcctacctcaaggaggatattgggggagagcttgtttatgtacttcctccattcagcaccaaagtctcaggggcctacctgtcactcctacgggcactcgacaatggcatgggtgacctcaacatcgggtgctacggcatttcagataccaccgtggaggaggtctttctgaacttgaccaaagagtcacaaaaaaatagtgctatgagtcttgagcacttaacacaaaagaaaattgggaattccaatgccaatggcatctcaactcctgacgatttatctgtgagcagcagcaatttcacagacagagatgacaaaatcctgacaagaggagagaggctggatggctttggactgttgctgaagaagatcatggctatactcatcaagaggttccaccacacccgcaggaactggaaaggtctcattgctcaggttatcctccccatcgtctttgttaccactgccatgggccttggcacactgagaaattccagcaacagttatccagagattcagatctccccctctctttatggtacctccgaacagacagccttctatgctaattatcacccgagcacggaagcacttgtctcagcaatgtgggacttccctggaattgacaacatgtgtctgaacaccagtgatctacagtgtttaaacaaagacagtctggaaaaatggaacaccagtggagaacccatcactaattttggtgtttgctcctgctcagaaaatgtccaggaatgtcctaaatttaactattccccaccgcacagaagaacttactcatcccaggtaatttataacctcactgggcaacgagtggaaaattatcttatatcaactgcaaatgagtttgtccaaaaaagatatggaggttggagttttgggctgcctttgacaaaagaccttcgttttgatataacaggagtccctgccaatagaacacttgccaaggtatggtatgatccagaaggctatcactcccttccagcttacctcaacagcctgaataatttccttctgcgagttaacatgtcaaaatacgatgctgcccgacatggcatcatcatgtatagccatccttatccaggagtgcaagaccaagaacaagccacaatcagcagtttaatcgatattttagtggcactgtctatcttgatgggctactctgtcaccaccgccagctttgtcacctatgttgtaagggaacatcaaaccaaagccaaacagttgcagcacatttcaggcattggcgtgacatgctactgggtaacaaacttcatttatgacatggttttctacttggtgcctgtagcgttttcaattggtatcattgcgattttcaaattacctgcattctacagtgaaaacaacctaggcgctgtatctctcctacttctcctgtttgggtatgcaacattttcctggatgtacttgctggctgggctcttccatgaaacaggaatggccttcatcacttacgtctgtgtcaacttgttttttggcattaattccattgtttccctgtcagtggtatactttctttccaaggaaaagcctaatgatccgactttagaacttatttctgaaaccctcaagcgcattttcctgattttcccacaattctgttttggctacggtttgattgaactttctcaacaacagtcggtcctagacttcttaaaagcatatggagtggaatacccaaatgaaacctttgagatgaataaactaggtgcaatgtttgtggctttggtttctcagggcaccatgtttttttccttgcgactcttaatcaacgaatccctgataaagaaactcaggcttttcttcagaaaatttaattcttcacatgtaagggagacaatagatgaggatgaagatgtgcgggctgagagattaagagttgagagtggtgcagctgaatttgacttggtccaactttattgtctcacaaagacctaccaacttatccacaaaaagattatagctgtaaacaacatcagcattgggatacctgctggagagtgttttgggcttcttggagtgaatggagcaggaaagaccactatattcaagatgctgacaggagacatcattccttcaagtggaaacattctgatcagaaataagaccggatctctgggtcacgttgattctcacagctcattagttggctactgtcctcaggaagatgccttagatgacctggtaactgtggaagaacatttgtatttctatgccagggtacatggaattccagaaaaggatattaaagaaactgttcataaactccttaggagacttcacctgatgcccttcaaggacagagctacctctatgtgcagttatggcacaaaaagaaaattatccactgcactggccttgatagggaaaccttccattctactgctggatgagccgagctctggcatggatccgaagtcgaaacggcacctctggaagatcatttcagaagaagtacagaacaaatgttccgtcatcctcacatctcacagcatggaagaatgtgaagctctctgtaccaggttggccattatggtgaatggaaagtttcaatgtattggatctttgcagcacataaagagcaggtttggacgaggatttactgtcaaagttcacttgaagaataacaaagtgaccatggagaccctcacaaagttcatgcagctgcactttccaaaaacatacttaaaagatcagcacctcagcatgctagagtatcatgtaccagtcacagcaggaggagtcgcaaacatttttgatctgctggaaaccaacaagactgctttaaatattacaaatttcttagtgagtcagaccactctggaagaggttttcatcaactttgccaaagaccagaagtcctatgaaactgctgataccagcagccaaggttccactataagtgttgactcacaagatgaccagatggagtcttaacacttccagcaaactcaatctcagcgtgtgaccaatggcttcattttgaagaaaagccacagaagatacacttccgcaagatatcttcattttaaagtaaagtaatatactgtatggaaagttacaactgtgttagactaacaagtaattataaaaggaaatttttccttctaaggtcagtgagtgttgttgctactgaaatgaattcctgtatactcaacactgtgagcatgctaatgtatatgctggtgattcttatgcaaaggtgaagccacctcaagatgaatatcttaatttattactttcaataaaaagacagtttaaaaggc

SEQ ID NO: 4032 - protein, 2347 aa, Homo sapiens
MLSFFSQVQEQKAVWQLLSSFPNVFQNDTSLSNLFDVLRKANSVLLVVQKVYPRFATNEGFRTLQKSVKHLLYTLDSPAQGDSDNITHVWNEDDGQTLSPSSLAAQLLILENFEDALLNISANSPYIPYLACVRNVTDSLARGSPENLRLLQSTIRFKKSFLRNGSYEDYFPPVPEVLKSKLSQLRNLTELLCESETFSLIEKSCQLSDMSFGSLCEESEFDLQLLEAAELGTEIAASLLYHDNVISKKVRDLLTGDPSKINLNMDQFLEQALQMNYLENITQLIPIIEAMLHVNNSADASEKPGQLLEMFKNVEELKEDLRRTTGMSNRTIDKLLAIPIPDNRAEIISQVFWLHSCDTNITTPKLEDAMKEFCNLSLSERSRQSYLIGLTLLHYLNIYNFTYKVFFPRKDQKPVEKMMELFIRLKEILNQMASGTHPLLDKMRSLKQMHLPRSVPLTQAMYRSNRMNTPQGSFSTISQALCSQGITTEYLTAMLPSSQRPKGNHTKDFLTYKLTKEQIASKYGIPINSTPFCFSLYKDIINMPAGPVIWAFLKPMLLGRILYAPYNPVTKAIMEKSNVTLRQLAELREKSQEWMDKSPLFMNSFHLLNQAIPMLQNTLRNPFVQVFVKFSVGLDAVELLKQIDELDILRLKLENNIDIIDQLNTLSSLTVNISSCVLYDRIQAAKTIDEMEREAKRLYKSNELFGSVIFKLPSNRSWHRGYDSGNVFLPPVIKYTIRMSLKTAQTTRSLRTKIWAPGPHNSPSHNQIYGRAFIYLQDSIERAIIELQTGRNSQEIAVQVQAIPYPCFMKDNFLTSVSYSLPIVLMVAWVVFIAAFVKKLVYEKDLRLHEYMKMMGVNSCSHFFAWLIESVGFLLVTIVILIIILKFGNILPKTNGFILFLYFSDYSFSVIAMSYLISVFFNNTNIAALIGSLIYIIAFFPFIVLVTVENELSYVLKVFMSLLSPTAFSYASQYIARYEEQGIGLQWENMYTSPVQDDTTSFGWLCCLILADSFIYFLIAWYVRNVFPGTYGMAAPWYFPILPSYWKERFGCAEVKPEKSNGLMFTNIMMQNTNPSASPEYMFSSNIEPEPKDLTVGVALHGVTKIYGSKVAVDNLNLNFYEGHITSLLGPNGAGKTTTISMLTGLFGASAGTIFVYGKDIKTDLHTVRKNMGVCMQHDVLFSYLTTKEHLLLYGSIKVPHWTKKQLHEEVKRTLKDTGLYSHRHKRVGTLSGGMKRKLSISIALIGGSRVVILDEPSTGVDPCSRRSIWDVISKNKTARTIILSTHHLDEAEVLSDRIAFLEQGGLRCCGSPFYLKEAFGDGYHLTLTKKKSPNLNANAVCDTMAVTAMIQSHLPEAYLKEDIGGELVYVLPPFSTKVSGAYLSLLRALDNGMGDLNIGCYGISDTTVEEVFLNLTKESQKNSAMSLEHLTQKKIGNSNANGISTPDDLSVSSSNFTDRDDKILTRGERLDGFGLLLKKIMAILIKRFHHTRRNWKGLIAQVILPIVFVTTAMGLGTLRNSSNSYPEIQISPSLYGTSEQTAFYANYHPSTEALVSAMWDFPGIDNMCLNTSDLQCLNKDSLEKWNTSGEPITNFGVCSCSENVQECPKFNYSPPHRRTYSSQVIYNLTGQRVENYLISTANEFVQKRYGGWSFGLPLTKDLRFDITGVPANRTLAKVWYDPEGYHSLPAYLNSLNNFLLRVNMSKYDAARHGIIMYSHPYPGVQDQEQATISSLIDILVALSILMGYSVTTASFVTYVVREHQTKAKQLQHISGIGVTCYWVTNFIYDMVFYLVPVAFSIGIIAIFKLPAFYSENNLGAVSLLLLLFGYATFSWMYLLAGLFHETGMAFITYVCVNLFFGINSIVSLSVVYFLSKEKPNDPTLELISETLKRIFLIFPQFCFGYGLIELSQQQSVLDFLKAYGVEYPNETFEMNKLGAMFVALVSQGTMFFSLRLLINESLIKKLRLFFRKFNSSHVRETIDEDEDVRAERLRVESGAAEFDLVQLYCLTKTYQLIHKKIIAVNNISIGIPAGECFGLLGVNGAGKTTIFKMLTGDIIPSSGNILIRNKTGSLGHVDSHSSLVGYCPQEDALDDLVTVEEHLYFYARVHGIPEKDIKETVHKLLRRLHLMPFKDRATSMCSYGTKRKLSTALALIGKPSILLLDEPSSGMDPKSKRHLWKIISEEVQNKCSVILTSHSMEECEALCTRLAIMVNGKFQCIGSLQHIKSRFGRGFTVKVHLKNNKVTMETLTKFMQLHFPKTYLKDQHLSMLEYHVPVTAGGVANIFDLLETNKTALNITNFLVSQTTLEEVFINFAKDQKSYETADTSSQGSTISVDSQDDQMES

SEQ ID NO: 4033 - DNA, 1115 bp, Homo sapiens
tcaagaaatactctatttcaccagaggaatccttgcaaatacattttactccactatgcaaaatcctgtggaaccagttttttatacatatttttagctgaaagatcaaggaaatgtgtcacagttggggacctgtatcataattatctctgtaggttctacagcatccagcatgatgtccaaagtagcgagattggaaaatgccaaagcaattggggaaaaaaatactgttttctctgaaatgaagactcctcaagatcctgttgctggaatgagtattggactcttcggtctacttctacagtcaccagtacatctggcatacactatgatgcccaacagtaggaagatgaaagaaatgtagatgttggcatttctaaaagagatgttgtatcttttttcctacttaatagactattaggctataaatctcaatcttggccagcaaatgtgtttgccagcttttctttattctttttaatttttttgaggatcagcatggaaaaacaatttgcgcaaggctcaagaagatgagatggtcttataaacagtaattgaaatatgtatattttttaaaagtctgtttcaaatttcaaaccttattttaaaaactatgtgaaagcctcttgtgaaactcaactgaagtaggcatggctgagtccagaggagcagtgtggaggattagaaaaataaacaggcaggagtcagacagtcctggattcaaatcccacttctaggccttagagaaataatataatagtaggggataataatattcaccctgaagagtgctgtagggatcatcaatatttcatataaagcatgtcatatgggcagtgctcaatgaatggcaatgcttttgcccaggtatagaacttcttagtataaaagttttgtctttcagaaaattaacaaagatattcaggaccggaattcagctctggatcaagtagacctgatagatatctacagaactttctatcccaaaacaacagaatgtacatttttctcattgccacatgtcacttactctaaaatcgatcacataatcggaagtaaaacactcctcagtaaatgcaaaagaactgaaatcataacaaacagtctctcagacc

SEQ ID NO: 4034 - protein, 63 aa, Homo sapiens [sequence omitted]

SEQ ID NO: 4035 - DNA, 389 bp, Homo sapiens
acttcagattgcagatttgccaaagcttcatgtagagcccttctctcttttatcacgagtaaaagttcaggtttaaaatagaacaacggatgactaatgccatttccagctgtgactgaattctccactgcctgatgcttttcaaatgtatctgaatcagaatcgaacacccactttatgcatagctccctaatcaggaagttattcttcccatcaaagcaactggaaagaaaaaagataaaacaatgaagggaggagaaaacacaaaagttcaagaagagcagaatgttccggcaaggagaaaaagctgggaaaagtcaccaatgaatgccagggttcaccactatcttaggaatatcatgaataaagcgttagattgggtgtgccct

SEQ ID NO: 4036 - protein, 47 aa, Homo sapiens
MKGGENTKVQEEQNVPARRKSWEKSPMNARVHHYLRNIMNKALDWVC

SEQ ID NO: 4037 - DNA, 485 bp, Homo sapiens
ttggttaaggattaaccacagggaaaaatccagcagaaacagaagaactgtgggtttcttaccccagccctcaaggaagctatgccgtgaaaggggtactgatacactgacatacagcaagttggacggggcatcagttcttcatttgtggagtggagaaaagaagaggaaatctctcatttggggcatttgaaggatggcttccctgtttcatcagcttcagatcctggtctggaaaaattggctaggtgtaaaaaggcagccgctttggacacttgtcttgatcttatggccagtcattattttcataattttggctattactcggaccaaatttcctccaactgcaaaaccaacttgggattcttctacttggaacacttgtgatggatggatggcccagattttttttttttcctgcataaatgaggaaactgactcaagatacagggttatgattgcacaataaatcatttgcaaagcta

SEQ ID NO: 4038 - protein, 90 aa, Homo sapiens
MASLFHQLQILVWKNWLGVKRQPLWTLVLILWPVIIFIILAITRTKFPPTAKPTWDSSTWNTCDGWMAQIFFFSCINEETDSRYRVMIAQ

SEQ ID NO: 4039 - DNA, 423 bp, Homo sapiens
gtgtgatcttagggatcatgactgcttcccagaccttagtctcaggatgccacaccggaagagctggaccccacatttgaagacagatgtccctggcggtgcccgcctgctctgtaaagagctagtcccaggctcccattgtgacctagcacctcaacctctcctgacccttttgcctaggccagatcctgagatcggagagtacatacatctccctggggcttgctttcctctcccataaaatttaggagttggggatgatcttatccctctacctagactgtagactcctgggagcgggaggcaaggcactcacaagcaagggcatcagagtgacatcaagacacaaacagccatggaatcttgggaacagatcaaggagtccacctcttaaaatattgtaaaaaataaaatctgagtacg

SEQ ID NO: 4040 - protein, 64 aa, Homo sapiens
MPHRKSWTPHLKTDVPGGARLLCKELVPGSHCDLAPQPLLTLLPRPDPEIGEYIHLPGACFPLP

SEQ ID NO: 4041 - DNA, 373 bp, Homo sapiens
agtttgttcctgactgttgactttgtcctatgggagaggtcatctttgtgcaaattggcaatccacaagaagtgagctgtgcacaagagcatttgaagactcatgacacacagtcatagcaggaagtggcaaggcagcaagctgtgaagaggcttaaggggaagatggggaccagaggctgagaaaagatacagatcatccagagagcaattgtaatagacaccgagcctccctcttcaagtactgacctctaataaacatcttgcattcaagctccatctccactccctgagaacccaacctatgaggctaagtttaaaagaatttacagcaagagcagcaaaagcacattaaaataattaaacaattttta

SEQ ID NO: 4042 - protein, 33 aa, Homo sapiens
TSCIQAPSPLPENPTYEAKFKRIYSKSSKSTLK

SEQ ID NO: 4043 - DNA, 326 bp, Homo sapiens
cgcaaattaaagagtcatggcatgaggaggagcaagagccgatctcctcacaagggagtcaagagaggtggcagcaaaagaaaataccccaatcgcaattaccgctcccacttgtgagcccccagcgggctctgccctggtgcgcttcacacagcaccaagcagcaacaagaacagcagaaggggaactgccaaggagacctgatgttagatcaaagccagagaggagcctatggaatgtggatcaaatgccagttgtgacgaaatgaggaatgtatatgttggctgtttttccccaacatctcaataaaactttgaaagcagaaa

SEQ ID NO: 4044 - protein, 31 aa, Homo sapiens
MRRSKSRSPHKGVKRGGSKRKYPNRNYRSHL

SEQ ID NO: 4045 - DNA, 413 bp, Homo sapiens
ggccttgcaaagcccctcattttggcagaacttaccatgtcgaccagccgcaaattaaagagtcatggcatgaggaggagcaagagccgatctcctcacaagggagtcaagagaggtggcagcaaaagaaaataccgtaagggcaacctgaaaagtaggaaacggggcgatgacgccaatcgcaattaccgctcccacttgtgagcccccagcgggctctgccctggtgcgcttcacacagcaccaagcagcaacaagaacagcagaaggggaactgccaaggagacctgatgttagatcaaagccagagaggagcctatggaatgtggatcaaatgccagttgtgacgaaatgaggaatgtatatgttggctgtttttccccaacatctcaataaaactttgaaagcagaaa

SEQ ID NO: 4046 - protein, 61 aa, Homo sapiens
MTPIAITAPTCEPPAGSALVRFTQHQAATRTAEGELPRRPDVRSKPERSLWNVDQMPVVTK

SEQ ID NO: 4047 - DNA, 394 bp, Homo sapiens
caaacatgcccccatgaaagcagggacctctgtgaaagcaggaattgagaaattgggctcactactgaatattccctgggagttcatcagtcctgccacagaatagaagctcagtctgctggagtttgctgggggtctattccagacgctgttggcctggatatcaccaacggatgctgcagaacagcaaagattgctgcctgctccttcctctggaagctttgtcccagaagggctcctgccaaatgccagccggagctctcccgtaagagatggggcctccacgtgaaaagtaactacaaaacagaaccagaaaatagtcatgctgttcaagtgagttggcatatcacttcatgctactttgaaataaaatttcctcttattttcttatgga

SEQ ID NO: 4048 - protein, 31 aa, Homo sapiens
MLQNSKDCCLLLPLEALSQKGSCQMPAGALP

SEQ ID NO: 4049 - DNA, 350 bp, Homo sapiens
agagctgggaatacaatcttcaggcaaatgactggaaagcctccttcaggcccctaacatctcccagcagtaacatagaagaaagtaccactaaaggagagcaaggagaaggaagaggaagagggcagtgattggcaaggcttgaggcatgaagaaagtgcactttcactgttgcagtagtcttagaaaacaaatatttctgcatggtgacacggttcttactagaaccccagaacatctccatggtatgacctaccacatttcctccccaccaaaataataataataataaggctacacagtatctggaatttcttgctcattaaaatctgattactaccacactcaaa

SEQ ID NO: 4050 - protein, 43 aa, Homo sapiens
MKKVHFHCCSSLRKQIFLHGDTVLTRTPEHLHGMTYHISSPPK

SEQ ID NO: 4051 - DNA, 426 bp, Homo sapiens
tgggaatacaatcttcaggcaaatgactggaaagcctccttcaggcccctaacatctcccagcagtaagtatgagcactaagtgtgtgcattcagccacactaggatacagcagagctgcatgtaccccaggactcagccagtttcctacgggagcatagaagaaagtaccactaaaggagagcaaggagaaggaagaggaagagggcagtgattggcaaggcttgaggcatgaagaaagtgcactttcactgttgcagtagtcttagaaaacaaatatttctgcatggtgacacggttcttactagaaccccagaacatctccatggtatgacctaccacatttcctccccaccaaaataataataataataaggctacacagtatctggaatttcttgctcattaaaatctgattactaccaca

SEQ ID NO: 4052 - protein, 43 aa, Homo sapiens; identical to SEQ ID NO: 4050

SEQ ID NO: 4053 - DNA, 534 bp, Homo sapiens
ggcaaatcattatattgctcccagccttaaaaatcttcaataagttaaagagaggactcaggcttaatggcaatcctgttatcttaccaatgaggagactaaacacctagttggagatcacctccttactggctcagagcttcaggaaatagctcaaggatgtgcaaatactaaacagtagagctgggatttagatccacatctacttaattttagtgcgtatgctctaactgctgccacagaagggatgcagaggaagacggtcagttacccagagggtgatatctttgacttaatgttcaccataaagacagctatcaacaaaagacttgaattctaacttgttatctattgcaggaaagtgcctgcaatatggtgactcctgcagagcacctgacaatcagagaagagttagaatacattaagctcagcatcacatatgtagtttgaatacaactccacctccttctctttctttctcttctttcctgcctttgttgccctacccaggattaaaaccttaggtcttatgtt

SEQ ID NO: 4054 - protein, 30 aa, Homo sapiens
MQRKTVSYPEGDIFDLMFTIKTAINKRLEF

SEQ ID NO: 4055 - DNA, 3135 bp, Homo sapiens
gtcactgacttaactgcctgagtagcatctggcttagaactagtggttctgtcctctagccctacttccctatgctccttaaaagacccttttaccagaaatctaaaattaccagtcccatcaagacaagtataaagatagcctactgcagaaaggcatccagaaagaggaagaaggccctgagtagaaggaacaaggtaccacaaagggtgaatgaacctcttaggaaaaggaagcataatgctgacacttagatgagacccaaagaaggaggatttaacctcccaggggctggaggaatatgagggtagatagaaccctgccggccagctctacctacctcttcctttgtgtgacttttttgaaggtataatagcaccactctgacttgggtcttaactcaagcacatcctaagctgtatgatcttaagcaggttaatcattccacctgtttcaattatgaaatcaggaccctgattacctcgatgctgcaactgagataaatgaaatgatgattccacaatctgtagtgcagggcctgacaaactgcagtctgcaggccaaatccagcaaagttaacaagccagagctattcacttactatggctgctttcacctgcaaagaataaaacatctgctatctggccctataactctgtaggggctctctcaagtggccctatcacctcgcataactcacaaaagctgctgtaagttataacttgggtcatggttacttacctcatacaagactttcatcaataaatattgaacgccctagacagaagattcaaatatttcacatcctgaagttctccacaattatcaatttcaaaattttcttctaagtttcaagtttgaacatgtgatggatctcctggcactgttaaatttattctggttttctcctggactatatgtcttagactatatttactatatgtacatttcttggagtacatggacatgtgaacaggacctggcacatgggcatttattcaatagtaaaacatttcctatgtaaatgtagcaaatatagtgagggtgtcatggaggacagcaccagaatgacacagggaaggctattgacctctttgcctttgccttctccctgagattatgccagtgtatgcacaacattattacagcctactactgccagacacacttataacccattaactgtagcctgttactaccagaggtgcctgtaacccgttaccacggcctactaccataatacatgcttatatccaatgatatagctatattactacagcctgctaccacaagagcgacttgtattattactacatacactacctcaggacactctgctcttgcgcccaggaacacctgctataacatctttaagcaataaattgccacctctccacacccctacactgagtaaggccaaatgtgaccactgaagagcaaaagcaatcatcaaagaaacccaagaagctcatcaacatctaggaaataggacaaaaccctggggcccacctaagtcagatgaacaataaaaaggcagtttctgcatctttcatgttccaaaggaaatagagaattgagttttgaggccccaaccttacagattagctttggtcttgctggtaaatggtttttaaagattgcatttatgattctcagggggaggcaagctgtgagtaagagatgatttggtacctttacataagttatacaaggttcaagtttaattacacaagggattctataaagctgtaagaattatttgatcccaaattgcccaaacactacgttatatctagagtatactaccaggagaagctcgaggatgttgtcctttaaagaattccaaatgcacatatgcctttgtaagtgtacgttgtgtctttgcacttcctcacatttacaattcctggacttcatgatggatgacctgggcttgtttctaggaaaacaagcatcttcatttctgctaacaaatgaatgagaagtgtgagctgatggtgatctggtggttcacctggctcagcctgcactggccttgtttagacggtctatcaaaccaaataagcccttatcatatccagaaagcatctcaatttatcccaaacaaaagcccaaccatgaacatcatagtaaatctttcaaacaggaaaaaaagggtaaactacatatttcctcctgactcacatggttctccctctgcttacaacacccatctgattacatgaagggctagggtactaaggtcactcaacgtcactcttcagctaaacagtaacactcaaaaacacctttgtcagagaaagaagagaaagtttatttagagacactggcgtggagaggaataatcaatgatgattatggtggtcttgggcctgcaccaaaagcccttctttgtgctggccctgggagaacacatggcacagaaaagcccagattcaagcagcttcttcaaccaaaacattgacatattctgctgactaaagagacaaataagaaaattaaagatgtacactccaagaacccacgtgtttttcatatagggaccttcccaactcagtttcccagagattccatcaaatacagaccttcaaagagtttgagagtaccacctcaaagagagataatttcctttctttttgcctctgtggggaatatttcagatgacatgctgaacacctatacctgcaggccttcaccatcttcttctgttcctcaactctggtcagcatgaggttttggttgaaacagcaagatctgcctgctcctactgttgtccctctctcctaccgcaggtccatttgtccaaagcagtccacccatcattccctttatatagtggcttatgacacgggccctcctggtaaagggacatgatgattgatggtgccttgtcacaatggctgaaagtcaacatgagagcttggttgagtggttggggcagtactgaaatgttggataaaattaagaaaatgcctagtaggactccttaaatcagctggctgcctatcagccagcccataggaacccccaagaattacagaaaccaagcaaaattctctatgcctttcaaacccaagtctagcttttttttttttttaaagaataaccatttattaaagtagatacagaacactt

SEQ ID NO: 4056 - protein, 83 aa, Homo sapiens
MNEKCELMVIWWFTWLSLHWPCLDGLSNQISPYHIQKASQFIPNKSPTMNIIVNLSNRKKRVNYIFPPDSHGSPSAYNTHLIT

SEQ ID NO: 4057 - DNA, 397 bp, Homo sapiens
ggacaaatggacctgcggtaggagagagggacaacagtaggagcaggcagatcttgctgtttcaaccaaaacctcatgctgaccagagttgaggaacagaagaagatggtgaaggcctgcaggtataggtgttcagcatgtcatctgaaatattccccacagaggcaaaaagaaaggaaattatctctgaaaaggaatgggaggacaagtcagcagaatatgtcaatgttttggttgaagaagctgcttgaatctgggcttttctgtgccatgtgttctcccagggccagcacaaagaagggcttttggtgcaggcccaagaccaccataatcatcattgattattcctctccacgccagtgtctctaaataaactttctcttctttctctgacaaa

SEQ ID NO: 4058 - protein, 97 aa, Homo sapiens
MLTRVEEQKKMVKACRYRCSACHLKYSPQRQKERKLSLKRNGRTSQQNMSMFWLKKLLESGLFCAMCSPRASTKKGFWCRPKTTIIIIDYSSPRQCL

SEQ ID NO: 4059 - DNA, 321 bp, Homo sapiens
tctcatttctctcttgcctgccaccatgtaagatgtcccttgctcttctgccatgattgtgaggcttccccagccatgtggaactgtccagaaacactcaagagctttctattttgaacaatgaagtcctcacacatgtcttactgggttgctatggtagcaggcgactcagggttacaacattgaaccattcgttctacaatgtgacatcagtgcagtgcaggaggcgcttcaaaattcatggcagtggtgagagcaattttgtgctttaaactgcaggctccctgcatctttaagaaaataaaaataacaaggtggcaa

SEQ ID NO: 4060 - protein, 69 aa, Homo sapiens
GFPSHVELSRNTQELSILNNEVLTHVLLGCYGSRRLRVTTLNHSFYNVTSVQCRRRFKIHGSGESNFVL

SEQ ID NO: 4061 - DNA, 2167 bp, Homo sapiens
tcaaacatggctgaagcaaagacccactggcttggagcagccctgtctcttatccctttaattttcctcatctctggggctgaagcagcttcatttcagagaaaccagctgcttcagaaagaaccagacctcaggttggaaaatgtccaaaagtttcccagtcctgaaatgatcagggctttggagtacatagaaaacctccgacaacaagctcataagaaagaaagcttaagcacatgcaattccctcctatgtatgaagagaattccagggataacccctttaaacgcacaaatgaaatagtggaggaacaatatactcctcaaagccttgctacattggaatctgtcttccaagagctggggaaactgacaggaccaaacaaccagaaacgtgagaggatggatgaggagcaaaaactttatacggatgatgaagatgatatctacaaggctaataacattgcctatgaagatgtggtcgggggagaagactggaacccagtagaggagaaaatagagagtcaaacccaggaagaggtgagagacagcaaagagaatatagaaaaaaatgaacaaatcaacgatgagatgaaacgctcagggcagcttggcatccaggaagaagatcttcggaaagagagtaaagaccaactctcagatgatgtctccaaagtaattgcctatttgaaaaggttagtaaatgctgcaggaagtgggaggttacagaatgggcaaaatggggaaagggccaccaggctttttgagaaacctcttgattctcagtctatttatcagctgattgaaatctcaaggaatttacagatacccccagaagacttaattgagatgctcaaaactggggagaagccgaatggatcagtggaaccggagcgggagcttgaccttcctgttgacctagatgacatctcagaggctgacttagaccatccagacctgttccaaaataggatgctctccaagagtggctaccctaaaacacctggtcgtgctgggactgaggccctaccagacgggctcagtgttgaggatattttaaatcttttagggatggagagtgcagcaaatcagaaaacgtcgtattttcccaatccatataaccaggagaaagttctgccaaggctcccttatggtgctggaagatctagatcgaaccagcttcccaaagctgcctggattccacatgttgaaaacagacagatggcatatgaaaacctgaacgacaaggatcaagaattaggtgagtacttggccaggatgctagttaaataccctgagatcattaattcaaaccaagtgaagcgagttcctggtcaaggctcatctgaagatgacctgcaggaagaggaacaaattgagcaggccatcaaagagcatttgaatcaaggcagctctcaggagactgacaagctggccccggtgagcaaaaggttccctgtggggcccccgaagaatgatgataccccaaataggcagtactgggatgaagatctgttaatgaaagtgctggaatacctcaaccaagaaaaggcagaaaagggaagggagcatattgctaagagagcaatggaaaatatgtaagctgctttcattaattaccctactttcattcctcccaccccaagcaaatcccaacatttctcttcagtgtgttgacttctatcctgttaacactgtaatatctttaaatgatgtacaggcagatgaaaccaggtcactggggagtctgcttcatttcctctgagctgttatcttgtgtatggatatgtgtaaatgttatgactccttgataaaaaatttattatgtccattattcaagaaagatatctatgactgtgtttaatagtatatctaatggctgtggcattgttgatgctcacatatgataaaaaagtgtcctataattctattgaaagtttttaatatttattgaattattttgttactgtctgtagtgttttgtggagtactggaccaaaaaaataaagcattataaatatatagttttatttataaggccttttctattgtgtgttttactgttgattaataaatgttatttctggacaactttggactcttaattatggaaaaccagagacaatgtctacgaagcaagcagtatgaagccaaaagagaaaatcatc

SEQ ID NO: 4062 - protein, 98 aa, Homo sapiens
MAEAKTHWLGAALSLIPLIFLISGAEAASFQRNQLLQKEPDLRLENVQKFPSPEMIRALEYIENLRQQAHKKESLSTCNSLLCMKRIPGITPLNAQMK

SEQ ID NO: 4063 - DNA, 2092 bp, Homo sapiens
atctttcaaacatggctgaagcaaagacccactggcttggagcagccctgtctcttatccctttaattttcctcatctctggggctgaagcagcttcatttcagagaaaccagctgcttcagaaagaaccagacctcaggttggaaaatgtccaaaagtttcccagtcctgaaatgatcagggctttggagtacatagaaaacccctttaaacgcacaaatgaaatagtggaggaacaatatactcctcaaagccttgctacattggaatctgtcttccaagagctggggaaactgacaggaccaaacaaccagaaacgtgagaggatggatgaggagcaaaaactttatacggatgatgaagatgatatctacaaggctaataacattgcctatgaagatgtggtcgggggagaagactggaacccagtagaggagaaaatagagagtcaaacccaggaagaggtgagagacagcaaagagaatatagaaaaaaatgaacaaatcaacgatgagatgaaacgctcagggcagcttggcatccaggaagaagatcttcggaaagagagtaaagaccaactctcagatgatgtctccaaagtaattgcctatttgaaaaggttagtaaatgctgcaggaagtgggaggttacagaatgggcaaaatggggaaagggccaccaggctttttgagaaacctcttgattctcagtctatttatcagctgattgaaatctcaaggaatttacagatacccccagaagacttaattgagatgctcaaaactggggagaagccgaatggatcagtggaaccggagcgggagcttgaccttcctgttgacctagatgacatctcagaggctgacttagaccatccagacctgttccaaaataggatgctctccaagagtggctaccctaaaacacctggtcgtgctgggactgaggccctaccagacgggctcagtgttgaggatattttaaatcttttagggatggagagtgcagcaaatcagaaaacgtcgtattttcccaatccatataaccaggagaaagttctgccaaggctcccttatggtgctggaagatctagatcgaaccagcttcccaaagctgcctggattccacatgttgaaaacagacagatggcatatgaaaacctgaacgacaaggatcaagaattaggtgagtacttggccaggatgctagttaaataccctgagatcattaattcaaaccaagtgaagcgagttcctggtcaaggctcatctgaagatgacctgcaggaagaggaacaaattgagcaggccatcaaagagcatttgaatcaaggcagctctcaggagactgacaagctggccccggtgagcaaaaggttccctgtggggcccccgaagaatgatgataccccaaataggcagtactgggatgaagatctgttaatgaaagtgctggaatacctcaaccaagaaaaggcagaaaagggaagggagcatattgctaagagagcaatggaaaatatgtaagctgctttcattaattaccctactttcattcctcccaccccaagcaaatcccaacatttctcttcagtgtgttgacttctatcctgttaacactgtaatatctttaaatgatgtacaggcagatgaaaccaggtcactggggagtctgcttcatttcctctgagctgttatcttgtgtatggatatgtgtaaatgttatgactccttgataaaaaatttattatgtccattattcaagaaagatatctatgactgtgtttaatagtatatctaatggctgtggcattgttgatgctcacatatgataaaaaagtgtcctataattctattgaaagtttttaatatttattgaattattttgttactgtctgtagtgttttgtggagtactggaccaaaaaaataaagcattataaatatatagttttatttataaggccttttctattgtgtgttttactgttgattaataaatgttatttctggacaactttggactcttaattatggaaaaccagagacaatgtctacgaagcaagcagtatgaagccaaaagagaaaatcatc

SEQ ID NO: 4064 - protein, 504 aa, Homo sapiens
MAEAKTHWLGAALSLIPLIFLISGAEAASFQRNQLLQKEPDLRLENVQKFPSPEMIRALEYIENPFKRTNEIVEEQYTPQSLATLESVFQELGKLTGPNNQKRERMDEEQKLYTDDEDDIYKANNIAYEDVVGGEDWNPVEEKIESQTQEEVRDSKENIEKNEQINDEMKRSGQLGIQEEDLRKESKDQLSDDVSKVIAYLKRLVNAAGSGRLQNGQNGERATRLFEKPLDSQSIYQLIEISRNLQIPPEDLIEMLKTGEKPNGSVEPERELDLPVDLDDISEADLDHPDLFQNRMLSKSGYPKTPGRAGTEALPDGLSVEDILNLLGMESAANQKTSYFPNPYNQEKVLPRLPYGAGRSRSNQLPKAAWIPHVENRQMAYENLNDKDQELGEYLARMLVKYPEIINSNQVKRVPGQGSSEDDLQEEEQIEQAIKEHLNQGSSQETDKLAPVSKRFPVGPPKNDDTPNRQYWDEDLLMKVLEYLNQEKAEKGREHIAKRAMENM

SEQ ID NO: 4065 - DNA, 2553 bp, Homo sapiens
ggcgcagcggctccctataagcagaggagctgtccgtgtgctgaaacggcccgagaagctcgcccggagaacggggaggaatatgctgtggagctcctctgccatataaacaaaaagaggaaatctttcaaacatggctgaagcaaagacccactggcttggagcagccctgtctcttatccctttaattttcctcatctctggggctgaagcagcttcatttcagagaaaccagctgcttcagaaagaaccagacctcaggttggaaaatgtccaaaagtttcccagtcctgaaatgatcagggctttggagtacatagaaaacctccgacaacaagctcataaggaagaaagcagcccagattataatccctaccaaggtgtctctgtcccccttcagcaaaaagaaaatggcgatgaaagccacttgcccgagagggattcactgagtgaagaagactggatgagaataatactcgaagctttgagacaggctgaaaatgagcctcagtctgcaccaaaagaaaataagccctatgccttgaattcagaaaagaactttccaatggacatgagtgatgattatgagacacagcagtggccagaaagaaagcttaagcacatgcaattccctcctatgtatgaagagaattccagggataacccctttaaacgcacaaatgaaatagtggaggaacaatatactcctcaaagccttgctacattggaatctgtcttccaagagctggggaaactgacaggaccaaacaaccagaaacgtgagaggatggatgaggagcaaaaactttatacggatgatgaagatgatatctacaaggctaataacattgcctatgaagatgtggtcgggggagaagactggaacccagtagaggagaaaatagagagtcaaacccaggaagaggtgagagacagcaaagagaatatagaaaaaaatgaacaaatcaacgatgagatgaaacgctcagggcagcttggcatccaggaagaagatcttcggaaagagagtaaagaccaactctcagatgatgtctccaaagtaattgcctatttgaaaaggttagtaaatgctgcaggaagtgggaggttacagaatgggcaaaatggggaaagggccaccaggctttttgagaaacctcttgattctcagtctatttatcagctgattgaaatctcaaggaatttacagatacccccagaagacttaattgagatgctcaaaactggggagaagccgaatggatcagtggaaccggagcgggagcttgaccttcctgttgacctagatgacatctcagaggctgacttagaccatccagacctgttccaaaataggatgctctccaagagtggctaccctaaaacacctggtcgtgctgggactgaggccctaccagacgggctcagtgttgaggatattttaaatcttttagggatggagagtgcagcaaatcagaaaacgtcgtattttcccaatccatataaccaggagaaagttctgccaaggctcccttatggtgctggaagatctagatcgaaccagcttcccaaagctgcctggattccacatgttgaaaacagacagatggcatatgaaaacctgaacgacaaggatcaagaattaggtgagtacttggccaggatgctagttaaataccctgagatcattaattcaaaccaagtgaagcgagttcctggtcaaggctcatctgaagatgacctgcaggaagaggaacaaattgagcaggccatcaaagagcatttgaatcaaggcagctctcaggagactgacaagctggccccggtgagcaaaaggttccctgtggggcccccgaagaatgatgataccccaaataggcagtactgggatgaagatctgttaatgaaagtgctggaatacctcaaccaagaaaaggcagaaaagggaagggagcatattgctaagagagcaatggaaaatatgtaagctgctttcattaattaccctactttcattcctcccaccccaagcaaatcccaacatttctcttcagtgtgttgacttctatcctgttaacactgtaatatctttaaatgatgtacaggcagatgaaaccaggtcactggggagtctgcttcatttcctctgagctgttatcttgtgtatggatatgtgtaaatgttatgactccttgataaaaaatttattatgtccattattcaagaaagatatctatgactgtgtttaatagtatatctaatggctgtggcattgttgatgctcacatatgataaaaaagtgtcctataattctattgaaagtttttaatatttattgaattattttgttactgtctgtagtgttttgtggagtactggaccaaaaaaataaagcattataaatatatagttttatttataaggccttttctattgtgtgttttactgttgattaataaatgttatttctggacaactttggactcttaattatggaaaaccagagacaatgtctacgaagcaagcagtatgaagccaaaagagaaaatcatc

SEQ ID NO: 4066 - protein, 617 aa, Homo sapiens; identical to SEQ ID NO: 368

SEQ ID NO: 4067 - DNA, 1099 bp, Homo sapiens
aacattgcctatgaagatgtggtcgggggagaagactggaacccagtagaggagaaaatagagagtcaaacccaggaagaggtgagagacagcaaagagaatatagaaaaaaatgaacaaatcaacgatgagatgaaacgctcagggcagcttggcatccaggaagaagatcttcggaaagagagtaaagaccaactctcagatgatgtctccaaagtaattgcctatttgaaaaggttagtaaatgctgcaggaagtgggaggttacagaatgggcaaaatggggaaagggccaccaggctttttgagaaacctcttgattctcagtctatttatcagctgattgaaatctcaaggaatttacagatacccccagaagacttaattgagatgctcaaaactggggagaagccgaatggatcagtggaaccggagcgggagcttgaccttcctgttgacctagatgacatctcagaggctgacttagaccatccagacctgttccaaaataggatgctctccaagagtggctaccctaaaacacctggtcgtgctgggactgaggccctaccagacgggctcagtgttgaggatattttaaatcttttagggatggagagtgcagcaaatcagaaaacgtcgtattttcccaagcaaatcccaacatttctcttcagtgtgttgacttctatcctgttaacactgtaatatctttaaatgatgtacaggcagatgaaaccaggtcactggggagtctgcttcatttcctctgagctgttatcttgtgtatggatatgtgtaaatgttatgactccttgataaaaaatttattatgtccattattcaagaaagatatctatgactgtgtttaatagtatatctaatggctgtggcattgttgatgctcacatatgataaaaaagtgtcctataattctattgaaagtttttaatatttattgaattattttgttactgtctgtagtgttttgtggagtactggaccaaaaaaataaagcattataaatatatagttttatttataaggccttttctattgtgtgttttactgttgattaataaatgttatttctggacaa

SEQ ID NO: 4068 - protein, 191 aa, Homo sapiens
MKRSGQLGIQEEDLRKESKDQLSDDVSKVIAYLKRLVNAAGSGRLQNGQNGERATRLFEKPLDSQSIYQLIEISRNLQIPPEDLIEMLKTGEKPNGSVEPERELDLPVDLDDISEADLDHPDLFQNRMLSKSGYPKTPGRAGTEALPDGLSVEDILNLLGMESAANQKTSYFPKQIPTFLFSVLTSILLTL

SEQ ID NO: 4069 - DNA, 1271 bp, Homo sapiens
tggctgaagcaaagacccactggcttggagcagccctgtctcttatccctttaattttcctcatctctggggctgaagcagcttcatttcagagaaaccagctgcttcagaaagaaccagacctcaggttggaaaatgtccaaaagtttcccagtcctgaaatgatcagggctttggagtacatagaaaacctccgacaacaagctcataaggaagaaagcagcccagattataatccctaccaaggtgtctctgtcccccttcagcaaaaagaaaatggcgatgaaagccacttgcccgagagggattcactgagtgaagaagactggatgagaataatactcgaagctttgagacaggctgaaaatgagcctcagtctgcaccaaaagaaaataagccctatgccttgaattcagaaaagaactttccaatggacatgagtgatgattatgagacacagcagtggccagaaagaaagcttaagcacatgcaattccctcctatgtatgaagagaattccagggataacccctttaaacgcacaaatgaaatagtggaggaacaatatactcctcaaagccttgctacattggaatctgtcttccaagagctggggaaactgacaggaccaaacaaccagaaacgtgagaggatggatgaggagcaaaaactttatacggatgatgaagatctgttaatgaaagtgctggaatacctcaaccaagaaaaggcagaaaagggaagggagcatattgctaagagagcaatggaaaatatgtaagctgctttcattaattaccctactttcattcctcccaccccaagcaaatcccaacatttctcttcagtgtgttgacttctatcctgttaacactgtaatatctttaaatgatgtacaggcagatgaaaccaggtcactggggagtctgcttcatttcctctgagctgttatcttgtgtatggatatgtgtaaatgttatgactccttgataaaaaatttattatgtccattattcaagaaagatatctatgactgtgtttaatagtatatctaatggctgtggcattgttgatgctcacatatgataaaaaagtgtcctataattctattgaaagtttttaatatttattgaattattttgttactgtctgtagtgttttgtggagtactggaccaaaaaaataaagcattataaatatatagttttatttataaggccttttctattgtgtgttttactgttgattaataaatgttatttctggacaa

SEQ ID NO: 4070 - protein, 206 aa, Homo sapiens
MIRALEYIENLRQQAHKEESSPDYNPYQGVSVPLQQKENGDESHLPERDSLSEEDWMRIILEALRQAENEPQSAPKENKPYALNSEKNFPMDMSDDYETQQWPERKLKHMQFPPMYEENSRDNPFKRTNEIVEEQYTPQSLATLESVFQELGKLTGPNNQKRERMDEEQKLYTDDEDLLMKVLEYLNQEKAEKGREHIAKRAMENM

SEQ ID NO: 4071 - DNA, 2088 bp, Homo sapiens
tcaaacatggctgaagcaaagacccactggcttggagcagccctgtctcttatccctttaattttcctcatctctggggctgaagcagcttcatttcagagaaaccagctgcttcagaaagaaccagacctcaggttggaaaatgtccaaaagtttcccagtcctgaaatgatcagggctttggagtacatagaaaacctccgacaacaagctcataagaaagaaagcttaagcacatgcaattccctcctatgtatgaagagaattccagggataacccctttaaacgcacaaatgaaatagtggaggaacaatatactcctcaaagccttgctacattggaatctgtcttccaagagctggggaaactgacaggaccaaacaaccagaaacgtgagaggatggatgaggagcaaaaactttatacggatgatgaagatgatatctacaaggctaataacattgcctatgaagatgtggtcgggggagaagactggaacccagtagaggagaaaatagagagtcaaacccaggaagaggtgagagacagcaaagagaatatagaaaaaaatgaacaaatcaacgatgagatgaaacgctcagggcagcttggcatccaggaagaagatcttcggaaagagagtaaagaccaactctcagatgatgtctccaaagtaattgcctatttgaaaaggttagtaaatgctgcaggaagtgggaggttacagaatgggcaaaatggggaaagggccaccaggctttttgagaaacctcttgattctcagtctatttatcagctgattgaaatctcaaggaatttacagatacccccagaagacttaattgagatgctcaaaactggggagaagccgaatggatcagtggaaccggagcgggagcttgaccttcctgttgacctagatgacatctcagaggctgacttagaccatccagacctgttccaaaataggatgctctccaagagtggctaccctaaaacacctggtcgtgctgggactgaggccctaccagacgggctcagtgttgaggatattttaaatcttttagggatggagagtgcagcaaatcagaaaacgtcgtattttcccaatccatataaccaggagaaagttctgccaaggctcccttatggtgctggaagatctagatcgaaccagcttcccaaagctgcctggattccacatgttgaaaacagacagatggcatatgaaaacctgaacgacaaggatcaagaattaggtgagtacttggccaggatgctagttaaataccctgagatcattaattcaaaccaagtgaagcgagttcctggtcaaggctcatctgaagatgacctgcaggaagaggaacaaattgagcaggccatcaaagagcatttgaatcaaggcagctctcaggagactgacaagctggccccggtgagcaaaaggttccctgtggggcccccgaagaatgatgataccccaaataggcagtactgggatgaagatctgttaatgaaagtgctggaatacctcaaccaagaaaaggcagaaaagggaagggagcatattgctaagagagcaatggaaaatatgtaagctgctttcattaattaccctactttcattcctcccaccccaagcaaatcccaacatttctcttcagtgtgttgacttctatcctgttaacactgtaatatctttaaatgatgtacaggcagatgaaaccaggtcactggggagtctgcttcatttcctctgagctgttatcttgtgtatggatatgtgtaaatgttatgactccttgataaaaaatttattatgtccattattcaagaaagatatctatgactgtgtttaatagtatatctaatggctgtggcattgttgatgctcacatatgataaaaaagtgtcctataattctattgaaagtttttaatatttattgaattattttgttactgtctgtagtgttttgtggagtactggaccaaaaaaataaagcattataaatatatagttttatttataaggccttttctattgtgtgttttactgttgattaataaatgttatttctggac

SEQ ID NO: 4072 - protein, 98 aa, Homo sapiens; identical to SEQ ID NO: 4062

SEQ ID NO: 4073 - DNA, 2013 bp, Homo sapiens
atctttcaaacatggctgaagcaaagacccactggcttggagcagccctgtctcttatccctttaattttcctcatctctggggctgaagcagcttcatttcagagaaaccagctgcttcagaaagaaccagacctcaggttggaaaatgtccaaaagtttcccagtcctgaaatgatcagggctttggagtacatagaaaacccctttaaacgcacaaatgaaatagtggaggaacaatatactcctcaaagccttgctacattggaatctgtcttccaagagctggggaaactgacaggaccaaacaaccagaaacgtgagaggatggatgaggagcaaaaactttatacggatgatgaagatgatatctacaaggctaataacattgcctatgaagatgtggtcgggggagaagactggaacccagtagaggagaaaatagagagtcaaacccaggaagaggtgagagacagcaaagagaatatagaaaaaaatgaacaaatcaacgatgagatgaaacgctcagggcagcttggcatccaggaagaagatcttcggaaagagagtaaagaccaactctcagatgatgtctccaaagtaattgcctatttgaaaaggttagtaaatgctgcaggaagtgggaggttacagaatgggcaaaatggggaaagggccaccaggctttttgagaaacctcttgattctcagtctatttatcagctgattgaaatctcaaggaatttacagatacccccagaagacttaattgagatgctcaaaactggggagaagccgaatggatcagtggaaccggagcgggagcttgaccttcctgttgacctagatgacatctcagaggctgacttagaccatccagacctgttccaaaataggatgctctccaagagtggctaccctaaaacacctggtcgtgctgggactgaggccctaccagacgggctcagtgttgaggatattttaaatcttttagggatggagagtgcagcaaatcagaaaacgtcgtattttcccaatccatataaccaggagaaagttctgccaaggctcccttatggtgctggaagatctagatcgaaccagcttcccaaagctgcctggattccacatgttgaaaacagacagatggcatatgaaaacctgaacgacaaggatcaagaattaggtgagtacttggccaggatgctagttaaataccctgagatcattaattcaaaccaagtgaagcgagttcctggtcaaggctcatctgaagatgacctgcaggaagaggaacaaattgagcaggccatcaaagagcatttgaatcaaggcagctctcaggagactgacaagctggccccggtgagcaaaaggttccctgtggggcccccgaagaatgatgataccccaaataggcagtactgggatgaagatctgttaatgaaagtgctggaatacctcaaccaagaaaaggcagaaaagggaagggagcatattgctaagagagcaatggaaaatatgtaagctgctttcattaattaccctactttcattcctcccaccccaagcaaatcccaacatttctcttcagtgtgttgacttctatcctgttaacactgtaatatctttaaatgatgtacaggcagatgaaaccaggtcactggggagtctgcttcatttcctctgagctgttatcttgtgtatggatatgtgtaaatgttatgactccttgataaaaaatttattatgtccattattcaagaaagatatctatgactgtgtttaatagtatatctaatggctgtggcattgttgatgctcacatatgataaaaaagtgtcctataattctattgaaagtttttaatatttattgaattattttgttactgtctgtagtgttttgtggagtactggaccaaaaaaataaagcattataaatatatagttttatttataaggccttttctattgtgtgttttactgttgattaataaatgttatttctggac

SEQ ID NO: 4074 - protein, 504 aa, Homo sapiens; identical to SEQ ID NO: 4064

SEQ ID NO: 4075 - DNA, 2474 bp, Homo sapiens
ggcgcagcggctccctataagcagaggagctgtccgtgtgctgaaacggcccgagaagctcgcccggagaacggggaggaatatgctgtggagctcctctgccatataaacaaaaagaggaaatctttcaaacatggctgaagcaaagacccactggcttggagcagccctgtctcttatccctttaattttcctcatctctggggctgaagcagcttcatttcagagaaaccagctgcttcagaaagaaccagacctcaggttggaaaatgtccaaaagtttcccagtcctgaaatgatcagggctttggagtacatagaaaacctccgacaacaagctcataaggaagaaagcagcccagattataatccctaccaaggtgtctctgtcccccttcagcaaaaagaaaatggcgatgaaagccacttgcccgagagggattcactgagtgaagaagactggatgagaataatactcgaagctttgagacaggctgaaaatgagcctcagtctgcaccaaaagaaaataagccctatgccttgaattcagaaaagaactttccaatggacatgagtgatgattatgagacacagcagtggccagaaagaaagcttaagcacatgcaattccctcctatgtatgaagagaattccagggataacccctttaaacgcacaaatgaaatagtggaggaacaatatactcctcaaagccttgctacattggaatctgtcttccaagagctggggaaactgacaggaccaaacaaccagaaacgtgagaggatggatgaggagcaaaaactttatacggatgatgaagatgatatctacaaggctaataacattgcctatgaagatgtggtcgggggagaagactggaacccagtagaggagaaaatagagagtcaaacccaggaagaggtgagagacagcaaagagaatatagaaaaaaatgaacaaatcaacgatgagatgaaacgctcagggcagcttggcatccaggaagaagatcttcggaaagagagtaaagaccaactctcagatgatgtctccaaagtaattgcctatttgaaaaggttagtaaatgctgcaggaagtgggaggttacagaatgggcaaaatggggaaagggccaccaggctttttgagaaacctcttgattctcagtctatttatcagctgattgaaatctcaaggaatttacagatacccccagaagacttaattgagatgctcaaaactggggagaagccgaatggatcagtggaaccggagcgggagcttgaccttcctgttgacctagatgacatctcagaggctgacttagaccatccagacctgttccaaaataggatgctctccaagagtggctaccctaaaacacctggtcgtgctgggactgaggccctaccagacgggctcagtgttgaggatattttaaatcttttagggatggagagtgcagcaaatcagaaaacgtcgtattttcccaatccatataaccaggagaaagttctgccaaggctcccttatggtgctggaagatctagatcgaaccagcttcccaaagctgcctggattccacatgttgaaaacagacagatggcatatgaaaacctgaacgacaaggatcaagaattaggtgagtacttggccaggatgctagttaaataccctgagatcattaattcaaaccaagtgaagcgagttcctggtcaaggctcatctgaagatgacctgcaggaagaggaacaaattgagcaggccatcaaagagcatttgaatcaaggcagctctcaggagactgacaagctggccccggtgagcaaaaggttccctgtggggcccccgaagaatgatgataccccaaataggcagtactgggatgaagatctgttaatgaaagtgctggaatacctcaaccaagaaaaggcagaaaagggaagggagcatattgctaagagagcaatggaaaatatgtaagctgctttcattaattaccctactttcattcctcccaccccaagcaaatcccaacatttctcttcagtgtgttgacttctatcctgttaacactgtaatatctttaaatgatgtacaggcagatgaaaccaggtcactggggagtctgcttcatttcctctgagctgttatcttgtgtatggatatgtgtaaatgttatgactccttgataaaaaatttattatgtccattattcaagaaagatatctatgactgtgtttaatagtatatctaatggctgtggcattgttgatgctcacatatgataaaaaagtgtcctataattctattgaaagtttttaatatttattgaattattttgttactgtctgtagtgttttgtggagtactggaccaaaaaaataaagcattataaatatatagttttatttataaggccttttctattgtgtgttttactgttgattaataaatgttatttctggac

SEQ ID NO: 4076 - protein, 617 aa, Homo sapiens; identical to SEQ ID NO: 368

SEQ ID NO: 4077 - DNA, 2022 bp, Homo sapiens
tcaaacatggctgaagcaaagacccactggcttggagcagccctgtctcttatccctttaattttcctcatctctggggctgaagcagcttcatttcagagaaaccagctgcttcagaaagaaccagacctcaggttggaaaatgtccaaaagtttcccagtcctgaaatgatcagggctttggagtacatagaaaacctccgacaacaagctcataagaaagaaagcttaagcacatgcaattccctcctatgtatgaagagaattccagggataacccctttaaacgcacaaatgaaatagtggaggaacaatatactcctcaaagccttgctacattggaatctgtcttccaagagctggggaaactgacaggaccaaacaaccagaaacgtgagaggatggatgaggagcaaaaactttatacggatgatgaagatgatatctacaaggctaataacattgcctatgaagatgtggtcgggggagaagactggaacccagtagaggagaaaatagagagtcaaacccaggaagaggtgagagacagcaaagagaatatagaaaaaaatgaacaaatcaacgatgagatgaaacgctcagggcagcttggcatccaggaagaagatcttcggaaagagagtaaagaccaactctcagatgatgtctccaaagtaattgcctatttgaaaaggttagtaaatgctgcaggaagtgggaggttacagaatgggcaaaatggggaaagggccaccaggctttttgagaaacctcttgattctcagtctatttatcagctgattgaaatctcaaggaatttacagatacccccagaagacttaattgagatgctcaaaactggggagaagccgaatggatcagtggaaccggagcgggagcttgaccttcctgttgacctagatgacatctcagaggctgacttagaccatccagacctgttccaaaataggatgctctccaagagtggctaccctaaaacacctggtcgtgctgggactgaggccctaccagacgggctcagtgttgaggatattttaaatcttttagggatggagagtgcagcaaatcagaaaacgtcgtattttcccaatccatataaccaggagaaagttctgccaaggctcccttatggtgctggaagatctagatcgaaccagcttcccaaagctgcctggattccacatgttgaaaacagacagatggcatatgaaaacctgaacgacaaggatcaagaattaggtgagtacttggccaggatgctagttaaataccctgagatcattaattcaaaccaagtgaagcgagttcctggtcaaggctcatctgaagatgacctgcaggaagaggaacaaattgagcaggccatcaaagagcatttgaatcaaggcagctctcaggagactgacaagctggccccggtgagcaaaaggttccctgtggggcccccgaagaatgatgataccccaaataggcagtactgggatgaagatctgttaatgaaagtgctggaatacctcaaccaagaaaaggcagaaaagggaagggagcatattgctaagagagcaatggaaaatatgtaagctgctttcattaattaccctactttcattcctcccaccccaagcaaatcccaacatttctcttcagtgtgttgacttctatcctgttaacactgtaatatctttaaatgatgtacaggcagatgaaaccaggtcactggggagtctgcttcatttcctctgagctgttatcttgtgtatggatatgtgtaaatgttatgactccttgataaaaaatttattatgtccattattcaagaaagatatctatgactgtgtttaatagtatatctaatggctgtggcattgttgatgctcacatatgataaaaaagtgtcctataattctattgaaagtttttaatatttattgaattattttgttactgtctgtagtgttttgtggagtactggaccaaaaaaataaagcattataaatatat

SEQ ID NO: 4078 - protein, 98 aa, Homo sapiens; identical to SEQ ID NO: 4062

SEQ ID NO: 4079 - DNA, 1947 bp, Homo sapiens
atctttcaaacatggctgaagcaaagacccactggcttggagcagccctgtctcttatccctttaattttcctcatctctggggctgaagcagcttcatttcagagaaaccagctgcttcagaaagaaccagacctcaggttggaaaatgtccaaaagtttcccagtcctgaaatgatcagggctttggagtacatagaaaacccctttaaacgcacaaatgaaatagtggaggaacaatatactcctcaaagccttgctacattggaatctgtcttccaagagctggggaaactgacaggaccaaacaaccagaaacgtgagaggatggatgaggagcaaaaactttatacggatgatgaagatgatatctacaaggctaataacattgcctatgaagatgtggtcgggggagaagactggaacccagtagaggagaaaatagagagtcaaacccaggaagaggtgagagacagcaaagagaatatagaaaaaaatgaacaaatcaacgatgagatgaaacgctcagggcagcttggcatccaggaagaagatcttcggaaagagagtaaagaccaactctcagatgatgtctccaaagtaattgcctatttgaaaaggttagtaaatgctgcaggaagtgggaggttacagaatgggcaaaatggggaaagggccaccaggctttttgagaaacctcttgattctcagtctatttatcagctgattgaaatctcaaggaatttacagatacccccagaagacttaattgagatgctcaaaactggggagaagccgaatggatcagtggaaccggagcgggagcttgaccttcctgttgacctagatgacatctcagaggctgacttagaccatccagacctgttccaaaataggatgctctccaagagtggctaccctaaaacacctggtcgtgctgggactgaggccctaccagacgggctcagtgttgaggatattttaaatcttttagggatggagagtgcagcaaatcagaaaacgtcgtattttcccaatccatataaccaggagaaagttctgccaaggctcccttatggtgctggaagatctagatcgaaccagcttcccaaagctgcctggattccacatgttgaaaacagacagatggcatatgaaaacctgaacgacaaggatcaagaattaggtgagtacttggccaggatgctagttaaataccctgagatcattaattcaaaccaagtgaagcgagttcctggtcaaggctcatctgaagatgacctgcaggaagaggaacaaattgagcaggccatcaaagagcatttgaatcaaggcagctctcaggagactgacaagctggccccggtgagcaaaaggttccctgtggggcccccgaagaatgatgataccccaaataggcagtactgggatgaagatctgttaatgaaagtgctggaatacctcaaccaagaaaaggcagaaaagggaagggagcatattgctaagagagcaatggaaaatatgtaagctgctttcattaattaccctactttcattcctcccaccccaagcaaatcccaacatttctcttcagtgtgttgacttctatcctgttaacactgtaatatctttaaatgatgtacaggcagatgaaaccaggtcactggggagtctgcttcatttcctctgagctgttatcttgtgtatggatatgtgtaaatgttatgactccttgataaaaaatttattatgtccattattcaagaaagatatctatgactgtgtttaatagtatatctaatggctgtggcattgttgatgctcacatatgataaaaaagtgtcctataattctattgaaagtttttaatatttattgaattattttgttactgtctgtagtgttttgtggagtactggaccaaaaaaataaagcattataaatatat

SEQ ID NO: 4080 - protein, 504 aa, Homo sapiens; identical to SEQ ID NO: 4064

SEQ ID NO: 4081 - DNA, 2408 bp, Homo sapiens
ggcgcagcggctccctataagcagaggagctgtccgtgtgctgaaacggcccgagaagctcgcccggagaacggggaggaatatgctgtggagctcctctgccatataaacaaaaagaggaaatctttcaaacatggctgaagcaaagacccactggcttggagcagccctgtctcttatccctttaattttcctcatctctggggctgaagcagcttcatttcagagaaaccagctgcttcagaaagaaccagacctcaggttggaaaatgtccaaaagtttcccagtcctgaaatgatcagggctttggagtacatagaaaacctccgacaacaagctcataaggaagaaagcagcccagattataatccctaccaaggtgtctctgtcccccttcagcaaaaagaaaatggcgatgaaagccacttgcccgagagggattcactgagtgaagaagactggatgagaataatactcgaagctttgagacaggctgaaaatgagcctcagtctgcaccaaaagaaaataagccctatgccttgaattcagaaaagaactttccaatggacatgagtgatgattatgagacacagcagtggccagaaagaaagcttaagcacatgcaattccctcctatgtatgaagagaattccagggataacccctttaaacgcacaaatgaaatagtggaggaacaatatactcctcaaagccttgctacattggaatctgtcttccaagagctggggaaactgacaggaccaaacaaccagaaacgtgagaggatggatgaggagcaaaaactttatacggatgatgaagatgatatctacaaggctaataacattgcctatgaagatgtggtcgggggagaagactggaacccagtagaggagaaaatagagagtcaaacccaggaagaggtgagagacagcaaagagaatatagaaaaaaatgaacaaatcaacgatgagatgaaacgctcagggcagcttggcatccaggaagaagatcttcggaaagagagtaaagaccaactctcagatgatgtctccaaagtaattgcctatttgaaaaggttagtaaatgctgcaggaagtgggaggttacagaatgggcaaaatggggaaagggccaccaggctttttgagaaacctcttgattctcagtctatttatcagctgattgaaatctcaaggaatttacagatacccccagaagacttaattgagatgctcaaaactggggagaagccgaatggatcagtggaaccggagcgggagcttgaccttcctgttgacctagatgacatctcagaggctgacttagaccatccagacctgttccaaaataggatgctctccaagagtggctaccctaaaacacctggtcgtgctgggactgaggccctaccagacgggctcagtgttgaggatattttaaatcttttagggatggagagtgcagcaaatcagaaaacgtcgtattttcccaatccatataaccaggagaaagttctgccaaggctcccttatggtgctggaagatctagatcgaaccagcttcccaaagctgcctggattccacatgttgaaaacagacagatggcatatgaaaacctgaacgacaaggatcaagaattaggtgagtacttggccaggatgctagttaaataccctgagatcattaattcaaaccaagtgaagcgagttcctggtcaaggctcatctgaagatgacctgcaggaagaggaacaaattgagcaggccatcaaagagcatttgaatcaaggcagctctcaggagactgacaagctggccccggtgagcaaaaggttccctgtggggcccccgaagaatgatgataccccaaataggcagtactgggatgaagatctgttaatgaaagtgctggaatacctcaaccaagaaaaggcagaaaagggaagggagcatattgctaagagagcaatggaaaatatgtaagctgctttcattaattaccctactttcattcctcccaccccaagcaaatcccaacatttctcttcagtgtgttgacttctatcctgttaacactgtaatatctttaaatgatgtacaggcagatgaaaccaggtcactggggagtctgcttcatttcctctgagctgttatcttgtgtatggatatgtgtaaatgttatgactccttgataaaaaatttattatgtccattattcaagaaagatatctatgactgtgtttaatagtatatctaatggctgtggcattgttgatgctcacatatgataaaaaagtgtcctataattctattgaaagtttttaatatttattgaattattttgttactgtctgtagtgttttgtggagtactggaccaaaaaaataaagcattataaatatat

SEQ ID NO: 4082 - protein, 617 aa, Homo sapiens; identical to SEQ ID NO: 368

SEQ ID NO: 4083 - DNA, 2181 bp, Homo sapiens
ccgggcaggcggcgggcggcgctcggagcgggctccgcggcttgcaaggcgcctgcgactcggtcccaggtcggcgggcggcgcacggcgggctcgcgcgggggccccggcgcgccgggcggcgcagtacgcagcgcgcggacccacgccacggccaggagcccagagcagcgcggccacactgcccaggggtcggccctcggccccggcgctcggagcgcggcggctgcctgggctttaatggctgctccgcggagcagcgcctagggctggaaggcggctgcggctcaggaagtcacccgagcaagcctccttcggggccggccgcacccgccgcggcgcgctccatgggggcgcgctccccccgggcggcccgctgacccgggacgccggggcccgctcgctcgccggccgcgcgtcccggccatgaactgagcccgcgggccagccccgcgcctgctccgcccgcgcctttcttctcgcgcctcctccgcccgccgccggcgggcccggctccccgggggctgcggcgccccgggctcggcggcccgcgggccccggggcgcggggcggcggcggcggggggcgcgcggctccgggcgcggcgcctgcaccatgaactaccagcagcagctggccaactcggctgccatccgggccgagatccagcgcttcgagtcggtccaccccaacatctactccatctacgagctgctggagcgcgtggaggagccggtgctgcagaaccagatccgggagcacgtcatcgccatcgaagatgccttcgtgaacagccaggaatggacgctgagtcgatctgtcccggagctcaaagtgggaattgtgggtaacttggccagcggcaagtctgccctggtgcaccggtacctgacgggcacatatgtccaggaggagtctccggaaggtggcaggttcaagaaagagattgtcgttgatggacagagctatctgctgctgatcagagatgaagggggccccccggaggcgcagtttgccatgtgggtggacgctgttatatttgtcttcagcttggaggatgaaataagtttccagaccgtttaccactactacagtcgaatggccaactatcggaacacgagcgagattcctctggttctggtgggaacccaggatgccataagttctgctaacccgagggtcatcgatgacgccagggcgaggaagctctccaacgacctgaaacggtgcacgtactacgagacgtgtgctacatacgggctgaatgtggagagggtcttccaggacgttgcccagaagattgttgccacaaggaagaagcagcagctgtccataggaccctgcaagtcgctacctaattctcccagccattcctccgtctgttccgcgcaggtgtctgccgtgcacatcagccagacaagtaatggaggtgggagtttaagcgactattcctcctccgttccatcgactcccagcaccagccagaaggaacttcggatcgatgttcctcccactgccaacacgcccacgcccgttcgcaagcagtctaagcgccggtccaacctgttcacctctcggaaagggagcgacccagacaaagagaagaaaggcctggagagtcgtgcggacagcattgggagcggccgagccatcccaattaaacagggcctgcccttctttgtccttgcactgacagccagcacttatctcaggcctgctggagcccgtgcccgtcagtcctccccctggccagggccgaggggtggtcagaccagcccgcattgtgctgaaggcccacaatcagcccagctgtccggggccatgatgaattagcggtgggagttaacatagaggtgaactccagatcggccgatagcttgcaggccgctgctgtttgtcctgacttcagcgcatctctgatagacctttgacaccttccaacaaagaggttacaggagggagagctggagaaatggagcgctcctccagaaagttcggcaactcacaaaagaccccttaatttctatagcgggcaattcagtccacaaaggaaggaaatcaatgagcgtttacgctctttctttgaggaacctttttttaaagaaaaaaacatttactggcgctttgcatgttttgggtacaagcagtggtagaaacataaaacattaaaatccaagattg

SEQ ID NO: 4084 - protein, 405 aa, Homo sapiens
MNYQQQLANSAAIRAEIQRFESVHPNIYSIYELLERVEEPVLQNQIREHVIAIEDAFVNSQEWTLSRSVPELKVGIVGNLASGKSALVHRYLTGTYVQEESPEGGRFKKEIVVDGQSYLLLIRDEGGPPEAQFAMWVDAVIFVFSLEDEISFQTVYHYYSRMANYRNTSEIPLVLVGTQDAISSANPRVIDDARARKLSNDLKRCTYYETCATYGLNVERVFQDVAQKIVATRKKQQLSIGPCKSLPNSPSHSSVCSAQVSAVHISQTSNGGGSLSDYSSSVPSTPSTSQKELRIDVPPTANTPTPVRKQSKRRSNLFTSRKGSDPDKEKKGLESRADSIGSGRAIPIKQGLPFFVLALTASTYLRPAGARARQSSPWPGPRGGQTSPHCAEGPQSAQLSGAMMN

SEQ ID NO: 4085 - DNA, 4163 bp, Homo sapiens
ccgggcaggcggcgggcggcgctcggagcgggctccgcggcttgcaaggcgcctgcgactcggtcccaggtcggcgggcggcgcacggcgggctcgcgcgggggccccggcgcgccgggcggcgcagtacgcagcgcgcggacccacgccacggccaggagcccagagcagcgcggccacactgcccaggggtcggccctcggccccggcgctcggagcgcggcggctgcctgggctttaatggctgctccgcggagcagcgcctagggctggaaggcggctgcggctcaggaagtcacccgagcaagcctccttcggggccggccgcacccgccgcggcgcgctccatgggggcgcgctccccccgggcggcccgctgacccgggacgccggggcccgctcgctcgccggccgcgcgtcccggccatgaactgagcccgcgggccagccccgcgcctgctccgcccgcgcctttcttctcgcgcctcctccgcccgccgccggcgggcccggctccccgggggctgcggcgccccgggctcggcggcccgcgggccccggggcgcggggcggcggcggcggggggcgcgcggctccgggcgcggcgcctgcaccatgaactaccagcagcagctggccaactcggctgccatccgggccgagatccagcgcttcgagtcggtccaccccaacatctactccatctacgagctgctggagcgcgtggaggagccggtgctgcagaaccagatccgggagcacgtcatcgccatcgaagatgccttcgtgaacagccaggaatggacgctgagtcgatctgtcccggagctcaaagtgggaattgtgggtaacttggccagcggcaagtctgccctggtgcaccggtacctgacgggcacatatgtccaggaggagtctccggaaggtggcaggttcaagaaagagattgtcgttgatggacagagctatctgctgctgatcagagatgaagggggccccccggaggcgcagtttgccatgtgggtggacgctgttatatttgtcttcagcttggaggatgaaataagtttccagaccgtttaccactactacagtcgaatggccaactatcggaacacgagcgagattcctctggttctggtgggaacccaggatgccataagttctgctaacccgagggtcatcgatgacgccagggcgaggaagctctccaacgacctgaaacggtgcacgtactacgagacgtgtgctacatacgggctgaatgtggagagggtcttccaggacgttgcccagaagattgttgccacaaggaagaagcagcagctgtccataggaccctgcaagtcgctacctaattctcccagccattcctccgtctgttccgcgcaggtgtctgccgtgcacatcagccagacaagtaatggaggtgggagtttaagcgactattcctcctccgttccatcgactcccagcaccagccagaaggaacttcggatcgatgttcctcccactgccaacacgcccacgcccgttcgcaagcagtctaagcgccggtccaacctgttcacctctcggaaagggagcgacccagacaaagagaagaaaggcctggagagtcgtgcggacagcattgggagcggccgagccatcccaattaaacagggcatgctgttgaagcgaagtggcaaatcgttgaataaagagtggaaaaagaaatatgtcaccctgtgtgacaatggcgtgctgacctatcatcccagtttacatgattacatgcagaatgttcatggtaaggagattgaccttctgagaaccactgtgaaagtcccagggaagaggccaccccgagccacgtcagcctgcgcacccatctccagccctaaaaccaatggcctatccaaggacatgagcagtttacacatctcacccaattcagacacagggctgggtgactccgtatgctccagccccagtatctccagcaccaccagccccaagctcgacccgcccccctcccctcacgccaacagaaagaagcaccgaaggaagaaaagcactagcaacttcaaagccgacggcctgtccggcactgctgaagaacaagaagaaaattttgagtttatcattgtgtccctcactggccaaacatggcactttgaagccacgacgtatgaggagcgggacgcctgggtccaagccatcgagagccagatcctggccagcctgcagtcgtgcgagagcagcaagaacaagtcccggctgacgagccagagcgaggccatggccctgcagtcgatccggaacatgcgcgggaactcccactgtgtggactgcgagacccagaatcccaactgggccagtttgaacttgggagccctcatgtgcatcgaatgctcagggatccaccggaatcttggcacccacctttcccgagtccgatctctggacctggatgactggccagtcgagctcatcaaggtgatgtcatccatcgggaacgagctagccaacagcgtctgggaagagagcagccaggggcggacgaaaccatcggtagactccacaagggaagagaaggaacggtggatccgtgccaagtacgagcagaagctcttcctggccccgctgccctgcacggagctgtccctgggccagcacctgctgcgggccaccgccgacgaggacctgcggacggccatcctgctgctggcacacggctcccgggacgaggtgaacgagacctgcggggagggagacggccgcacggcgctgcatctggcctgccgcaaggggaatgtggtcctggcgcagctcctgatctggtacggagtggacgtcacggcccgagatgcccacgggaacacagctctggcctacgcccggcaggcctccagccaggagtgcatcgacgtgctgctgcagtacggctgccccgacgagcgcttcgtgctcatggccacccctaacctgtccaggagaaacaataaccggaacaacagcagtgggagggtgcccaccatcatctgaggaacagccgtgcccgcctgctcgccgcacctgggacgcggcagcctcgccgcattctcgctcagaagtcgcagcacgtgagtcccgtcgcatcccctccctcttcctggtggccacctccctcccgcccacccactctcaccccaaacaaaatcacaaaacctggacatccctcaaggggcgaagaggcggccgggagactgcagaagtggctccttttcataaactcccctaaaccacacacaggagagagcgacgggcctcggccctttgatgatagcacatggcgcaggacccttgtcctggtggcacaagggatggggacgcgagggggaggggaggcgaggaacaaggagaaggggcaactttccttaactggcagttgagcacatagtacatttcccctctaccaaacggaacacttggattccatctcttctctgaggagctcgacggcataaatcagaagcaagcacagagtttgtcaggtttgaagcccctatgatggtgtgtgtcaaatcagttgtagctaatctgtccagggagaatactggcttcattacacttgtacagccgagttcttcccgcattactgctgtttaatagaacgtgattagtcatcgccgagaagaaagcatattagccgaggaggtagtcacgcggcacgcgccggtgattgccacgatgtgattgcaatactcttagaagcaccatattatcccagacatgttctttcaagcccttggagccctctctaaattcactgtcatcatttagtatctgtttaatttttcagtccaaagagaggaaatcagtcgctgagtattatttgactccggtctccttggtgcaaaaacaaaatgggaaaaataaataagaataactcagaaactcaaaaggaaaccacaaattcagctaataatagcatttcgagtatatttcgtaaactaaggaaatacacaaaaggctgttttttccgactgtaagagatatttgatgtccttttgccgaggtggatgtgttagtctcaggccctcctggaccacgttgcccaagtcacacaggcttctgtgttatgtatttagataagatgtgtgaaaatatatttgaataaaagaagttcataaatatgc

SEQ ID NO: 4086 - protein, 804 aa, Homo sapiens; identical to SEQ ID NO: 372

SEQ ID NO: 4087 - DNA, 5674 bp, Homo sapiens
ccgggcaggcggcgggcggcgctcggagcgggctccgcggcttgcaaggcgcctgcgactcggtcccaggtcggcgggcggcgcacggcgggctcgcgcgggggccccggcgcgccgggcggcgcagtacgcagcgcgcggacccacgccacggccaggagcccagagcagcgcggccacactgcccaggggtcggccctcggccccggcgctcggagcgcggcggctgcctgggctttaatggctgctccgcggagcagcgcctagggctggaaggcggctgcggctcaggaagtcacccgagcaagcctccttcggggccggccgcacccgccgcggcgcgctccatgggggcgcgctccccccgggcggcccgctgacccgggacgccggggcccgctcgctcgccggccgcgcgtcccggccatgaactgagcccgcgggccagccccgcgcctgctccgcccgcgcctttcttctcgcgcctcctccgcccgccgccggcgggcccggctccccgggggctgcggcgccccgggctcggcggcccgcgggccccggggcgcggggcggcggcggcggggggcgcgcggctccgggcgcggcgcctgcaccatgaactaccagcagcagctggccaactcggctgccatccgggccgagatccagcgcttcgagtcggtccaccccaacatctactccatctacgagctgctggagcgcgtggaggagccggtgctgcagaaccagatccgggagcacgtcatcgccatcgaagatgccttcgtgaacagccaggaatggacgctgagtcgatctgtcccggagctcaaagtgggaattgtgggtaacttggccagcggcaagtctgccctggtgcaccggtacctgacgggcacatatgtccaggaggagtctccggaaggtggcaggttcaagaaagagattgtcgttgatggacagagctatctgctgctgatcagagatgaagggggccccccggaggcgcagtttgccatgtgggtggacgctgttatatttgtcttcagcttggaggatgaaataagtttccagaccgtttaccactactacagtcgaatggccaactatcggaacacgagcgagattcctctggttctggtgggaacccaggatgccataagttctgctaacccgagggtcatcgatgacgccagggcgaggaagctctccaacgacctgaaacggtgcacgtactacgagacgtgtgctacatacgggctgaatgtggagagggtcttccaggacgttgcccagaagattgttgccacaaggaagaagcagcagctgtccataggaccctgcaagtcgctacctaattctcccagccattcctccgtctgttccgcgcaggtgtctgccgtgcacatcagccagacaagtaatggaggtgggagtttaagcgactattcctcctccgttccatcgactcccagcaccagccagaaggaacttcggatcgatgttcctcccactgccaacacgcccacgcccgttcgcaagcagtctaagcgccggtccaacctgttcacctctcggaaagggagcgacccagacaaagagaagaaaggcctggagagtcgtgcggacagcattgggagcggccgagccatcccaattaaacagggcatgctgttgaagcgaagtggcaaatcgttgaataaagagtggaaaaagaaatatgtcaccctgtgtgacaatggcgtgctgacctatcatcccagtttacatgattacatgcagaatgttcatggtaaggagattgaccttctgagaaccactgtgaaagtcccagggaagaggccaccccgagccacgtcagcctgcgcacccatctccagccctaaaaccaatggcctatccaaggacatgagcagtttacacatctcacccaattcagacacagggctgggtgactccgtatgctccagccccagtatctccagcaccaccagccccaagctcgacccgcccccctcccctcacgccaacagaaagaagcaccgaaggaagaaaagcactagcaacttcaaagccgacggcctgtccggcactgctgaagaacaagaagaaaattttgagtttatcattgtgtccctcactggccaaacatggcactttgaagccacgacgtatgaggagcgggacgcctgggtccaagccatcgagagccagatcctggccagcctgcagtcgtgcgagagcagcaagaacaagtcccggctgacgagccagagcgaggccatggccctgcagtcgatccggaacatgcgcgggaactcccactgtgtggactgcgagacccagaatcccaactgggccagtttgaacttgggagccctcatgtgcatcgaatgctcagggatccaccggaatcttggcacccacctttcccgagtccgatctctggacctggatgactggccagtcgagctcatcaaggtgatgtcatccatcgggaacgagctagccaacagcgtctgggaagagagcagccaggggcggacgaaaccatcggtagactccacaagggaagagaaggaacggtggatccgtgccaagtacgagcagaagctcttcctggccccgctgccctgcacggagctgtccctgggccagcacctgctgcgggccaccgccgacgaggacctgcggacggccatcctgctgctggcacacggctcccgggacgaggtgaacgagacctgcggggagggagacggccgcacggcgctgcatctggcctgccgcaaggggaatgtggtcctggcgcagctcctgatctggtacggagtggacgtcacggcccgagatgcccacgggaacacagctctggcctacgcccggcaggcctccagccaggagtgcatcgacgtgctgctgcagtacggctgccccgacgagcgcttcgtgctcatggccacccctaacctgtccaggagaaacaataaccggaacaacagcagtgggagggtgcccaccatcatctgaggaacagccgtgcccgcctgctcgccgcacctgggacgcggcagcctcgccgcattctcgctcagaagtcgcagcacgtgagtcccgtcgcatcccctccctcttcctggtggccacctccctcccgcccacccactctcaccccaaacaaaatcacaaaacctggacatccctcaaggggcgaagaggcggccgggagactgcagaagtggctccttttcataaactcccctaaaccacacacaggagagagcgacgggcctcggccctttgatgatagcacatggcgcaggacccttgtcctggtggcacaagggatggggacgcgagggggaggggaggcgaggaacaaggagaaggggcaactttccttaactggcagttgagcacatagtacatttcccctctaccaaacggaacacttggattccatctcttctctgaggagctcgacggcataaatcagaagcaagcacagagtttgtcaggtttgaagcccctatgatggtgtgtgtcaaatcagttgtagctaatctgtccagggagaatactggcttcattacacttgtacagccgagttcttcccgcattactgctgtttaatagaacgtgattagtcatcgccgagaagaaagcatattagccgaggaggtagtcacgcggcacgcgccggtgattgccacgatgtgattgcaatactcttagaagcaccatattatcccagacatgttctttcaagcccttggagccctctctaaattcactgtcatcatttagtatctgtttaatttttcagtccaaagagaggaaatcagtcgctgagtattatttgactccggtctccttggtgcaaaaacaaaatgggaaaaataaataagaataactcagaaactcaaaaggaaaccacaaattcagctaataatagcatttcgagtatatttcgtaaactaaggaaatacacaaaaggctgttttttccgactgtaagagatatttgatgtccttttgccgaggtggatgtgttagtctcaggccctcctggaccacgttgcccaagtcacacaggcttctgtgttatgtatttagataagatgtgtgaaaatatatttgaataaaagaagttcataaatatgcattgatttttgtacagacaaatggcacctctcttaatttataaattgaactggatgtgaactaataatgtgcaactagttgagataagagggttacagatcattgtacatggaaaatattcccagcagtaaacacttccattaatgtgatctacggcttttgaaaaggagcatctcagaataagatggtggtacaatttgcttattaaaattgagaaagaaaaaaaaagacacactggagtatattagaaaggaaaaagaaggaatgtggtctctcatgattgaaagcatgatttagatcggatacggcttttgctaaccaaggaccaagggactctggcaagatggggtggttttccgaatgccagaccgaggtgccttacgaaggcagctgccaatggttctgtggcacagactggctcctgagaacccagacgaccttgacctggcagcccggccctccacgctagtacctcgcctgattttccatcgttgcggtatccagccgcttcagacgtccgccgccttcagtggtggtagtcaaatgtagtcaaccaaaccacagcatcccttaggttaaaagcaaacggggcagctttgcctagagctcattgacagtgtgatggggggagaagggttgtcacaatggaagatgaggacactagactcatgtagcacagaaacatgaagccacacgcaccggcagcctccggggtgttcctcgctctctcgtatgttaaaccttatattttataagagtttttcctcttatttcactttttaaaaaaaattaaagtaggtggggaaaaaaataaagctttacacagaatttatatgtgggtaagtgtttcatggaaatttctaatcttaacgaagctaagtggagctcactcgtatccaaaagtataacaggtgcagaagccacaagtctgagaaccttgacgacagttccatcgtcctgccatttgatttttcagtctgcgtttcatcactgtgtagctattgtaaatgtgaatagaaaaaaacaggtcattgcctatttttgaagaacgcgttggtgttcgagtccactagacacactcgctccacacagccttcaccgtagactctgtagtggacacagatatagcataaatgaaattgttaaattatttcattgtagttaattcccactataggaatgctttatcatagtgaagtttcttttgagaagaaacggaactccttgaggcttctctttgggatgtatatgagcgtgtacatattattctatgtgtttataatataatattttcccaaatgacttcttgtttcactttgccttccacaacctgaatgccagattggttttttcccttcctggcccccagcacaagctgccatgactccccctcagaaaacacagcccctcctctaccattctcagtgatgtccatctgctccactccgcagccactttctagggcccaagttttggtagcagaaggaaaggcagtttttgagggtctttcg

SEQ ID NO: 4088 - protein, 804 aa, Homo sapiens; identical to SEQ ID NO: 372

SEQ ID NO: 4089 - DNA, 2855 bp, Homo sapiens
atgccgccaagatccgtggagatgccacccttcggccagcctttaaaacaacgccacagcgagcctctgcgggagcgcccggtacccgccgcgcccgcctgcctggccctacccgggttgctgggcgcgggttggggcgcctgccggcccgccttgtacggccccagcctctgcgctccgccttcgcttcgcgggtcagcagaggacggagggcgctccgggagctgcacgaggctgccccgggcccagcctccgctgcgctggcagcccgcgggcagctccgagcaggaggctcagggtggctggagtgtggggcccggcctcggtgagcgacaccacggaccccggccccgggccatctggacggcgagcgcgagcgcgtttgaagtggttggggggctctttgttcgccaggccgctctggctctgggcctggaggtggtttttacggctttgatgcctttgaacctattcccaggtgacccgggctcaattaggcccgggcctgagccgggctgtcaggcaagccgcgtgatcaagggcgggctgggcccttttattgaagttgaacccgagaccggggagtgctcggcctccgctgctcctccggccggccaggcgggccgcgaggtggggcccgcgggccacgaccaccgcgttgggaaacccgaggacggcaaagagcgggcccttcgcgcccctgtccgagggccctggctccggccgttctaggggacgttttaccaacaatccgtccaggaaggcagaacgcctaggagcgggccctcgcatgcatgtgagtcggtagcagcgccctgcgcagtgtccgcgcaccggacccgcggcttcagttcggtgcctaaaggttctgcagagccaccgcacccagccccacccggcctgaccgccctccttcctccgcgctgggaaggcccacggcccctctagcccaacaaaatagctttccaggtccctttctttaaaattctcaaataaaaatttaaggaacgagagagagagagagagagagagagaagccaggtccccagccgtcctgccggtgctgggctgcagcccttcctggggcttcacgtcagatggaaagggcctgtttttcccgaactggcctttccctggtttctttgctcagagcagtgacagtagcgatttgctgcccttttaccaaccctgtgtgggtccaaggacccagatccagggacatcttccctttcccagatgcggagggcttttactgaggagaggacctgcctggtagcctgcttcgccatcctcgtctccctgtctgcgtgcccctgtgtcactctggctctgtcggcgtgtctctttctctgtcctttctgtctctttctccagcagagagagttcatagtttagtttgaaagaaaaacagctcagctttggtcctgagcagcccagggctcagcccagccctgaagaccagaggccccggggacgccctggaagggcagcgcaagctggattgcaggctcacctctgcctggggagatggacctggaggatttcacctgcgaccccccggggcgccctggagctatcataaccagcagcccagttcaaccgtctggatgcactttcttcatggcgtgtcttgtctattttaaaatgctttaacaatgattatagtactggaggctgtgatactgacggctgcctgcggaaaaccttgcttaacagaatttggagtgactttcttatgctgtattgccagcccctcagagtcattacctgggcagtgaccccttgcatacataggagaagctaaggcacagtggcatttagcagcgtttccaatgtcacctgtatgttggctggggaagtgacagcattcccctcttttgaggaggggaatttgctgaattaaaacccaaatgaaaatgtcatcaatttgggaaataatactcaggttattgatttagtttgagtttttctttcaaaaattaagtcagtgataaggctaataaagccaatttattaatagcataagtaatacaatatatctctgtgtgaatactctttgcaggaccacccaggctcacttggacttcagtaaaatatcacgcaacaaagattcacagaagtaaatacagttcttggggtacttattcattactgagtatggaaaatcctgtgaatgcttcctttcatatatgtaaaaaagtgtgctttgtttcatgtgactttgtgttttttaaaaaaaaatgaactggtgttctgaaagattcttctattgcacattttccttagggcagcaagtaacagaaggtgatatgttttcacagcaaatttgccagctattagattggctttaatcttgctgcagtagaatgacactgcagggattgtcacctggggatagtcttcaagaatagcagccaggcacggtggctcgcgcctgtaatcccccaactctttgggaggccaaggcaggtggatcacctgaggttgggaggtcgagaccagcctggccaacatagtgaaagcccatttgtactaaaaatacaaaaattagctgggtgtggtggtgcatgcctgtaatttcagctactcgggaggctgaggcaggataatcgcttgaacccaggaggcggaggttgcagtgagccaagatcatgccactgcactccagcctggacgatagagcaagactgtgtcaaaaaaaaaaaaaaaagaaagaaaagaaagaaaaaagaatacgacgcaattatacagcccctgggctttcttaggataagaaactgtgtacttgctcagatgtgaaaaaaatttagtaaactctcaggagctaaataaagcaatgaatttatacatttgaa

SEQ ID NO: 4090 - protein, 243 aa, Homo sapiens
MPPRSVEMPPFGQPLKQRHSEPLRERPVPAAPACLALPGLLGAGWGACRPALYGPSLCAPPSLRGSAEDGGRSGSCTRLPRAQPPLRWQPAGSSEQEAQGGWSVGPGLGERHHGPRPRAIWTASASAFEVVGGLFVRQAALALGLEVVFTALMPLNLFPGDPGSIRPGPEPGCQASRVIKGGLGPFIEVEPETGECSASAAPPAGQAGREVGPAGHDHRVGKPEDGKERALRAPVRGPWLRPF

SEQ ID NO: 4091 - DNA, 3489 bp, Homo sapiens
attccaagctgtcaccccgaagctgagtgaactccgcaaagcgtcttctgtgtacctgggaggagcatggtgccatttcccttcctccttcagactttcttctacatggaaggccccgtcctccacaggtcccagcctcagctgacactcgggtcccaggaggctctgcgaaggtttgctgggcggttcccccgcacgccgggctacaacaaaggaacacagcatgacacgtgctgtgaacctcagctgtgagacaaccgaaggagagacaacattcagcaaaaacagagcccaaactgtccccgtttctctcagccccaactgctccatggcttggagtgcagcaaatgtttcagccgcgctcaaagggaaggctttgctctggagtcagcatgcagagctcgcctcgactcccctccatgccgctcctcaccagcactggctgggtttgaatctcagctccctggctcctcgctgtaagccctggaatgcaaaccccaagggccaaacaccccgaggctctcaggtcccaggcgcggacaccttcctggccttggctgtcatggcccagatggaagcaaagacaactcccctctccacaggtcggctggtcctcctgccccgagagcaggagcccaggcacaggctctgtacagagttctccatctacttctcccagggtggctatgcaaaggccgtctgcctctcgctctctgggtcccacctgcagcctgtcccagtggattctgtaggctccacagtgatgctgggaaaagacccaaacacccggacaaagcacgtggacagctgccaatgccaaaacggcaggaagcaagggaaaggcagctggctccgaccctttgccaaccgtgtgcaacgctgcaggcacctagagccagcgaggagctaccaaactggttcccatctatgcttgcagcggctgctgtcgcagaggcaggacaggggtgcatggctatgccaagtatccttctgggatgagccgattctcttgtcccaggtcgggcatgatggagaggccagaaggtagaagaccgggatcacggaacaggatcaggaccccagaacaggaccgagaccatgaaacaggaagcaagctacatccagcacccagttcagagagagggctggggacgccgacactccacctccttcccagcaaactcggaaggctccagggcatccctggagctgctctggcagagaagaatcagtgtccacacgtgcagctctcgctcgaggaagggcaggggcgacatcagaggcatgctttgcacagcacacgcttctagaatggctgggatttcaaccttgaaagtctcaactccttcttcctcctcagatcttgggattttgaaagtgattcctaaatgcctttcgatctcatttttgccgaaggagatggtcctaatttactgcattccaattggaaacatttttgagagtaaaaatacctgaagacatgttgggcctggaggtagcagactcaaaattaaagcaggggcccctctatccaccgccccccagattgcattaaacacagcatgttggggatcagtgagttgccatggccctgcaatcagacattttgccctctgaaatttagccttgattttgaagccctgagtttagtatatttagatgagctgacgggcccagggagtcactcagaaagggtagaggtccttcagagctgcgttaagatacagtgggagggggtcaaattgctaatttcatctgccactgaaaactcccaaacagcagagaacttcccagaagacttgtgaagttgggagtctgcaggtggcgggggttgggtggggaggtgatggcattctacccctaagagagcattttgaagttgaagctcaacttaaaatatttgtgcctatttttgagacagggtcttgctctgtcacccaggctggagtgcaatggcaccatctcagctcactgcagcctcgacctcccaggcttgagcaatcctctcacctcagcctcctgagtagctgggactacaggcatgcaccaccacacttggctaatgtgtgtatgtgtgtgtgtgtttgtagaaatggggttttgccctgttgcccaggctggtctcaaactcccgaactcaagccacctgctctcctcggcctcccaaagtgttgggattacagatgtgcatcatcgtgcccagccacattatgctttttagagggacatcaccaatcagacagtggcctgggctggacacagcatccctggaagacggcccctctctaaggtgtcatctgccattagccaaggaccctcttgtctctctagctccaagtctccacagaggatgtgctcaaaatgacctctgtggagaccctctctccagataaagcctccttcagataaagcctcttgcggataaagcctaaagcactggtggtcaggacttcaacgtgtgaattccaggaggacacacttcagcccattacagacctgatggcttctgccagacacccagccgatccccatggcttatggaggaagaagacaagtggagacggggaggtggtcgggcgaccctttccacggccagcagcaactgcacccgtgtctgggcacctcctgagtgctgtaagcccccatgcatcatcaagacggaggcccaggcaagggcaggtgggagctgaaacccgtctcaggagatccccaagccaccttcccttggtcccagcccagattgtggctcccctgtgtgcctcccaggccccaggatagacgtcaaccgtgtccccttgtgggtgccttgagcttagcacctgcctgtcccttccaggggcccctctaatacaggacttacatcttcatgaagacactaactgtactagtgcgtgttctccagaggagcagagccactcaaggtgtgcacatcagaagagagctattttaaggaactggctgacgctggcaagccttcaactgattgggtgaggcccaccccttttgacgagagccacctgctttactcgaaggctaatctcatctagaaacacctttacagcaccaccgtccaaagtggagatgatgtcagcaaaggggatattgaagcagatggagtggtacagatggtgggtcactaaaacgcaggttgaaggcttttcacatcaagtcatgcctgtgcccacagacaggggaggaggtggcatgaggctccaagctctggagccttggaagtcaggcaggccccactggaatcacagccccctactcccaggcacacctaaggagtcagtctctcctgaccgatggatccaacttcacagctgcgactgagcaccagggggacgtggcgctgggaaattgtcccggcagacgagactgaaccctagaagggccccatggtaaaactgataaagcctgaaatgtgtgtgcagacatgggcctctttattaccacacaacgaccattaaaatctctctgctatggtgt

SEQ ID NO: 4092 - protein, 274 aa, Homo sapiens
MTRAVNLSCETTEGETTFSKNRAQTVPVSLSPNCSMAWSAANVSAALKGKALLWSQHAELASTPLHAAPHQHWLGLNLSSLAPRCKPWNANPKGQTPRGSQVPGADTFLALAVMAQMEAKTTPLSTGRLVLLPREQEPRHRLCTEFSIYFSQGGYAKAVCLSLSGSHLQPVPVDSVGSTVMLGKDPNTRTKHVDSCQCQNGRKQGKGSWLRPFANRVQRCRHLEPARSYQTGSHLCLQRLLSQRQDRGAWLCQVSFWDEPILLSQVGHDGEARR

SEQ ID NO: 4093 - DNA, 454 bp, Homo sapiens
tcgggctttagcttccacagattcaaggaccaggaggtgagaggaagcagcctcctgtccaggacccagttccggggcctgcccaccctaggaatagatgctgtgatttcttctttgagcctctgcaactcctcaagcctgacttagagcatcctcaagtcacaagagagaaacaaaggacggaaagacgcaaaggacgcttgctggctttctcttttaaacgcctggctgaccacatccccgactctgggctgagccagggcccgaggctggccccaggcgctgcccggagcgggaggcagagcttacgccttgcatcttgcctgatgacagacctcagacaatttctggggcagaggaaaagagcataataagcttaatttcagcattgtaaaggttattattataatcatttccctctgaagaattgtaaataattcatttgcaaaactct

SEQ ID NO: 4094 - protein, 48 aa, Homo sapiens
SGFSFHRFKDQEVRGSSLLSRTQFRGLPTLGIDAVISSLSLCNSSSLT

SEQ ID NO: 4095 - DNA, 9670 bp, Homo sapiens
atccaagatggacgccgcggcgaggcctggccggctccccgcgttagcctgcaccccattgtgtgccctctaagcgcgaattaggctcgcagacatgcggtgctgaccgctaggcagccatgcgggctaccgagtgcgaccggacacggccggggcccgtgtttacggccactactggcccccggtccctgcgcctcctcaaccgcgaagcacccagcggctggcgcctggagcgtcttttggtacgccccaccctctagaattggcagctccagcagccaatgaggtccaggacgcgtgcggggaggcgggcaggggtggagcctctctgccgctcatagggcatccggccccgcggttgagcagccgctgggcgaggggtgggagcagacgggctgtgcgcaggtttcagcgggccaatggaaggccggccaggcgcccggggcgggcgggcgggaggcggggccgagccgtaattgacgagctcttcattagaaaccaggcgggagggcggggcccgcaaggggaggtgacgcaaggctgccgcagccaatggttggcgagccgccggctggctgggcggggccgggccggctgacgggcgtgcggggtggcctatcgccgcctggctcgacgctggagtggggagaagcatcatggttcaacgtgggtcaattttttgtgaatgaggaggggaggttgtggggccgccgccgcggagcaccgtccccgccgccgcccgagcccgagcccgagcccgcgcacccgcccgcgccgccgccgccgccgcccgaacagcctcccagcctgggcccccggcggcgccgtggccgcgtcccggctgtcgccgcccgagcccgagcccgcgcgccggcgggtggcggcgcaggctgaggagatgcggcgcggagcgccggagcagggctagagccggccgccgccgcccgccgcggtaagcgcagccccggcccggcgcccgcgggccattgtccgccgcccgccccgcgccccgcgcagcctgcaggccttggagcccgcggcaggtggacgccgccggtccacacccgccccgcgcgcggccgtgggaggcgggggccagcgctggccgcgcgccgtgggacccgccggtccccagggccgcccggccccttctggacctttccacccgcgccgcgaggcggcttcgcccgccggggcgggggcgcgggggtgggcacggcaggcagcggcgccgtctcccggtgcggggcccgcgccccccgagcaggttcatctgcagaagccagcggacgcctctgttcaacttgtgggttacctggctcatgagaccttgccggcgaggctcggcgcttgaacgtctgtgacccagccctcaccgtcccggtacttgtatgtgttggtgggagtttggagctcgttggagctatcgtttccgtggaaattttgagccatttcgaatcacttaaaggagtggacattgctagcaatgagctcccaaagccatccagatggactttctggccgagaccagccagtggagctgctgaatcctgcccgcgtgaaccacatgcccagcacggtggatgtggccacggcgctgcctctgcaagtggccccctcggcagtgcccatggacctgcgcctggaccaccagttctcactgcctgtggcagagccggccctgcgggagcagcagctgcagcaggagctcctggcgctcaagcagaagcagcagatccagaggcagatcctcatcgctgagttccagaggcagcacgagcagctctcccggcagcacgaggcgcagctccacgagcacatcaagcaacaacaggagatgctggccatgaagcaccagcaggagctgctggaacaccagcggaagctggagaggcaccgccaggagcaggagctggagaagcagcaccgggagcagaagctgcagcagctcaagaacaaggagaagggcaaagagagtgccgtggccagcacagaagtgaagatgaagttacaagaatttgtcctcaataaaaagaaggcgctggcccaccggaatctgaaccactgcatttccagcgaccctcgctactggtacgggaaaacgcagcacagttcccttgaccagagttctccaccccagagcggagtgtcgacctcctataaccacccggtcctgggaatgtacgacgccaaagatgacttccctcttaggaaaacagcttctgaaccgaatctgaaattacggtccaggctaaagcagaaagtggccgaaagacggagcagccccctgttacgcaggaaagacgggccagtggtcactgctctaaaaaagcgtccgttggatgtcacagactccgcgtgcagcagcgccccaggctccggacccagctcacccaacaacagctccgggagcgtcagcgcggagaacggtatcgcgcccgccgtccccagcatcccggcggagacgagtttggcgcacagacttgtggcacgagaaggctcggccgctccacttcccctctacacatcgccatccttgcccaacatcacgctgggcctgcctgccaccggcccctctgcgggcacggcgggccagcaggacgccgagagactcacccttcccgccctccagcagaggctctcccttttccccggcacccacctcactccctacctgagcacctcgcccttggagcgggacggaggggcagcgcacagccctcttctgcagcacatggtcttactggagcagccgccggcacaagcacccctcgtcacaggcctgggagcactgcccctccacgcacagtccttggttggtgcagaccgggtgtccccctccatccacaagctgcggcagcaccgcccactggggcggacccagtcggccccgctgccccagaacgcccaggctctgcagcacctggtcatccagcagcagcatcagcagtttctggagaaacacaagcagcagttccagcagcagcaactgcagatgaacaagatcatccccaagccaagcgagccagcccggcagccggagagccacccggaggagacggaggaggagctccgtgagcaccaggctctgctggacgagccctacctggaccggctgccggggcagaaggaggcgcacgcacaggccggcgtgcaggtgaagcaggagcccattgagagcgatgaggaagaggcagagcccccacgggaggtggagccgggccagcgccagcccagtgagcaggagctgctcttcagacagcaagccctcctgctggagcagcagcggatccaccagctgaggaactaccaggcgtccatggaggccgccggcatccccgtgtccttcggcggccacaggcctctgtcccgggcgcagtcctcacccgcgtctgccaccttccccgtgtctgtgcaggagccccccaccaagccgaggttcacgacaggcctcgtgtatgacacgctgatgctgaagcaccagtgcacctgcgggagtagcagcagccaccccgagcacgccgggaggatccagagcatctggtcccgcctgcaggagacgggcctccggggcaaatgcgagtgcatccgcggacgcaaggccaccctggaggagctacagacggtgcactcggaagcccacaccctcctgtatggcacgaaccccctcaaccggcagaaactggacagtaagaaacttctaggctcgctcgcctccgtgttcgtccggctcccttgcggtggtgttggggtggacagtgacaccatatggaacgaggtgcactcggcgggggcagcccgcctggctgtgggctgcgtggtagagctggtcttcaaggtggccacaggggagctgaagaatggctttgctgtggtccgcccccctggacaccatgcggaggagagcacgcccatgggcttttgctacttcaactccgtggccgtggcagccaagcttctgcagcagaggttgagcgtgagcaagatcctcatcgtggactgggacgtgcaccatggaaacgggacccagcaggctttctacagcgaccccagcgtcctgtacatgtccctccaccgctacgacgatgggaacttcttcccaggcagcggggctcctgatgaggtgggcacagggcccggcgtgggtttcaacgtcaacatggctttcaccggcggcctggacccccccatgggagacgctgagtacttggcggccttcagaacggtggtcatgccgatcgccagcgagtttgccccggatgtggtgctggtgtcatcaggcttcgatgccgtggagggccaccccacccctcttgggggctacaacctctccgccagatgcttcgggtacctgacgaagcagctgatgggcctggctggcggccggattgtcctggccctcgagggaggccacgacctgaccgccatttgcgacgcctcggaagcatgtgtttctgccttgctgggaaacgagcttgatcctctcccagaaaaggttttacagcaaagacccaatgcaaacgctgtccgttccatggagaaagtcatggagatccacagcaagtactggcgctgcctgcagcgcacaacctccacagcggggcgttctctgatcgaggctcagacttgcgagaacgaagaagccgagacggtcaccgccatggcctcgctgtccgtgggcgtgaagcccgccgaaaagagaccagatgaggagcccatggaagaggagccgcccctgtagcactccctcgaagctgctgttctcttgtctgtctgtctctgtcttgaagctcagccaagaaactttcccgtgtcacgcctgcgtcccaccgtggggctctcttggagcacccagggacacccagcgtgcaacagccacgggaagcctttctgccgcccaggcccacaggtctcgagacgcacatgcacgcctgggcgtggcagcctcacagggaacacgggacagacgccggcgacgcgcagacacacggacacgcggaagccaagcacactctggcgggtcccgcaagggacgccgtggaagaaaggagcctgtggcaacaggcggccgagctgccgaattcagttgacacgaggcacagaaaacaaatatcaaagatctaataatacaaaacaaacttgattaaaactggtgcttaaagtttattacccacaactccacagtctctgtgtaaaccactcgactcatcttgtagcttatttttttttaaagaggacgttttctacggctgtggcccgcctctgtgaaccatagcggtgtgcggcggggggtctgcacccgggtgggggacagagggacctttaaagaaaacaaaactggacagaaacaggaatgtgagctgggggagctggcttgagtttctcaaaagccatcggaagatgcgagtttgtgcctttttttttattgctctggtggatttttgtggctgggttttctgaagtctgaggaacaatgccttaagaaaaaacaaacagcaggaatcggtgggacagtttcctgtggccagccgagcctggcagtgctggcaccgcgagctggcctgacgcctcaagcacgggcaccagccgtcatctccggggccaggggctgcagcccggcggtccctgttttgctttattgctgtttaagaaaaatggaggtagttccaaaaaagtggcaaatcccgttggaggttttgaagtccaacaaattttaaacgaatccaaagtgttctcacacgtcacatacgattgagcatctccatctggtcgtgaagcatgtggtaggcacacttgcagtgttacgatcggaatgctttttattaaaagcaagtagcatgaagtattgcttaaattttaggtataaataaatatatatatgtataatatatattccaatgtattccaagctaagaaacttacttgattcttatgaaatcttgataaaatatttataatgcatttatagaaaaagtatatatatatatataaaatgaatgcagattgcgaaggtccctgcaaatggatggcttgtgaatttgctctcaaggtgcttatggaaagggatcctgattgattgaaattcatgttttctcaagctccagattggctagatttcagatcgccaacacattcgccactgggcaactaccctacaagtttgtactttcattttaattattttctaacagaaccgctcccgtctccaagccttcatgcacatatgtacctaatgagtttttatagcaaagaatataaatttgctgttgatttttgtatgaattttttcacaaaaagatcctgaataagcattgttttatgaattttacatttttcctcaccatttagcaattttctgaatggtaataatgtctaaatctttttcctttctgaattcttgcttgtacatttttttttacctttcaaaggtttttaattatttttgtttttatttttgtacgatgagttttctgcagcgtacagaattgttgctgtcagattctattttcagaaagtgagaggagggaccgtaggtcttttcggagtgacaccaacgattgtgtctttcctggtctgtcctaggagctgtataaagaagcccaggggctctttttaactttcaacactagtagtattacgaggggtggtgtgtttttcccctccgtggcaagggcagggagggttgcttaggatgcccggccaccctgggaggcttgccagatgccgggggcagtcagcattaatgaaactcatgtttaaacttctctgaccacatcgtcaggatagaattctaacttgagttttccaaagaccttttgagcatgtcagcaatgcatggggcacacgtggggctctttacccacttgggtttttccactgcagccacgtggccagccctggattttggagcctgtggctgcaaggaacccagggacccttgttgcctggtgaacctgcagggagggtatgattgcctgaccaggacagccagtctttactctttttctcttcaacagtaactgacagtcacgttttactggtaacttattttccagcacatgaagccaccagtttcattccaaagtgtatattgggttcagacttgggggcagaagttcagacacaccgtgctcaggagggacccagagccgagtttcggagtttggtaaagtttacagggtagcttctgaaattaactcaaacttttgaccaaatgagtgcagattcttggattcacttggtcactgggctgctgatggtcagctctgagacagtggtttgagagcaggcagaacggtcttgggacttgtttgactttcccctccctggtggccactctttgctctgaagcccagattggcaagaggagctggtccattccccattcatggcacagagcagtggcagggcccagctagcaggctcttctggcctccttggcctcattctctgcatagccctctggggatcctgccacctgccctcttaccccgccgtggcttatggggaggaatgcatcatctcactttttttttttaagcagatgatgggataacatggactgctcagtggccaggttatcagtggggggacttaattctaatctcattcaaatggagacgccctctgcaaaggcctggcagggggaggcacgtttcatctgtcagctcactccagcttcacaaatgtgctgagagcattactgtgtagccttttctttgaagacacactcggctcttctccacagcaagcgtccagggcagatggcagaggatctgcctcggcgtctgcaggcgggaccacgtcagggagggttccttcatgtgttctccctgtgggtccttggacctttagcctttttcttcctttgcaaaggccttgggggcactggctgggagtcagcaagcgagcactttatatccctttgagggaaaccctgatgacgccactgggcctcttggcgtctgccctgccctcgcggcttcccgccgtgccgcagcgtgcccacgtgcccacgccccaccagcaggcggctgtcccggaggccgtggcccgctgggactggccgcccctccccagcgtcccagggctctggttctggagggccactttgtcaaggtgtttcagtttttctttacttcttttgaaaatctgtttgcaaggggaaggaccatttcgtaatggtctgacacaaaagcaagtttgatttttgcagcactagcaatggactttgttgtttttctttttgatcagaacattccttctttactggtcacagccacgtgctcattccattcttctttttgtagactttgggcccacgtgttttatgggcattgatacatatataaatatatagatataaatatatatgaatatatttttttaagtttcctacacctggaggttgcatggactgtacgaccggcatgactttatattgtatacagattttgcacgccaaactcggcagctttggggaagaagaaaaatgcctttctgttcccctctcatgacatttgcagatacaaaagatggaaatttttctgtaaaacaaaaccttgaaggagaggagggcggggaagtttgcgtcttattgaacttattcttaagaaattgtactttttattgtaagaaaaataaaaaggactacttaaacatttgtcatattaagaaaaaaagtttatctagcacttgtgacataccaataatagagtttattgtatttatgtggaaacagtgttttagggaaactactcagaattcacagtgaactgcctgtctctctcgagttgatttggaggaattttgttttgttttgttttgtttgtttccttttatctccttccacgggccaggcgagcgccgcccgccctcactggccttgtgacggtttattctgattgagaactgggcggactcgaaagagtccccttttccgcacagctgtgttgactttttaattacttttaggtgatgtatggctaagatttcactttaagcagtcgtgaactgtgcgagcactgtggtttacaattatactttgcatcgaaaggaaaccatttcttcattgtaacgaagctgagcgtgttcttagctcggcctcactttgtctctggcattgattaaaagtctgctattgaaagaaaaagaaagcgaacagtttttgtttgttttttttgccgtgtgtgctccatagtggaggcgctattttccaattgatgagaatgacaaacatatataatctatctatctatctatctatctatctatctatacagggggcttgaaccttactcacccaagagcttcttacggaatgtggtagaaaaccaagttgtaacgacactgtaacctacctgatgcctgttcgcgcccgccgtgagctgcgcactggccgtggccaccattcacctctgtaatttaatccgtttctcttggattgtctggacgtgcccgatggttctttcttttgctcagtggagttggaggttttgtgtttggttttctcattcttgtcttgttttgtgtgggtggattttcaccgaccaatgatatcctcttctgacggtcaccttctttccacttcactggagtccagtattctgtaccacatcacgcaacgtgttatcttgtggtgtaaataaagactgcgttacttgccctccca

SEQ ID NO: 4096 - protein, 1084 aa, Homo sapiens
MSSQSHPDGLSGRDQPVELLNPARVNHMPSTVDVATALPLQVAPSAVPMDLRLDHQFSLPVAEPALREQQLQQELLALKQKQQIQRQILIAEFQRQHEQLSRQHEAQLHEHIKQQQEMLAMKHQQELLEHQRKLERHRQEQELEKQHREQKLQQLKNKEKGKESAVASTEVKMKLQEFVLNKKKALAHRNLNHCISSDPRYWYGKTQHSSLDQSSPPQSGVSTSYNHPVLGMYDAKDDFPLRKTASEPNLKLRSRLKQKVAERRSSPLLRRKDGPVVTALKKRPLDVTDSACSSAPGSGPSSPNNSSGSVSAENGIAPAVPSIPAETSLAHRLVAREGSAAPLPLYTSPSLPNITLGLPATGPSAGTAGQQDAERLTLPALQQRLSLFPGTHLTPYLSTSPLERDGGAAHSPLLQHMVLLEQPPAQAPLVTGLGALPLHAQSLVGADRVSPSIHKLRQHRPLGRTQSAPLPQNAQALQHLVIQQQHQQFLEKHKQQFQQQQLQMNKIIPKPSEPARQPESHPEETEEELREHQALLDEPYLDRLPGQKEAHAQAGVQVKQEPIESDEEEAEPPREVEPGQRQPSEQELLFRQQALLLEQQRIHQLRNYQASMEAAGIPVSFGGHRPLSRAQSSPASATFPVSVQEPPTKPRFTTGLVYDTLMLKHQCTCGSSSSHPEHAGRIQSIWSRLQETGLRGKCECIRGRKATLEELQTVHSEAHTLLYGTNPLNRQKLDSKKLLGSLASVFVRLPCGGVGVDSDTIWNEVHSAGAARLAVGCVVELVFKVATGELKNGFAVVRPPGHHAEESTPMGFCYFNSVAVAAKLLQQRLSVSKILIVDWDVHHGNGTQQAFYSDPSVLYMSLHRYDDGNFFPGSGAPDEVGTGPGVGFNVNMAFTGGLDPPMGDAEYLAAFRTVVMPIASEFAPDVVLVSSGFDAVEGHPTPLGGYNLSARCFGYLTKQLMGLAGGRIVLALEGGHDLTAICDASEACVSALLGNELDPLPEKVLQQRPNANAVRSMEKVMEIHSKYWRCLQRTTSTAGRSLIEAQTCENEEAETVTAMASLSVGVKPAEKRPDEEPMEEEPPL

SEQ ID NO: 4097 - DNA, 9158 bp, Homo sapiens
atccaagatggacgccgcggcgaggcctggccggctccccgcgttagcctgcaccccattgtgtgccctctaagcgcgaattaggctcgcagacatgcggtgctgaccgctaggcagccatgcgggctaccgagtgcgaccggacacggccggggcccgtgtttacggccactactggcccccggtccctgcgcctcctcaaccgcgaagcacccagcggctggcgcctggagcgtcttttggtacgccccaccctctagaattggcagctccagcagccaatgaggtccaggacgcgtgcggggaggcgggcaggggtggagcctctctgccgctcatagggcatccggccccgcggttgagcagccgctgggcgaggggtgggagcagacgggctgtgcgcaggtttcagcgggccaatggaaggccggccaggcgcccggggcgggcgggcgggaggcggggccgagccgtaattgacgagctcttcattagaaaccaggcgggagggcggggcccgcaaggggaggtgacgcaaggctgccgcagccaatggttggcgagccgccggctggctgggcggggccgggccggctgacgggcgtgcggggtggcctatcgccgcctggctcgacgctggagtggggagaagcatcatggttcaacgtgggtcaattttttgtgaatgaggaggggaggttgtggggccgccgccgcggagcaccgtccccgccgccgcccgagcccgagcccgagcccgcgcacccgcccgcgccgccgccgccgccgcccgaacagcctcccagcctgggcccccggcggcgccgtggccgcgtcccggctgtcgccgcccgagcccgagcccgcgcgccggcgggtggcggcgcaggctgaggagatgcggcgcggagcgccggagcagggctagagccggccgccgccgcccgccgcggtaagcgcagccccggcccggcgcccgcgggccattgtccgccgcccgccccgcgccccgcgcagcctgcaggccttggagcccgcggcaggtggacgccgccggtccacacccgccccgcgcgcggccgtgggaggcgggggccagcgctggccgcgcgccgtgggacccgccggtccccagggccgcccggccccttctggacctttccacccgcgccgcgaggcggcttcgcccgccggggcgggggcgcgggggtgggcacggcaggcagcggcgccgtctcccggtgcggggcccgcgccccccgagcaggttcatctgcagaagccagcggacgcctctgttcaacttgtgggttacctggctcatgagaccttgccggcgaggctcggcgcttgaacgtctgtgacccagccctcaccgtcccggtacttgtatgtgttggtgggagtttggagctcgttggagctatcgtttccgtggaaattttgagccatttcgaatcacttaaaggagtggacattgctagcaatgagctcccaaagccatccagatggactttctggccgagaccagccagtggagctgctgaatcctgcccgcgtgaaccacatgcccagcacggtggatgtggccacggcgctgcctctgcaagtggccccctcggcagtgcccatggacctgcgcctggaccaccagttctcactgcctgtggcagagccggccctgcgggagcagcagctgcagcaggagctcctggcgctcaagcagaagcagcagatccagaggcagatcctcatcgctgagttccagaggcagcacgagcagctctcccggcagcacgaggcgcagctccacgagcacatcaagcaacaacaggagatgctggccatgaagcaccagcaggagctgctggaacaccagcggaagctggagaggcaccgccaggagcaggagctggagaagcagcaccgggagcagaagctgcagcagctcaagaacaaggagaagggcaaagagagtgccgtggccagcacagaagtgaagatgaagttacaagaatttgtcctcaataaaaagaaggcgctggcccaccggaatctgaaccactgcatttccagcgaccctcgctactggtacgggaaaacgcagcacagttcccttgaccagagttctccaccccagagcggagtgtcgacctcctataaccacccggtcctgggaatgtacgacgccaaagatgacttccctcttaggaaaacagcttctgaaccgaatctgaaattacggtccaggctaaagcagaaagtggccgaaagacggagcagccccctgttacgcaggaaagacgggccagtggtcactgctctaaaaaagcgtccgttggatgtcacagactccgcgtgcagcagcgccccaggctccggacccagctcacccaacaacagctccgggagcgtcagcgcggagaacggtatcgcgcccgccgtccccagcatcccggcggagacgagtttggcgcacagacttgtggcacgagaaggctcggccgctccacttcccctctacacatcgccatccttgcccaacatcacgctgggcctgcctgccaccggcccctctgcgggcacggcgggccagcaggacgccgagagactcacccttcccgccctccagcagaggctctcccttttccccggcacccacctcactccctacctgagcacctcgcccttggagcgggacggaggggcagcgcacagccctcttctgcagcacatggtcttactggagcagccgccggcacaagcacccctcgtcacaggcctgggagcactgcccctccacgcacagtccttggttggtgcagaccgggtgtccccctccatccacaagctgcggcagcaccgcccactggggcggacccagtcggccccgctgccccagaacgcccaggctctgcagcacctggtcatccagcagcagcatcagcagtttctggagaaacacaagcagcagttccagcagcagcaactgcagatgaacaagatcatccccaagccaagcgagccagcccggcagccggagagccacccggaggagacggaggaggagctccgtgagcaccaggctctgctggacgagccctacctggaccggctgccggggcagaaggaggcgcacgcacaggccggcgtgcaggtgaagcaggagcccattgagagcgatgaggaagaggcagagcccccacgggaggtggagccgggccagcgccagcccagtgagcaggagctgctcttcagacagcaagccctcctgctggagcagcagcggatccaccagctgaggaactaccaggcgtccatggaggccgccggcatccccgtgtccttcggcggccacaggcctctgtcccgggcgcagtcctcacccgcgtctgccaccttccccgtgtctgtgcaggagccccccaccaagccgaggttcacgacaggcctcgtgtatgacacgctgatgctgaagcaccagtgcacctgcgggagtagcagcagccaccccgagcacgccgggaggatccagagcatctggtcccgcctgcaggagacgggcctccggggcaaatgcgagtgcatccgcggacgcaaggccaccctggaggagctacagacggtgcactcggaagcccacaccctcctgtatggcacgaaccccctcaaccggcagaaactggacagtaagaaacttctaggctcgctcgcctccgtgttcgtccggctcccttgcggtggtgttggggtggacagtgacaccatatggaacgaggtgcactcggcgggggcagcccgcctggctgtgggctgcgtggtagagctggtcttcaaggtggccacaggggagctgaagaatggctttgctgtggtccgcccccctggacaccatgcggaggagagcacgcccatgggcttttgctacttcaactccgtggccgtggcagccaagcttctgcagcagaggttgagcgtgagcaagatcctcatcgtggactgggacgtgcaccatggaaacgggacccagcaggctttctacagcgaccccagcgtcctgtacatgtccctccaccgctacgacgatgggaacttcttcccaggcagcggggctcctgatgaggtgggcacagggcccggcgtgggtttcaacgtcaacatggctttcaccggcggcctggacccccccatgggagacgctgagtacttggcggccttcagaacggtggtcatgccgatcgccagcgagtttgccccggatgtggtgctggtgtcatcaggcttcgatgccgtggagggccaccccacccctcttgggggctacaacctctccgccagatgcttcgggtacctgacgaagcagctgatgggcctggctggcggccggattgtcctggccctcgagggaggccacgacctgaccgccatttgcgacgcctcggaagcatgtgtttctgccttgctgggaaacgagcttgatcctctcccagaaaaggttttacagcaaagacccaatgcaaacgctgtccgttccatggagaaagtcatggagatccacagcaagtactggcgctgcctgcagcgcacaacctccacagcggggcgttctctgatcgaggctcagacttgcgagaacgaagaagccgagacggtcaccgccatggcctcgctgtccgtgggcgtgaagcccgccgaaaagagaccagatgaggagcccatggaagaggagccgcccctgtagcactccctcgaagctgctgttctcttgtctgtctgtctctgtcttgaagctcagccaagaaactttcccgtgtcacgcctgcgtcccaccgtggggctctcttggagcacccagggacacccagcgtgcaacagccacgggaagcctttctgccgcccaggcccacaggtctcgagacgcacatgcacgcctgggcgtggcagcctcacagggaacacgggacagacgccggcgacgcgcagacacacggacacgcggaagccaagcacactctggcgggtcccgcaagggacgccgtggaagaaaggagcctgtggcaacaggcggccgagctgccgaattcagttgacacgaggcacagaaaacaaatatcaaagatctaataatacaaaacaaacttgattaaaactggtgcttaaagtttattacccacaactccacagtctctgtgtaaaccactcgactcatcttgtagcttatttttttttaaagaggacgttttctacggctgtggcccgcctctgtgaaccatagcggtgtgcggcggggggtctgcacccgggtgggggacagagggacctttaaagaaaacaaaactggacagaaacaggaatgtgagctgggggagctggcttgagtttctcaaaagccatcggaagatgcgagtttgtgcctttttttttattgctctggtggatttttgtggctgggttttctgaagtctgaggaacaatgccttaagaaaaaacaaacagcaggaatcggtgggacagtttcctgtggccagccgagcctggcagtgctggcaccgcgagctggcctgacgcctcaagcacgggcaccagccgtcatctccggggccaggggctgcagcccggcggtccctgttttgctttattgctgtttaagaaaaatggaggtagttccaaaaaagtggcaaatcccgttggaggttttgaagtccaacaaattttaaacgaatccaaagtgttctcacacgtcacatacgattgagcatctccatctggtcgtgaagcatgtggtaggcacacttgcagtgttacgatcggaatgctttttattaaaagcaagtagcatgaagtattgcttaaattttaggtataaataaatatatatatgtataatatatattccaatgtattccaagctaagaaacttacttgattcttatgaaatcttgataaaatatttataatgcatttatagaaaaagtatatatatatatataaaatgaatgcagattgcgaaggtccctgcaaatggatggcttgtgaatttgctctcaaggtgcttatggaaagggatcctgattgattgaaattcatgttttctcaagctccagattggctagatttcagatcgccaacacattcgccactgggcaactaccctacaagtttgtactttcattttaattattttctaacagaaccgctcccgtctccaagccttcatgcacatatgtacctaatgagtttttatagcaaagaatataaatttgctgttgatttttgtatgaattttttcacaaaaagatcctgaataagcattgttttatgaattttacatttttcctcaccatttagcaattttctgaatggtaataatgtctaaatctttttcctttctgaattcttgcttgtacatttttttttacctttcaaaggtttttaattatttttgtttttatttttgtacgatgagttttctgcagcgtacagaattgttgctgtcagattctattttcagaaagtgagaggagggaccgtaggtcttttcggagtgacaccaacgattgtgtctttcctggtctgtcctaggagctgtataaagaagcccaggggctctttttaactttcaacactagtagtattacgaggggtggtgtgtttttcccctccgtggcaagggcagggagggttgcttaggatgcccggccaccctgggaggcttgccagatgccgggggcagtcagcattaatgaaactcatgtttaaacttctctgaccacatcgtcaggatagaattctaacttgagttttccaaagaccttttgagcatgtcagcaatgcatggggcacacgtggggctctttacccacttgggtttttccactgcagccacgtggccagccctggattttggagcctgtggctgcaaggaacccagggacccttgttgcctggtgaacctgcagggagggtatgattgcctgaccaggacagccagtctttactctttttctcttcaacagtaactgacagtcacgttttactggtaacttattttccagcacatgaagccaccagtttcattccaaagtgtatattgggttcagacttgggggcagaagttcagacacaccgtgctcaggagggacccagagccgagtttcggagtttggtaaagtttacagggtagcttctgaaattaactcaaacttttgaccaaatgagtgcagattcttggattcacttggtcactgggctgctgatggtcagctctgagacagtggtttgagagcaggcagaacggtcttgggacttgtttgactttcccctccctggtggccactctttgctctgaagcccagattggcaagaggagctggtccattccccattcatggcacagagcagtggcagggcccagctagcaggctcttctggcctccttggcctcattctctgcatagccctctggggatcctgccacctgccctcttaccccgccgtggcttatggggaggaatgcatcatctcactttttttttttaagcagatgatgggataacatggactgctcagtggccaggttatcagtggggggacttaattctaatctcattcaaatggagacgccctctgcaaaggcctggcagggggaggcacgtttcatctgtcagctcactccagcttcacaaatgtgctgagagcattactgtgtagccttttctttgaagacacactcggctcttctccacagcaagcgtccagggcagatggcagaggatctgcctcggcgtctgcaggcgggaccacgtcagggagggttccttcatgtgttctccctgtgggtccttggacctttagcctttttcttcctttgcaaaggccttgggggcactggctgggagtcagcaagcgagcactttatatccctttgagggaaaccctgatgacgccactgggcctcttggcgtctgccctgccctcgcggcttcccgccgtgccgcagcgtgcccacgtgcccacgccccaccagcaggcggctgtcccggaggccgtggcccgctgggactggccgcccctccccagcgtcccagggctctggttctggagggccactttgtcaaggtgtttcagtttttctttacttcttttgaaaatctgtttgcaaggggaaggaccatttcgtaatggtctgacacaaaagcaagtttgatttttgcagcactagcaatggactttgttgtttttctttttgatcagaacattccttctttactggtcacagccacgtgctcattccattcttctttttgtagactttgggcccacgtgttttatgggcattgatacatatataaatatatagatataaatatatatgaatatatttttttaagtttcctacacctggaggttgcatggactgtacgaccggcatgactttatattgtatacagattttgcacgccaaactcggcagctttggggaagaagaaaaatgcctttctgttcccctctcatgacatttgcagatacaaaagatggaaatttttctgtaaaacaaaaccttgaaggagaggagggcggggaagtttgcgtcttattgaacttattcttaagaaattgtactttttattgtaagaaaaataaaaaggactacttaaacatttgtcatattaagaaaaaaagtttatctagcacttgtgacataccaataatagagtttattgtatttatgtggaaacagtgttttagggaaactactcagaattcacagtgaactgcctgtctctctcgagttgatttggaggaattttgttttgttttgttttgtttgtttccttttatctccttccacgggccaggcgagcgccgcccgccctcactggccttgtgacggtttattctgattgagaactgggcggactcgaaagagtccccttttccgcacagctgtgttgactttttaattacttttaggtgatgtatggctaagatttcactttaagcagtcgtgaactgtgcgagcactgtggtttacaattatactttgcatcgaaaggaaaccatttcttcattgtaacgaagctgagcgtgttcttagctcggcctcactttgtctctggcattgattaaaagtctgctattgaaagaaaaagaaagcg

SEQ ID NO: 4098 - protein, 1084 aa, Homo sapiens; identical to SEQ ID NO: 4096

SEQ ID NO: 4099 - DNA, 1351 bp, Homo sapiens
cggcctggccatgtgtctcgacaccccagcccccagtcttcttacgatgccatgagacgcgtttctgggctgtgctggctgcggtcctcccccgttcacactgcagtctcccgtttcccgttgcaggcttcgggtacctgacgaagcagctgatgggcctggctggcggccggattgtcctggccctcgagggaggccacgacctgaccgccatttgcgacgcctcggaagcatgtgtttctgccttgctgggaaacgagcttgatcctctcccagaaaaggttttacagcaaagacccaatgcaaacgctgtccgttccatggagaaagtcatggagatccacagcaagtactggcgctgcctgcagcgcacaacctccacagcggggcgttctctgatcgaggctcagacttgcgagaacgaagaagccgagacggtcaccgccatggcctcgctgtccgtgggcgtgaagcccgccgaaaagagaccagatgaggagcccatggaagaggagccgcccctgtagcactccctcgaagctgctgttctcttgtctgtctgtctctgtcttgaagctcagccaagaaactttcccgtgtcacgcctgcgtcccaccgtggggctctcttggagcacccagggacacccagcgtgcaacagccacgggaagcctttctgccgcccaggcccacaggtctcgagacgcacatgcacgcctgggcgtggcagcctcacagggaacacgggacagacgccggcgacgcgcagacacacggacacgcggaagccaagcacactctggcgggtcccgcaagggacgccgtggaagaaaggagcctgtggcaacaggcggccgagctgccgaattcagttgacacgaggcacagaaaacaaatatcaaagatctaataatacaaaacaaacttgattaaaactggtgcttaaagtttattacccacaactccacagtctctgtgtaaaccactcgactcatcttgtagcttatttttttttaaagaggacgttttctacggctgtggcccgcctctgtgaaccatagcggtgtgcggcggggggtctgcacccgggtgggggacagagggacctttaaagaaaacaaaactggacagaaacaggaatgtgagctgggggagctggcttgagtttctcaaaagccatcggaagatgcgagtttgtgcctttttttttattgctctggtggatttttgtggctgggttttctgaagtctgaggaacaatgccttaagaaaaaacaaacagcaggaatcggtgggacagtttcctgtggccagccgagcctggcagtgctggcaccgcgagctggcctga

SEQ ID NO: 4100 - protein, 124 aa, Homo sapiens [sequence omitted]

SEQ ID NO: 4101 - DNA, 3720 bp, Homo sapiens
gacgctggagtggggagaagcatcatggttcaacgttcatctgcagaagccagcggacgcctctgttcaacttgtgggttacctggctcatgagaccttgccggcgaggctcggcgcttgaacgtctgtgacccagccctcaccgtcccggtacttgtatgtgttggtgggagtttggagctcgttggagctatcgtttccgtggaaattttgagccatttcgaatcacttaaaggagtggacattgctagcaatgagctcccaaagccatccagatggactttctggccgagaccagccagtggagctgctgaatcctgcccgcgtgaaccacatgcccacacgaggcgcagctccacgagcacatcaagcaacaacaggagatgctggccatgaagcaccagcaggagctgctggaacaccagcggaagctggagaggcaccgccaggagcaggagctggagaagcagcaccgggagcagaagctgcagcagctcaagaacaaggagaagggcaaagagagtgccgtggccagcacagaagtgaagatgaagttacaagaatttgtcctcaataaaaagaaggcgctggcccaccggaatctgaaccactgcatttccagcgaccctcgctactggtacgggaaaacgcagcacagttcccttgaccagagttctccaccccagagcggagtgtcgacctcctataaccacccggtcctgggaatgtacgacgccaaagatgacttccctcttaggaaaacagcttctgaaccgaatctgaaattacggtccaggctaaagcagaaagtggccgaaagacggagcagccccctgttacgcaggaaagacgggccagtggtcactgctctaaaaaagcgtccgttggatgtcacagactccgcgtgcagcagcgccccaggctccggacccagctcacccaacaacagctccgggagcgtcagcgcggagaacggtatcgcgcccgccgtccccagcatcccggcggagacgagtttggcgcacagacttgtggcacgagaaggctcggccgctccacttcccctctacacatcgccatccttgcccaacatcacgctgggcctgcctgccaccggcccctctgcgggcacggcgggccagcaggacgccgagagactcacccttcccgccctccagcagaggctctcccttttccccggcacccacctcactccctacctgagcacctcgcccttggagcgggacggaggggcagcgcacagccctcttctgcagcacatggtcttactggagcagccgccggcacaagcacccctcgtcacaggcctgggagcactgcccctccacgcacagtccttggttggtgcagaccgggtgtccccctccatccacaagctgcggcagcaccgcccactggggcggacccagtcggccccgctgccccagaacgcccaggctctgcagcacctggtcatccagcagcagcatcagcagtttctggagaaacacaagcagcagttccagcagcagcaactgcagatgaacaagatcatccccaagccaagcgagccagcccggcagccggagagccacccggaggagacggaggaggagctccgtgagcaccaggctctgctggacgagccctacctggaccggctgccggggcagaaggaggcgcacgcacaggccggcgtgcaggtgaagcaggagcccattgagagcgatgaggaagaggcagagcccccacgggaggtggagccgggccagcgccagcccagtgagcaggagctgctcttcagacagcaagccctcctgctggagcagcagcggatccaccagctgaggaactaccaggcgtccatggaggccgccggcatccccgtgtccttcggcggccacaggcctctgtcccgggcgcagtcctcacccgcgtctgccaccttccccgtgtctgtgcaggagccccccaccaagccgaggttcacgacaggcctcgtgtatgacacgctgatgctgaagcaccagtgcacctgcgggagtagcagcagccaccccgagcacgccgggaggatccagagcatctggtcccgcctgcaggagacgggcctccggggcaaatgcgagtgcatccgcggacgcaaggccaccctggaggagctacagacggtgcactcggaagcccacaccctcctgtatggcacgaaccccctcaaccggcagaaactggacagtaagaaacttctaggctcgctcgcctccgtgttcgtccggctcccttgcggtggtgttggggtggacagtgacaccatatggaacgaggtgcactcggcgggggcagcccgcctggctgtgggctgcgtggtagagctggtcttcaaggtggccacaggggagctgaagaatggctttgctgtggtccgcccccctggacaccatgcggaggagagcacgcccatgggcttttgctacttcaactccgtggccgtggcagccaagcttctgcagcagaggttgagcgtgagcaagatcctcatcgtggactgggacgtgcaccatggaaacgggacccagcaggctttctacagcgaccccagcgtcctgtacatgtccctccaccgctacgacgatgggaacttcttcccaggcagcggggctcctgatgaggtgggcacagggcccggcgtgggtttcaacgtcaacatggctttcaccggcggcctggacccccccatgggagacgctgagtacttggcggccttcagaacggtggtcatgccgatcgccagcgagtttgccccggatgtggtgctggtgtcatcaggcttcgatgccgtggagggccaccccacccctcttgggggctacaacctctccgccagatgcttcgggtacctgacgaagcagctgatgggcctggctggcggccggattgtcctggccctcgagggaggccacgacctgaccgccatttgcgacgcctcggaagcatgtgtttctgccttgctgggaaacgagcttgatcctctcccagaaaaggttttacagcaaagacccaatgcaaacgctgtccgttccatggagaaagtcatggagatccacagcaagtactggcgctgcctgcagcgcacaacctccacagcggggcgttctctgatcgaggctcagacttgcgagaacgaagaagccgagacggtcaccgccatggcctcgctgtccgtgggcgtgaagcccgccgaaaagagaccagatgaggagcccatggaagaggagccgcccctgtagcactccctcgaagctgctgttctcttgtctgtctgtctctgtcttgaagctcagccaagaaactttcccgtgtcacgcctgcgtcccaccgtggggctctcttggagcacccagggacacccagcgtgcaacagccacgggaagcctttctgccgcccaggcccacaggtctcgagacgcacatgcacgcctgggcgtggcagcctcacagggaacacgggacagacgccggcgacgcgcagacacacggacacgcggaagccaagcacactctggcgggtcccgcaagggacgccgtggaagaaaggagcctgtggcaacaggcggccgagctgccgaattcagttgacacgaggcacagaaaacaaatatcaaagatctaataatacaaaacaaacttgattaaaactggtgcttaaagtttattacccac

SEQ ID NO: 4102 - protein, 967 aa, Homo sapiens
MLAMKHQQELLEHQRKLERHRQEQELEKQHREQKLQQLKNKEKGKESAVASTEVKMKLQEFVLNKKKALAHRNLNHCISSDPRYWYGKTQHSSLDQSSPPQSGVSTSYNHPVLGMYDAKDDFPLRKTASEPNLKLRSRLKQKVAERRSSPLLRRKDGPVVTALKKRPLDVTDSACSSAPGSGPSSPNNSSGSVSAENGIAPAVPSIPAETSLAHRLVAREGSAAPLPLYTSPSLPNITLGLPATGPSAGTAGQQDAERLTLPALQQRLSLFPGTHLTPYLSTSPLERDGGAAHSPLLQHMVLLEQPPAQAPLVTGLGALPLHAQSLVGADRVSPSIHKLRQHRPLGRTQSAPLPQNAQALQHLVIQQQHQQFLEKHKQQFQQQQLQMNKIIPKPSEPARQPESHPEETEEELREHQALLDEPYLDRLPGQKEAHAQAGVQVKQEPIESDEEEAEPPREVEPGQRQPSEQELLFRQQALLLEQQRIHQLRNYQASMEAAGIPVSFGGHRPLSRAQSSPASATFPVSVQEPPTKPRFTTGLVYDTLMLKHQCTCGSSSSHPEHAGRIQSIWSRLQETGLRGKCECIRGRKATLEELQTVHSEAHTLLYGTNPLNRQKLDSKKLLGSLASVFVRLPCGGVGVDSDTIWNEVHSAGAARLAVGCVVELVFKVATGELKNGFAVVRPPGHHAEESTPMGFCYFNSVAVAAKLLQQRLSVSKILIVDWDVHHGNGTQQAFYSDPSVLYMSLHRYDDGNFFPGSGAPDEVGTGPGVGFNVNMAFTGGLDPPMGDAEYLAAFRTVVMPIASEFAPDVVLVSSGFDAVEGHPTPLGGYNLSARCFGYLTKQLMGLAGGRIVLALEGGHDLTAICDASEACVSALLGNELDPLPEKVLQQRPNANAVRSMEKVMEIHSKYWRCLQRTTSTAGRSLIEAQTCENEEAETVTAMASLSVGVKPAEKRPDEEPMEEEPPL

SEQ ID NO: 4103 - DNA, 951 bp, Homo sapiens
cggcctggccatgtgtctcgacaccccagcccccagtcttcttacgatgccatgagacgcgtttctgggctgtgctggctgcggtcctcccccgttcacactgcagtctcccgtttcccgttgcaggcttcgggtacctgacgaagcagctgatgggcctggctggcggccggattgtcctggccctcgagggaggccacgacctgaccgccatttgcgacgcctcggaagcatgtgtttctgccttgctgggaaacgagcttgatcctctcccagaaaaggttttacagcaaagacccaatgcaaacgctgtccgttccatggagaaagtcatggagatccacagcaagtactggcgctgcctgcagcgcacaacctccacagcggggcgttctctgatcgaggctcagacttgcgagaacgaagaagccgagacggtcaccgccatggcctcgctgtccgtgggcgtgaagcccgccgaaaagagaccagatgaggagcccatggaagaggagccgcccctgtagcactccctcgaagctgctgttctcttgtctgtctgtctctgtcttgaagctcagccaagaaactttcccgtgtcacgcctgcgtcccaccgtggggctctcttggagcacccagggacacccagcgtgcaacagccacgggaagcctttctgccgcccaggcccacaggtctcgagacgcacatgcacgcctgggcgtggcagcctcacagggaacacgggacagacgccggcgacgcgcagacacacggacacgcggaagccaagcacactctggcgggtcccgcaagggacgccgtggaagaaaggagcctgtggcaacaggcggccgagctgccgaattcagttgacacgaggcacagaaaacaaatatcaaagatctaataatacaaaacaaacttgattaaaactggtgcttaaagttt

SEQ ID NO: 4104 - protein, 124 aa, Homo sapiens [sequence omitted]

SEQ ID NO: 4105 - DNA, 1749 bp, Homo sapiens
agtatggtgcgggtaggatgcgtgcttctgtattctgtacctagtttccacccgaagctacaggtggggctcccagtgcagtgaccgtgatactcatgggccacgtggagtctgtagggctactcgctgggctgtgctggcttctgtgagctgatgatatggacctggcctgggcatatgaatcactgggctgtgctggcttctacgagctgatgatatggacctggcctgggcgcataagttcacaaggactttccagtctgggcatctgcccatccgtccacacaggaagggtcaggtcttgcaatcaaacttctcaataacaaaagagttctcccctggcccctgacctccttgatgcagcctgggcaggggtggcaatagcgagggcggccatgagaagctgaggcggagcgtccgagcagatccgggccatcatggtcctgcagtgccgcgaatcaccacagacggttacaggcagggaggacgggagccggtggacagcaggagccgctgcagccgaaacggtgcagtgtgtgtgtaatcactgatcgcagggtgaagctcaaggtctggattctgttatggaaatgaaacaaaattgttttcttcctgagtttttataaaaatcactgctttgaaaattatcccgtcagaaagagaataaacggcatttattcataccaccaccaagccctcctagagttattttattttgtattgtaaataggctgcaatctcttaatttggggcatgtttttggccagacttgaaaaggattgaatttgcactgccctgcagccagcacgcctgtgcaaggcagaatttatcatttgcaaatgaaagctaagtgcagactcagagctgagggggtgagcccagcagcccctcccaagtgttaaatccagatctgaggcacagcagatgagagctgcaccctcacgtctgggtgtgcagatgctgatggaaaagctccccacgtggacgcgggcagagagggtagcctgttggcatgggcagggaacagtgcaggccgtggggcttcctgaggtacagccaccggcaggatgtgttttcttcccattgttttccaaaaggaagaagacagacaggaggccggtgcagacccctgccctggtgtgggatgcacctgctgtcgctggcacagatgcagctctcctgagcctcatgtctcctccagagccaggaggggccagcctcctggggtgtcaggaggagcaaagtagacctcgggagccgaagtgtgggcacacagcaggtgctcttgtcagggagggcagagcaggtgagcagagccagccaccttccccgaaagcagctgcaaactctcccggaggcagaacagtggggcttggaacacggaaaactcaccactcctcggcgctgggaaatgggagctgtaaagtgctttgacctctttttcaaaccagatcagctcctgcgttgctcctctccagtgaccgcaagtttcaactgggtgaggagctggtgtccctgctcggcctcgcccagcggagtcctggcctgctctcgtacgcccggctccccgcggctcctctgagcttcccaaaggcctcccagccctgccagccctcggcatgtcccttttagactccatgggattatccgtgggaagctttctccatgtttccccccgcctttttcctgtctttattgcgaaagagagagaaaaggagaggagagaagcgagagagagagaaagaaagg

SEQ ID NO: 4106 - protein, 54 aa, Homo sapiens
MDLAWAYESLGCAGFYELMIWTWPGRISSQGLSSLGICPSVHTGRVRSCNQTSQ

SEQ ID NO: 4107 - DNA, 995 bp, Homo sapiens
tccagatggactttctggccgagaccagccagtggagctgctgaatcctgcccgcgtgaaccacatgcccagcacggtggatgtggccacggcgctgcctctgcaagtggccccctcggcagtgcccatggacctgcgcctggaccaccagttctcactgcctgtggcagagccggccctgcgggagcagcagctgcagcaggagctcctggcgctcaagcagaagcagcagatccagaggcagatcctcatcgctgagttccagaggcagcacgagcagctctcccggcagcacgaggcgcagctccacgagcacatcaaggccaacacagatgctggctgaggatggcctcaggggctcctgctgaattccatttttcctgttgtcactgcaccctggtgagccctgcagtccttgccgttgatccacctggagcattcacagtgcatgattaggaccccaccccgaagccgccatggctgtcggtgcagagcgaggttaaagagatgggattgctgatgtctcattccgtgctggttgaatttgtagcttttacaagaagacgacgtagatgagaagctgagaagtaagcctaagccccgtgtgtttgactggggctcctcaaggtagtcctaggaggccagaagacataaagaagacacttgagttggggtcagtgctgccatctcagggtgaggccaggtctcacctccagaacccctctgcctctcctcttctggtgccccaggagctggcttcactgcttggaagagagcaccccgaccccagtcctcacgtcgctcctacaggccaggccttcaggccatgctcctcattcctggaggggtccctgggaaagcccaccccatcaccctctgagagatggccagagaccttagaaccatggctctggagccagtctctgggccagggtctcaaaagcacagaaagaagttcaaggttgcctttctctttgcattttaatcatttattt

SEQ ID NO: 4108 - protein, 95 aa, Homo sapiens
MWPRRCLCKWPPRQCPWTCAWTTSSHCLWQSRPCGSSSCSRSSWRSSRSSRSRGRSSSLSSRGSTSSSPGSTRRSSTSTSRPTQMLAEDGLRGSC

SEQ ID NO: 4109 - DNA, 2987 bp, Homo sapiens
gtgggtgccgacggcggcgccgggacgggcgtggggggtagggcgagtcatatgatccgctcggcttcctgggtctggctgctgccgcccgccggtgtccgcccgtgtcgcgccggggcaccaaggagccgttggagggtccgggcggaggcccgctcgtgtggaagtcgtcgacgccgccgctcgtccgtcctcccgtccgttctcgctcccggccgccatcatgctggcgctcatctcccgcctgctggactggttccgttcgctcttctggaaggaagagatggagctgacgctcgtggggctgcagtactcgggcaagaccaccttcgtcaatgtcatcgcgtcaggtcaattcagtgaagatatgatacccacagtgggcttcaacatgaggaaggtaactaaaggtaacgtcacaataaagatctgggacataggaggacaaccccgatttcgaagcatgtgggagcggtattgcagaggagtcaatgctattgtttacatgatagatgctgcagatcgtgaaaagatagaagcttcccgaaatgagctacataatcttctagataaaccacagttacaaggaattccagtgctagtgcttggaaacaagagagatcttcctaatgccttggatgagaaacagctaattgaaaaaatgaatctgtctgctattcaggatagagaaatttgctgctattcaatttcttgcaaagaaaaggataatatagatatcacacttcagtggcttattcagcattcaaaatctagaagaagctgaagcatctcctgaagtcttccagtccttcttggctataatcctagaattattgtccgttcctctgaagtaattcccagaatacggtccttcctaaaccccagaaattgcctttttcagagtttatttctcatgtgcactgctgaagatgaatatccctaatccttcataaagaatcagctagagttgtcatgataaagtcagcacacacaaaaaggcttcttacacatacctgtcttaaaccatgtgtagagctttaaaaacagaaaaaaaaccccatatacttatgaccatcttaaatcaagaaaattgcatatttccattctggtctttctgggccagatttttatattggttttcagtaaatgtctatctataatatttcattatagagtccagtagcttaatactgacactgacttgatacagcatgaagtttctagtgccacacacagtatttagaaaacctttaggcgtgaatgactcatgtgggatatatgtaaacataatgtttattttatctcacaaatgcatgtgaaatgtataattacatcttaggaatccaaaatggtctgcagagagtgagcggaggcaccagatcaatgttggttctttgcactggtgagattctgcctgatgaatattaaagatatcctgctttctgagaactctatcaccagatggcagttgggatatgggaggaactaaagcatcctgttttgtatctgtccagatcattatttctgtctcttgttttttcttcctggttcaggatacttttttaaggggttgagaattgaagattttccaaaagcgttcatgaatttagagcattccacccaatataataaaacctgttaagaatgtcagtctttgttcaaacatctgtttgttctatctccagtcattaaatcagtgctgctgcatgacactcttaactcctgactttttatatccagtcataaagttgactttcagcacaaaagatacttataaacaaataaaaaatttttatttttctctcttactgatgtaagctttggcactcttttgactggtgccattagacatcttgattattgtgacaactctagacctgcctgctttatctaatgtaatcatgctcaatgtctacaggttgtttaataatcagtcacacagagaactgaggaactgatgctgtttgtttgcttctatgatacagagatgtctaaaaacttcaaatggacatgttttgtagtttagcgacttccgtatacataaagggacatattaatactggttcatttgtaaattattattcatatagaccactgtagtagataaaactctatggtacacctgcttatgtgttgcctcacactgtgtgtgattttgtttcttttgttaagcagcacttatgtagactgcatttccaaatgtgttgagcactcagagtgtagtcaacagtaagttcttttaatgaatatcagttttaatttatagactgccatggccttaaaaatattctgtacaatatactgcactgtgttgcacagacactacttgcttttctccattcatatttttatgagtagaatctgggcttttaaatttctcttcttattctttgaagcatgttgcatactaccctggtgggatggatggttctgtaaatgaagggatatttaaacttgctactgttgttcaacaccattaatggtcagtgtgaaccattacaaagaatgtggcaacttgcttgtgcctaaaaggaggaattggaactagaatgtgtgactctgtggggactgcataggtttgttaattgacctatagctaaaccttaatgtgtttgtgtgtctatacattgctttccgcatttcaagacatccagacgctattaccaacattttcctgtgcattaacctctgcatgtgaaaacttttaacagttactgaactatgtaaatatgtgaatttttttatttaggtggatgcattttttgtctgtttactgctcttctcagctttattcaataaacttgcattttaagggttgtattggcaattttaacttaaaatgtgcatcatgatggaaggtgcagacttttttggaagtttccgagaggagggtctatagaccatttgtcagaaatcagatcagccctcaaagaatggggtctgtgggctagttaaaatagaaataaacttttaaaatatccacagaa

SEQ ID NO: 4110 - protein, 186 aa, Homo sapiens; identical to SEQ ID NO: 379

SEQ ID NO: 4111 - DNA, 1647 bp, Homo sapiens
gggtgccgacggcggcgccgggacgggcgtggggggtagggcgagtcatatgatccgctcggcttcctgggtctggctgctgccgcccgccggtgtccgcccgtgtcgcgccggggcaccaaggagccgttggagggtccgggcggaggcccgctcgtgtggaagtcgtcgacgccgccgctcgtccgtcctcccgtccgttctcgctcccggccgccatcatgctggcgctcatctcccgcctgctggactggttccgttcgctcttctggaaggaagagatggagctgacgctcgtggggctgcagtactcgggcaagaccaccttcgtcaatgtcatcgcgtcaggtcaattcagtgaagatatgatacccacagtgggcttcaacatgaggaaggtaactaaaggtaacgtcacaataaagatctgggacataggaggacaaccccgatttcgaagcatgtgggagcggtattgcagaggagtcaatgctattgtttacatgatagatgctgcagatcgtgaaaagatagaagcttcccgaaatgagctacataatcttctagataaaccacagttacaaggaattccagtgctagtgcttggaaacaagagagatcttcctaatgccttggatgagaaacagctaattgaaaaaatgaatctgtctgctattcaggatagagaaatttgctgctattcaatttcttgcaaagaaaaggataatatagatatcacacttcagtggcttattcagcattcaaaatctagaagaagctgaagcatctcctgaagtcttccagtccttcttggctataatcctagaattattgtccgttcctctgaagtaattcccagaatacggtccttcctaaaccccagaaattgcctttttcagagtttatttctcatgtgcactgctgaagatgaatatccctaatccttcataaagaatcagctagagttgtcatgataaagtcagcacacacaaaaaggcttcttacacatacctgtcttaaaccatgtgtagagctttaaaaacagaaaaaaaaccccatatacttatgaccatcttaaatcaagaaaattgcatatttccattctggtctttctgggccagatttttatattggttttcagtaaatgtctatctataatatttcattatagagtccagtagcttaatactgacactgacttgatacagcatgaagtttctagtgccacacacagtatttagaaaacctttaggcgtgaatgactcatgtgggatatatgtaaacataatgtttattttatctcacaaatgcatgtgaaatgtataattacatcttaggaatccaaaatggtctgcagagagtgagcggaggcaccagatcaatgttggttctttgcactggtgagattctgcctgatgaatattaaagatatcctgctttctgagaactctatcaccagatggcagttgggatatgggaggaactaaagcatcctgttttgtatctgtccagatcattatttctgtctcttgttttttcttcctggttcaggatacttttttaaggggttgagaattgaagattttccaaaagcgttcatgaatttagagcattccacccaatataataaaacctgttaagaatgtc

SEQ ID NO: 4112 - protein, 186 aa, Homo sapiens; identical to SEQ ID NO: 379

SEQ ID NO: 4113 - DNA, 2817 bp, Homo sapiens
gggtgccgacggcggcgccgggacgggcgtggggggtagggcgagtcatatgatccgctcggcttcctgggtctggctgctgccgcccgccggtgtccgcccgtgtcgcgccggggcaccaaggagccgttggagggtccgggcggaggcccgctcgtgtggaagtcgtcgacgccgccgctcgtccgtcctcccgtccgttctcgctcccggccgccatcatgctggcgctcatctcccgcctgctggactggttccgttcgctcttctggaaggaagagatggagctgacgctcgtggggctgcagtactcgggcaagaccaccttcgtcaatgtcatcgcgtcaggtcaattcagtgaagatatgatacccacagtgggcttcaacatgaggaaggtaactaaaggtaacgtcacaataaagatctgggacataggaggacaaccccgatttcgaagcatgtgggagcggtattgcagaggagtcaatgctattgtttacatgatagatgctgcagatcgtgaaaagatagaagcttcccgaaatgagctacataatcttctagataaaccacagttacaaggaattccagtgctagtgcttggaaacaagagagatcttcctaatgccttggatgagaaacagctaattgaaaaaatgaatctgtctgctattcaggatagagaaatttgctgctattcaatttcttgcaaagaaaaggataatatagatatcacacttcagtggcttattcagcattcaaaatctagaagaagctgaagcatctcctgaagtcttccagtccttcttggctataatcctagaattattgtccgttcctctgaagtaattcccagaatacggtccttcctaaaccccagaaattgcctttttcagagtttatttctcatgtgcactgctgaagatgaatatccctaatccttcataaagaatcagctagagttgtcatgataaagtcagcacacacaaaaaggcttcttacacatacctgtcttaaaccatgtgtagagctttaaaaacagaaaaaaaaccccatatacttatgaccatcttaaatcaagaaaattgcatatttccattctggtctttctgggccagatttttatattggttttcagtaaatgtctatctataatatttcattatagagtccagtagcttaatactgacactgacttgatacagcatgaagtttctagtgccacacacagtatttagaaaacctttaggcgtgaatgactcatgtgggatatatgtaaacataatgtttattttatctcacaaatgcatgtgaaatgtataattacatcttaggaatccaaaatggtctgcagagagtgagcggaggcaccagatcaatgttggttctttgcactggtgagattctgcctgatgaatattaaagatatcctgctttctgagaactctatcaccagatggcagttgggatatgggaggaactaaagcatcctgttttgtatctgtccagatcattatttctgtctcttgttttttcttcctggttcaggatacttttttaaggggttgagaattgaagattttccaaaagcgttcatgaatttagagcattccacccaatataataaaacctgttaagaatgtcagtctttgttcaaacatctgtttgttctatctccagtcattaaatcagtgctgctgcatgacactcttaactcctgactttttatatccagtcataaagttgactttcagcacaaaagatacttataaacaaataaaaaatttttatttttctctcttactgatgtaagctttggcactcttttgactggtgccattagacatcttgattattgtgacaactctagacctgcctgctttatctaatgtaatcatgctcaatgtctacaggttgtttaataatcagtcacacagagaactgaggaactgatgctgtttgtttgcttctatgatacagagatgtctaaaaacttcaaatggacatgttttgtagtttagcgacttccgtatacataaagggacatattaatactggttcatttgtaaattattattcatatagaccactgtagtagataaaactctatggtacacctgcttatgtgttgcctcacactgtgtgtgattttgtttcttttgttaagcagcacttatgtagactgcatttccaaatgtgttgagcactcagagtgtagtcaacagtaagttcttttaatgaatatcagttttaatttatagactgccatggccttaaaaatattctgtacaatatactgcactgtgttgcacagacactacttgcttttctccattcatatttttatgagtagaatctgggcttttaaatttctcttcttattctttgaagcatgttgcatactaccctggtgggatggatggttctgtaaatgaagggatatttaaacttgctactgttgttcaacaccattaatggtcagtgtgaaccattacaaagaatgtggcaacttgcttgtgcctaaaaggaggaattggaactagaatgtgtgactctgtggggactgcataggtttgttaattgacctatagctaaaccttaatgtgtttgtgtgtctatacattgctttccgcatttcaagacatccagacgctattaccaacattttcctgtgcattaacctctgcatgtgaaaacttttaacagttactgaactatgtaaatatgtgaatttttttatttaggtggatgcattttttgtctgtttactgctcttctcagctttattcaataaacttgcattttaagggttgt

SEQ ID NO: 4114 - protein, 186 aa, Homo sapiens; identical to SEQ ID NO: 379

SEQ ID NO: 4115 - DNA, 698 bp, Homo sapiens
atatgatccgctcggcttcctgggtctggctgctgccgcccgccggtgtccgcccgtgtcgcgccggggcaccaaggagccgttggagggtccgggcggaggcccgctcgtgtggaagtcgtcgacgccgccgctcgtccgtcctcccgtccgttctcgctcccggccgccatcatgctggcgctcatctcccgcctgctggactggttccgttcgctcttctggaaggaagagatggagctgacgctcgtggggctgcagtactcgggcaagaccaccttcgtcaatgtcatcgcgtcaggtcaattcagtgaagatatgatacccacagtgggcttcaacatgaggaaggtaactaaaggtaacgtcacaataaaggtaagttatttcttgccgtacgcaatttaaattgttagcacagacccctagaaatttttctgttaaatttctgtgtttttactgaaaatttgcagtttttcagtaatgaatgtgcatgtttcaaaagaataggtttttttgttgttgtttttttgttttttttttggaaacagagttttgctctttcacccaggctggagtgcagtgtcgcgatctccactcactgcaacctctacctcccggttcaagtgattctcctgcctcagcctccaaaatagctaagatgacaggcttgtgccaccacacccagctaatttttt

SEQ ID NO: 4116 - protein, 103 aa, Homo sapiens
MIRSASWVWLLPPAGVRPCRAGAPRSRWRVRAEARSCGSRRRRRSSVLPSVLAPGRHHAGAHLPPAGLVPFALLEGRDGADARGAAVLGQDHLRQCHRVRSIQ

SEQ ID NO: 4117 - DNA, 1448 bp, Homo sapiens
ggcttcctgggtctggctgctgccgcccgccggtgtccgcccgtgtcgcgccggggcaccaaggagccgttggagggtccgggcggaggcccgctcgtgtggaagtcgtcgacgccgccgctcgtccgtcctcccgtccgttctcgctcccggccgccatcatgctggcgctcatctcccgcctgctggactggttccgttcgctcttctggaaggaagagatggagctgacgctcgtggggctgcagtactcgggcaagaccaccttcgtcaatgtcatcgcgtcaggtcaattcagtgaagatatgatacccacagtgggcttcaacatgaggaaggtaactaaaggtaacgtcacaataaagatctgggacataggaggacaaccccgatttcgaagcatgtgggagcggtattgcagaggagtcaatgctattgtttacatgatagatgctgcagatcgtgaaaagatagaagcttcccgaaatgagctacataatcttctagataaaccacagttacaaggaattccaatatcacacttcagtggcttattcagcattcaaaatctagaagaagctgaagcatctcctgaagtcttccagtccttcttggctataatcctagaattattgtccgttcctctgaagtaattcccagaatacggtccttcctaaaccccagaaattgcctttttcagagtttatttctcatgtgcactgctgaagatgaatatccctaatccttcataaagaatcagctagagttgtcatgataaagtcagcacacacaaaaaggcttcttacacatacctgtcttaaaccatgtgtagagctttaaaaacagaaaaaaaaccccatatacttatgaccatcttaaatcaagaaaattgcatatttccattctggtctttctgggccagatttttatattggttttcagtaaatgtctatctataatatttcattatagagtccagtagcttaatactgacactgacttgatacagcatgaagtttctagtgccacacacagtatttagaaaacctttaggcgtgaatgactcatgtgggatatatgtaaacataatgtttattttatctcacaaatgcatgtgaaatgtataattacatcttaggaatccaaaatggtctgcagagagtgagcggaggcaccagatcaatgttggttctttgcactggtgagattctgcctgatgaatattaaagatatcctgctttctgagaactctatcaccagatggcagttgggatatgggaggaactaaagcatcctgttttgtatctgtccagatcattatttctgtctcttgttttttcttcctggttcaggatacttttttaaggggttgagaattgaagattttccaaaagcgttcatgaatttagagcattccacccaatataataaaacctgttaagaatgtc

SEQ ID NO: 4118 - protein, 163 aa, Homo sapiens
MLALISRLLDWFRSLFWKEEMELTLVGLQYSGKTTFVNVIASGQFSEDMIPTVGFNMRKVTKGNVTIKIWDIGGQPRFRSMWERYCRGVNAIVYMIDAADREKIEASRNELHNLLDKPQLQGIPISHFSGLFSIQNLEEAEASPEVFQSFLAIILELLSVPLK

SEQ ID NO: 4119 - DNA, 2618 bp, Homo sapiens
ggcttcctgggtctggctgctgccgcccgccggtgtccgcccgtgtcgcgccggggcaccaaggagccgttggagggtccgggcggaggcccgctcgtgtggaagtcgtcgacgccgccgctcgtccgtcctcccgtccgttctcgctcccggccgccatcatgctggcgctcatctcccgcctgctggactggttccgttcgctcttctggaaggaagagatggagctgacgctcgtggggctgcagtactcgggcaagaccaccttcgtcaatgtcatcgcgtcaggtcaattcagtgaagatatgatacccacagtgggcttcaacatgaggaaggtaactaaaggtaacgtcacaataaagatctgggacataggaggacaaccccgatttcgaagcatgtgggagcggtattgcagaggagtcaatgctattgtttacatgatagatgctgcagatcgtgaaaagatagaagcttcccgaaatgagctacataatcttctagataaaccacagttacaaggaattccaatatcacacttcagtggcttattcagcattcaaaatctagaagaagctgaagcatctcctgaagtcttccagtccttcttggctataatcctagaattattgtccgttcctctgaagtaattcccagaatacggtccttcctaaaccccagaaattgcctttttcagagtttatttctcatgtgcactgctgaagatgaatatccctaatccttcataaagaatcagctagagttgtcatgataaagtcagcacacacaaaaaggcttcttacacatacctgtcttaaaccatgtgtagagctttaaaaacagaaaaaaaaccccatatacttatgaccatcttaaatcaagaaaattgcatatttccattctggtctttctgggccagatttttatattggttttcagtaaatgtctatctataatatttcattatagagtccagtagcttaatactgacactgacttgatacagcatgaagtttctagtgccacacacagtatttagaaaacctttaggcgtgaatgactcatgtgggatatatgtaaacataatgtttattttatctcacaaatgcatgtgaaatgtataattacatcttaggaatccaaaatggtctgcagagagtgagcggaggcaccagatcaatgttggttctttgcactggtgagattctgcctgatgaatattaaagatatcctgctttctgagaactctatcaccagatggcagttgggatatgggaggaactaaagcatcctgttttgtatctgtccagatcattatttctgtctcttgttttttcttcctggttcaggatacttttttaaggggttgagaattgaagattttccaaaagcgttcatgaatttagagcattccacccaatataataaaacctgttaagaatgtcagtctttgttcaaacatctgtttgttctatctccagtcattaaatcagtgctgctgcatgacactcttaactcctgactttttatatccagtcataaagttgactttcagcacaaaagatacttataaacaaataaaaaatttttatttttctctcttactgatgtaagctttggcactcttttgactggtgccattagacatcttgattattgtgacaactctagacctgcctgctttatctaatgtaatcatgctcaatgtctacaggttgtttaataatcagtcacacagagaactgaggaactgatgctgtttgtttgcttctatgatacagagatgtctaaaaacttcaaatggacatgttttgtagtttagcgacttccgtatacataaagggacatattaatactggttcatttgtaaattattattcatatagaccactgtagtagataaaactctatggtacacctgcttatgtgttgcctcacactgtgtgtgattttgtttcttttgttaagcagcacttatgtagactgcatttccaaatgtgttgagcactcagagtgtagtcaacagtaagttcttttaatgaatatcagttttaatttatagactgccatggccttaaaaatattctgtacaatatactgcactgtgttgcacagacactacttgcttttctccattcatatttttatgagtagaatctgggcttttaaatttctcttcttattctttgaagcatgttgcatactaccctggtgggatggatggttctgtaaatgaagggatatttaaacttgctactgttgttcaacaccattaatggtcagtgtgaaccattacaaagaatgtggcaacttgcttgtgcctaaaaggaggaattggaactagaatgtgtgactctgtggggactgcataggtttgttaattgacctatagctaaaccttaatgtgtttgtgtgtctatacattgctttccgcatttcaagacatccagacgctattaccaacattttcctgtgcattaacctctgcatgtgaaaacttttaacagttactgaactatgtaaatatgtgaatttttttatttaggtggatgcattttttgtctgtttactgctcttctcagctttattcaataaacttgcattttaagggttgt

SEQ ID NO: 4120 - protein, 163 aa, Homo sapiens; identical to SEQ ID NO: 4118

SEQ ID NO: 4121 - DNA, 2786 bp, Homo sapiens
ggcttcctgggtctggctgctgccgcccgccggtgtccgcccgtgtcgcgccggggcaccaaggagccgttggagggtccgggcggaggcccgctcgtgtggaagtcgtcgacgccgccgctcgtccgtcctcccgtccgttctcgctcccggccgccatcatgctggcgctcatctcccgcctgctggactggttccgttcgctcttctggaaggaagagatggagctgacgctcgtggggctgcagtactcgggcaagaccaccttcgtcaatgtcatcgcgtcaggtcaattcagtgaagatatgatacccacagtgggcttcaacatgaggaaggtaactaaaggtaacgtcacaataaagatctgggacataggaggacaaccccgatttcgaagcatgtgggagcggtattgcagaggagtcaatgctattgtttacatgatagatgctgcagatcgtgaaaagatagaagcttcccgaaatgagctacataatcttctagataaaccacagttacaaggaattccaatatcacacttcagtggcttattcagcattcaaaatctagaagaagctgaagcatctcctgaagtcttccagtccttcttggctataatcctagaattattgtccgttcctctgaagtaattcccagaatacggtccttcctaaaccccagaaattgcctttttcagagtttatttctcatgtgcactgctgaagatgaatatccctaatccttcataaagaatcagctagagttgtcatgataaagtcagcacacacaaaaaggcttcttacacatacctgtcttaaaccatgtgtagagctttaaaaacagaaaaaaaaccccatatacttatgaccatcttaaatcaagaaaattgcatatttccattctggtctttctgggccagatttttatattggttttcagtaaatgtctatctataatatttcattatagagtccagtagcttaatactgacactgacttgatacagcatgaagtttctagtgccacacacagtatttagaaaacctttaggcgtgaatgactcatgtgggatatatgtaaacataatgtttattttatctcacaaatgcatgtgaaatgtataattacatcttaggaatccaaaatggtctgcagagagtgagcggaggcaccagatcaatgttggttctttgcactggtgagattctgcctgatgaatattaaagatatcctgctttctgagaactctatcaccagatggcagttgggatatgggaggaactaaagcatcctgttttgtatctgtccagatcattatttctgtctcttgttttttcttcctggttcaggatacttttttaaggggttgagaattgaagattttccaaaagcgttcatgaatttagagcattccacccaatataataaaacctgttaagaatgtcagtctttgttcaaacatctgtttgttctatctccagtcattaaatcagtgctgctgcatgacactcttaactcctgactttttatatccagtcataaagttgactttcagcacaaaagatacttataaacaaataaaaaatttttatttttctctcttactgatgtaagctttggcactcttttgactggtgccattagacatcttgattattgtgacaactctagacctgcctgctttatctaatgtaatcatgctcaatgtctacaggttgtttaataatcagtcacacagagaactgaggaactgatgctgtttgtttgcttctatgatacagagatgtctaaaaacttcaaatggacatgttttgtagtttagcgacttccgtatacataaagggacatattaatactggttcatttgtaaattattattcatatagaccactgtagtagataaaactctatggtacacctgcttatgtgttgcctcacactgtgtgtgattttgtttcttttgttaagcagcacttatgtagactgcatttccaaatgtgttgagcactcagagtgtagtcaacagtaagttcttttaatgaatatcagttttaatttatagactgccatggccttaaaaatattctgtacaatatactgcactgtgttgcacagacactacttgcttttctccattcatatttttatgagtagaatctgggcttttaaatttctcttcttattctttgaagcatgttgcatactaccctggtgggatggatggttctgtaaatgaagggatatttaaacttgctactgttgttcaacaccattaatggtcagtgtgaaccattacaaagaatgtggcaacttgcttgtgcctaaaaggaggaattggaactagaatgtgtgactctgtggggactgcataggtttgttaattgacctatagctaaaccttaatgtgtttgtgtgtctatacattgctttccgcatttcaagacatccagacgctattaccaacattttcctgtgcattaacctctgcatgtgaaaacttttaacagttactgaactatgtaaatatgtgaatttttttatttaggtggatgcattttttgtctgtttactgctcttctcagctttattcaataaacttgcattttaagggttgtattggcaattttaacttaaaatgtgcatcatgatggaaggtgcagacttttttggaagtttccgagaggagggtctatagaccatttgtcagaaatcagatcagccctcaaagaatggggtctgtgggctagttaaaatagaaataaacttttaaaatatccacagaa

SEQ ID NO: 4122 - protein, 163 aa, Homo sapiens; identical to SEQ ID NO: 4118

SEQ ID NO: 4123 - DNA, 1374 bp, Homo sapiens
tgccgcccgccggtgtccgcccgtgtcgcgccggggcaccaaggagccgttggagggtccgggcggaggcccgctcgtgtggaagtcgtcgacgccgccgctcgtccgtcctcccgtccgttctcgctcccggccgccatcatgctggcgctcatctcccgcctgctggactggttccgttcgctcttctggaaggaagagatggagctgacgctcgtggggctgcagtactcgggcaagaccaccttcgtcaatgtcatcgcgtcaggtcaattcagtgaagatatgatacccacagtgggcttcaacatgaggaaggtaactaaaggtaacgtcacaataaagatcttcctaatgccttggatgagaaacagctaattgaaaaaatgaatctgtctgctattcaggatagagaaatttgctgctattcaatttcttgcaaagaaaaggataatatagatatcacacttcagtggcttattcagcattcaaaatctagaagaagctgaagcatctcctgaagtcttccagtccttcttggctataatcctagaattattgtccgttcctctgaagtaattcccagaatacggtccttcctaaaccccagaaattgcctttttcagagtttatttctcatgtgcactgctgaagatgaatatccctaatccttcataaagaatcagctagagttgtcatgataaagtcagcacacacaaaaaggcttcttacacatacctgtcttaaaccatgtgtagagctttaaaaacagaaaaaaaaccccatatacttatgaccatcttaaatcaagaaaattgcatatttccattctggtctttctgggccagatttttatattggttttcagtaaatgtctatctataatatttcattatagagtccagtagcttaatactgacactgacttgatacagcatgaagtttctagtgccacacacagtatttagaaaacctttaggcgtgaatgactcatgtgggatatatgtaaacataatgtttattttatctcacaaatgcatgtgaaatgtataattacatcttaggaatccaaaatggtctgcagagagtgagcggaggcaccagatcaatgttggttctttgcactggtgagattctgcctgatgaatattaaagatatcctgctttctgagaactctatcaccagatggcagttgggatatgggaggaactaaagcatcctgttttgtatctgtccagatcattatttctgtctcttgttttttcttcctggttcaggatacttttttaaggggttgagaattgaagattttccaaaagcgttcatgaatttagagcattccacccaatataataaaacctgttaagaatgtc

SEQ ID NO: 4124 - protein, 78 aa, Homo sapiens
MLALISRLLDWFRSLFWKEEMELTLVGLQYSGKTTFVNVIASGQFSEDMIPTVGFNMRKVTKGNVTIKIFLMPWMRNS

SEQ ID NO: 4125 - DNA, 2544 bp, Homo sapiens
tgccgcccgccggtgtccgcccgtgtcgcgccggggcaccaaggagccgttggagggtccgggcggaggcccgctcgtgtggaagtcgtcgacgccgccgctcgtccgtcctcccgtccgttctcgctcccggccgccatcatgctggcgctcatctcccgcctgctggactggttccgttcgctcttctggaaggaagagatggagctgacgctcgtggggctgcagtactcgggcaagaccaccttcgtcaatgtcatcgcgtcaggtcaattcagtgaagatatgatacccacagtgggcttcaacatgaggaaggtaactaaaggtaacgtcacaataaagatcttcctaatgccttggatgagaaacagctaattgaaaaaatgaatctgtctgctattcaggatagagaaatttgctgctattcaatttcttgcaaagaaaaggataatatagatatcacacttcagtggcttattcagcattcaaaatctagaagaagctgaagcatctcctgaagtcttccagtccttcttggctataatcctagaattattgtccgttcctctgaagtaattcccagaatacggtccttcctaaaccccagaaattgcctttttcagagtttatttctcatgtgcactgctgaagatgaatatccctaatccttcataaagaatcagctagagttgtcatgataaagtcagcacacacaaaaaggcttcttacacatacctgtcttaaaccatgtgtagagctttaaaaacagaaaaaaaaccccatatacttatgaccatcttaaatcaagaaaattgcatatttccattctggtctttctgggccagatttttatattggttttcagtaaatgtctatctataatatttcattatagagtccagtagcttaatactgacactgacttgatacagcatgaagtttctagtgccacacacagtatttagaaaacctttaggcgtgaatgactcatgtgggatatatgtaaacataatgtttattttatctcacaaatgcatgtgaaatgtataattacatcttaggaatccaaaatggtctgcagagagtgagcggaggcaccagatcaatgttggttctttgcactggtgagattctgcctgatgaatattaaagatatcctgctttctgagaactctatcaccagatggcagttgggatatgggaggaactaaagcatcctgttttgtatctgtccagatcattatttctgtctcttgttttttcttcctggttcaggatacttttttaaggggttgagaattgaagattttccaaaagcgttcatgaatttagagcattccacccaatataataaaacctgttaagaatgtcagtctttgttcaaacatctgtttgttctatctccagtcattaaatcagtgctgctgcatgacactcttaactcctgactttttatatccagtcataaagttgactttcagcacaaaagatacttataaacaaataaaaaatttttatttttctctcttactgatgtaagctttggcactcttttgactggtgccattagacatcttgattattgtgacaactctagacctgcctgctttatctaatgtaatcatgctcaatgtctacaggttgtttaataatcagtcacacagagaactgaggaactgatgctgtttgtttgcttctatgatacagagatgtctaaaaacttcaaatggacatgttttgtagtttagcgacttccgtatacataaagggacatattaatactggttcatttgtaaattattattcatatagaccactgtagtagataaaactctatggtacacctgcttatgtgttgcctcacactgtgtgtgattttgtttcttttgttaagcagcacttatgtagactgcatttccaaatgtgttgagcactcagagtgtagtcaacagtaagttcttttaatgaatatcagttttaatttatagactgccatggccttaaaaatattctgtacaatatactgcactgtgttgcacagacactacttgcttttctccattcatatttttatgagtagaatctgggcttttaaatttctcttcttattctttgaagcatgttgcatactaccctggtgggatggatggttctgtaaatgaagggatatttaaacttgctactgttgttcaacaccattaatggtcagtgtgaaccattacaaagaatgtggcaacttgcttgtgcctaaaaggaggaattggaactagaatgtgtgactctgtggggactgcataggtttgttaattgacctatagctaaaccttaatgtgtttgtgtgtctatacattgctttccgcatttcaagacatccagacgctattaccaacattttcctgtgcattaacctctgcatgtgaaaacttttaacagttactgaactatgtaaatatgtgaatttttttatttaggtggatgcattttttgtctgtttactgctcttctcagctttattcaataaacttgcattttaagggttgt

SEQ ID NO: 4126 - protein, 78 aa, Homo sapiens; identical to SEQ ID NO: 4124

SEQ ID NO: 4127 - DNA, 2712 bp, Homo sapiens
tgccgcccgccggtgtccgcccgtgtcgcgccggggcaccaaggagccgttggagggtccgggcggaggcccgctcgtgtggaagtcgtcgacgccgccgctcgtccgtcctcccgtccgttctcgctcccggccgccatcatgctggcgctcatctcccgcctgctggactggttccgttcgctcttctggaaggaagagatggagctgacgctcgtggggctgcagtactcgggcaagaccaccttcgtcaatgtcatcgcgtcaggtcaattcagtgaagatatgatacccacagtgggcttcaacatgaggaaggtaactaaaggtaacgtcacaataaagatcttcctaatgccttggatgagaaacagctaattgaaaaaatgaatctgtctgctattcaggatagagaaatttgctgctattcaatttcttgcaaagaaaaggataatatagatatcacacttcagtggcttattcagcattcaaaatctagaagaagctgaagcatctcctgaagtcttccagtccttcttggctataatcctagaattattgtccgttcctctgaagtaattcccagaatacggtccttcctaaaccccagaaattgcctttttcagagtttatttctcatgtgcactgctgaagatgaatatccctaatccttcataaagaatcagctagagttgtcatgataaagtcagcacacacaaaaaggcttcttacacatacctgtcttaaaccatgtgtagagctttaaaaacagaaaaaaaaccccatatacttatgaccatcttaaatcaagaaaattgcatatttccattctggtctttctgggccagatttttatattggttttcagtaaatgtctatctataatatttcattatagagtccagtagcttaatactgacactgacttgatacagcatgaagtttctagtgccacacacagtatttagaaaacctttaggcgtgaatgactcatgtgggatatatgtaaacataatgtttattttatctcacaaatgcatgtgaaatgtataattacatcttaggaatccaaaatggtctgcagagagtgagcggaggcaccagatcaatgttggttctttgcactggtgagattctgcctgatgaatattaaagatatcctgctttctgagaactctatcaccagatggcagttgggatatgggaggaactaaagcatcctgttttgtatctgtccagatcattatttctgtctcttgttttttcttcctggttcaggatacttttttaaggggttgagaattgaagattttccaaaagcgttcatgaatttagagcattccacccaatataataaaacctgttaagaatgtcagtctttgttcaaacatctgtttgttctatctccagtcattaaatcagtgctgctgcatgacactcttaactcctgactttttatatccagtcataaagttgactttcagcacaaaagatacttataaacaaataaaaaatttttatttttctctcttactgatgtaagctttggcactcttttgactggtgccattagacatcttgattattgtgacaactctagacctgcctgctttatctaatgtaatcatgctcaatgtctacaggttgtttaataatcagtcacacagagaactgaggaactgatgctgtttgtttgcttctatgatacagagatgtctaaaaacttcaaatggacatgttttgtagtttagcgacttccgtatacataaagggacatattaatactggttcatttgtaaattattattcatatagaccactgtagtagataaaactctatggtacacctgcttatgtgttgcctcacactgtgtgtgattttgtttcttttgttaagcagcacttatgtagactgcatttccaaatgtgttgagcactcagagtgtagtcaacagtaagttcttttaatgaatatcagttttaatttatagactgccatggccttaaaaatattctgtacaatatactgcactgtgttgcacagacactacttgcttttctccattcatatttttatgagtagaatctgggcttttaaatttctcttcttattctttgaagcatgttgcatactaccctggtgggatggatggttctgtaaatgaagggatatttaaacttgctactgttgttcaacaccattaatggtcagtgtgaaccattacaaagaatgtggcaacttgcttgtgcctaaaaggaggaattggaactagaatgtgtgactctgtggggactgcataggtttgttaattgacctatagctaaaccttaatgtgtttgtgtgtctatacattgctttccgcatttcaagacatccagacgctattaccaacattttcctgtgcattaacctctgcatgtgaaaacttttaacagttactgaactatgtaaatatgtgaatttttttatttaggtggatgcattttttgtctgtttactgctcttctcagctttattcaataaacttgcattttaagggttgtattggcaattttaacttaaaatgtgcatcatgatggaaggtgcagacttttttggaagtttccgagaggagggtctatagaccatttgtcagaaatcagatcagccctcaaagaatggggtctgtgggctagttaaaatagaaataaacttttaaaatatccacagaa

SEQ ID NO: 4128 - protein, 78 aa, Homo sapiens; identical to SEQ ID NO: 4124

SEQ ID NO: 4129 - DNA, 682 bp, Homo sapiens
ggccttgggtggatcgggtctctgggcagagcgtgtgtccggcagagctaggaccggaaaaagccactctaggtctaggttaggagtgatgacagttaaaagatatataaggaaaagaaggaaaggatcgtttctgtataaaacgagctatttttgcatatcgagcgcataagttttataacttaggtgtctgtttatggagagggtgggatactaccttttagctcaaggagtgcacaaaacggtatcatgaattctgctcttttgattcaaacacccaactttgaagaatcgctcatggtgcttgtaaaacacgtatccccagatccctccctagacctatcgaacaactccaacggtctcgggaatgtgcgtggtttctgaaaagcttgggaagcaagacctgactagacccccaaatctgatattggctgaatggccgaccaatggagtgcataagaagtctggatacaaaggcagcccaatttctagaaatgtataccagccatgaagagataaagctccaagaggagatttctctttctggtataaggatttaaacaaaacctagaatgtcgcagtactcgaagtatccaaaacaactgaaaaatgaagaagaataaaagaagaatccaaaagtatccaaaataactgaacatatgaagaatcatggctgggcaca

SEQ ID NO: 4130 - protein, 47 aa, Homo sapiens
MCVVSEKLGKQDLTRPPNLILAEWPTNGVHKKSGYKGSPISRNVYQP

SEQ ID NO: 4131 - DNA, 1077 bp, Homo sapiens
atagtaataaaactaatgagtaaaattgaacaaagtgataagtatgacagctgttctaagcacagacttatccttttaattcttctcataggaatctgtctgctattcaggatagagaaatttgctgctattcaatttcttgcaaagaaaaggataatatagatatcacacttcagtggcttattcagcattcaaaatctagaagaagctgaagcatctcctgaagtcttccagtccttcttggctataatcctagaattattgtccgttcctctgaagtaattcccagaatacggtccttcctaaaccccagaaattgcctttttcagagtttatttctcatgtgcactgctgaagatgaatatccctaatccttcataaagaatcagctagagttgtcatgataaagtcagcacacacaaaaaggcttcttacacatacctgtcttaaaccatgtgtagagctttaaaaacagaaaaaaaaccccatatacttatgaccatcttaaatcaagaaaattgcatatttccattctggtctttctgggccagatttttatattggttttcagtaaatgtctatctataatatttcattatagagtccagtagcttaatactgacactgacttgatacagcatgaagtttctagtgccacacacagtatttagaaaacctttaggcgtgaatgactcatgtgggatatatgtaaacataatgtttattttatctcacaaatgcatgtgaaatgtataattacatcttaggaatccaaaatggtctgcagagagtgagcggaggcaccagatcaatgttggttctttgcactggtgagattctgcctgatgaatattaaagatatcctgctttctgagaactctatcaccagatggcagttgggatatgggaggaactaaagcatcctgttttgtatctgtccagatcattatttctgtctcttgttttttcttcctggttcaggatacttttttaaggggttgagaattgaagattttccaaaagcgttcatgaatttagagcattccacccaatataataaaacctgttaagaatgtc

SEQ ID NO: 4132 - protein, 48 aa, Homo sapiens [sequence omitted]

SEQ ID NO: 4133 - DNA, 2247 bp, Homo sapiens
atagtaataaaactaatgagtaaaattgaacaaagtgataagtatgacagctgttctaagcacagacttatccttttaattcttctcataggaatctgtctgctattcaggatagagaaatttgctgctattcaatttcttgcaaagaaaaggataatatagatatcacacttcagtggcttattcagcattcaaaatctagaagaagctgaagcatctcctgaagtcttccagtccttcttggctataatcctagaattattgtccgttcctctgaagtaattcccagaatacggtccttcctaaaccccagaaattgcctttttcagagtttatttctcatgtgcactgctgaagatgaatatccctaatccttcataaagaatcagctagagttgtcatgataaagtcagcacacacaaaaaggcttcttacacatacctgtcttaaaccatgtgtagagctttaaaaacagaaaaaaaaccccatatacttatgaccatcttaaatcaagaaaattgcatatttccattctggtctttctgggccagatttttatattggttttcagtaaatgtctatctataatatttcattatagagtccagtagcttaatactgacactgacttgatacagcatgaagtttctagtgccacacacagtatttagaaaacctttaggcgtgaatgactcatgtgggatatatgtaaacataatgtttattttatctcacaaatgcatgtgaaatgtataattacatcttaggaatccaaaatggtctgcagagagtgagcggaggcaccagatcaatgttggttctttgcactggtgagattctgcctgatgaatattaaagatatcctgctttctgagaactctatcaccagatggcagttgggatatgggaggaactaaagcatcctgttttgtatctgtccagatcattatttctgtctcttgttttttcttcctggttcaggatacttttttaaggggttgagaattgaagattttccaaaagcgttcatgaatttagagcattccacccaatataataaaacctgttaagaatgtcagtctttgttcaaacatctgtttgttctatctccagtcattaaatcagtgctgctgcatgacactcttaactcctgactttttatatccagtcataaagttgactttcagcacaaaagatacttataaacaaataaaaaatttttatttttctctcttactgatgtaagctttggcactcttttgactggtgccattagacatcttgattattgtgacaactctagacctgcctgctttatctaatgtaatcatgctcaatgtctacaggttgtttaataatcagtcacacagagaactgaggaactgatgctgtttgtttgcttctatgatacagagatgtctaaaaacttcaaatggacatgttttgtagtttagcgacttccgtatacataaagggacatattaatactggttcatttgtaaattattattcatatagaccactgtagtagataaaactctatggtacacctgcttatgtgttgcctcacactgtgtgtgattttgtttcttttgttaagcagcacttatgtagactgcatttccaaatgtgttgagcactcagagtgtagtcaacagtaagttcttttaatgaatatcagttttaatttatagactgccatggccttaaaaatattctgtacaatatactgcactgtgttgcacagacactacttgcttttctccattcatatttttatgagtagaatctgggcttttaaatttctcttcttattctttgaagcatgttgcatactaccctggtgggatggatggttctgtaaatgaagggatatttaaacttgctactgttgttcaacaccattaatggtcagtgtgaaccattacaaagaatgtggcaacttgcttgtgcctaaaaggaggaattggaactagaatgtgtgactctgtggggactgcataggtttgttaattgacctatagctaaaccttaatgtgtttgtgtgtctatacattgctttccgcatttcaagacatccagacgctattaccaacattttcctgtgcattaacctctgcatgtgaaaacttttaacagttactgaactatgtaaatatgtgaatttttttatttaggtggatgcattttttgtctgtttactgctcttctcagctttattcaataaacttgcattttaagggttgt

SEQ ID NO: 4134 - protein, 55 aa, Homo sapiens
MALKIFCTIYCTVLHRHYLLFSIHIFMSRIWAFKFLFLFFEACCILPWWDGWFCK

SEQ ID NO: 4135 - DNA, 2415 bp, Homo sapiens
atagtaataaaactaatgagtaaaattgaacaaagtgataagtatgacagctgttctaagcacagacttatccttttaattcttctcataggaatctgtctgctattcaggatagagaaatttgctgctattcaatttcttgcaaagaaaaggataatatagatatcacacttcagtggcttattcagcattcaaaatctagaagaagctgaagcatctcctgaagtcttccagtccttcttggctataatcctagaattattgtccgttcctctgaagtaattcccagaatacggtccttcctaaaccccagaaattgcctttttcagagtttatttctcatgtgcactgctgaagatgaatatccctaatccttcataaagaatcagctagagttgtcatgataaagtcagcacacacaaaaaggcttcttacacatacctgtcttaaaccatgtgtagagctttaaaaacagaaaaaaaaccccatatacttatgaccatcttaaatcaagaaaattgcatatttccattctggtctttctgggccagatttttatattggttttcagtaaatgtctatctataatatttcattatagagtccagtagcttaatactgacactgacttgatacagcatgaagtttctagtgccacacacagtatttagaaaacctttaggcgtgaatgactcatgtgggatatatgtaaacataatgtttattttatctcacaaatgcatgtgaaatgtataattacatcttaggaatccaaaatggtctgcagagagtgagcggaggcaccagatcaatgttggttctttgcactggtgagattctgcctgatgaatattaaagatatcctgctttctgagaactctatcaccagatggcagttgggatatgggaggaactaaagcatcctgttttgtatctgtccagatcattatttctgtctcttgttttttcttcctggttcaggatacttttttaaggggttgagaattgaagattttccaaaagcgttcatgaatttagagcattccacccaatataataaaacctgttaagaatgtcagtctttgttcaaacatctgtttgttctatctccagtcattaaatcagtgctgctgcatgacactcttaactcctgactttttatatccagtcataaagttgactttcagcacaaaagatacttataaacaaataaaaaatttttatttttctctcttactgatgtaagctttggcactcttttgactggtgccattagacatcttgattattgtgacaactctagacctgcctgctttatctaatgtaatcatgctcaatgtctacaggttgtttaataatcagtcacacagagaactgaggaactgatgctgtttgtttgcttctatgatacagagatgtctaaaaacttcaaatggacatgttttgtagtttagcgacttccgtatacataaagggacatattaatactggttcatttgtaaattattattcatatagaccactgtagtagataaaactctatggtacacctgcttatgtgttgcctcacactgtgtgtgattttgtttcttttgttaagcagcacttatgtagactgcatttccaaatgtgttgagcactcagagtgtagtcaacagtaagttcttttaatgaatatcagttttaatttatagactgccatggccttaaaaatattctgtacaatatactgcactgtgttgcacagacactacttgcttttctccattcatatttttatgagtagaatctgggcttttaaatttctcttcttattctttgaagcatgttgcatactaccctggtgggatggatggttctgtaaatgaagggatatttaaacttgctactgttgttcaacaccattaatggtcagtgtgaaccattacaaagaatgtggcaacttgcttgtgcctaaaaggaggaattggaactagaatgtgtgactctgtggggactgcataggtttgttaattgacctatagctaaaccttaatgtgtttgtgtgtctatacattgctttccgcatttcaagacatccagacgctattaccaacattttcctgtgcattaacctctgcatgtgaaaacttttaacagttactgaactatgtaaatatgtgaatttttttatttaggtggatgcattttttgtctgtttactgctcttctcagctttattcaataaacttgcattttaagggttgtattggcaattttaacttaaaatgtgcatcatgatggaaggtgcagacttttttggaagtttccgagaggagggtctatagaccatttgtcagaaatcagatcagccctcaaagaatggggtctgtgggctagttaaaatagaaataaacttttaaaatatccacagaa

SEQ ID NO: 4136 - protein, 55 aa, Homo sapiens; identical to SEQ ID NO: 4134

SEQ ID NO: 4137 - DNA, 1558 bp, Homo sapiens
ttcagtggcttattcagcattcaaaatctagaagaagctgaagcatctcctgaagtcttccagtccttcttggctataatcctagaattattgtccgttcctctgaagtaattcccagaatacggtccttcctaaaccccagaaattgcctttttcagagtttatttctcatgtgcactgctgaagatgaatatccctaatccttcataaagaatcagctagagttgtcatgataaagtcagcacacacaaaaaggcttcttacacatacctgtcttaaaccatgtgtagagctttaaaaacagaaaaaaaaccccatatacttatgaccatcttaaatcaagaaaattgcatatttccattctggtctttctgggccagatttttatattggttttcagtaaatgtctatctataatatttcattatagagtccagtagcttaatactgacactgacttgatacagcatgaagtttctagtgccacacacagtatttagaaaacctttaggcgtgaatgactcatgtgggatatatgtaaacataatgtttattttatctcacaaatgcatgtgaaatgtataattacatcttaggaatccaaaatggtctgcagagagtgagcggaggcaccagatcaatgttggttctttgcactggtgagattctgcctgatgaatattaaagatatcctgctttctgagaactctatcaccagatggcagttgggatatgggaggaactaaagcatcctgttttgtatctgtccagatcattatttctgtctcttgttttttcttcctggttcaggatacttttttaaggggttgagaattgaagattttccaaaagcgttcatgaatttagagcattccacccaatataataaaacctgttaagaatgtcagtctttgttcaaacatctgtttgttctatctccagtcattaaatcagtgctgctgcatgacactcttaactcctgactttttatatccagtcataaagttgactttcagcacaaaagatacttataaacaaataaaaaatttttatttttctctcttactgatgtaagctttggcactcttttgactggtgccattagacatcttgattattgtgacaactctagacctgcctgctttattaccctggtgggatggatggttctgtaaatgaagggatatttaaacttgctactgttgttcaacaccattaatggtcagtgtgaaccattacaaagaatgtggcaacttgcttgtgcctaaaaggaggaattggaactagaatgtgtgactctgtggggactgcataggtttgttaattgacctatagctaaaccttaatgtgtttgtgtgtctatacattgctttccgcatttcaagacatccagacgctattaccaacattttcctgtgcattaacctctgcatgtgaaaacttttaacagttactgaactatgtaaatatgtgaatttttttatttaggtggatgcattttttgtctgtttactgctcttctcagctttattcaataaacttgcattttaagggttgt

SEQ ID NO: 4138 - protein, 44 aa, Homo sapiens
MCRALKTEKKPHILMTILNQENCIFPFWSFWARFLYWFSVNVYL

SEQ ID NO: 4139 - DNA, 1726 bp, Homo sapiens
ttcagtggcttattcagcattcaaaatctagaagaagctgaagcatctcctgaagtcttccagtccttcttggctataatcctagaattattgtccgttcctctgaagtaattcccagaatacggtccttcctaaaccccagaaattgcctttttcagagtttatttctcatgtgcactgctgaagatgaatatccctaatccttcataaagaatcagctagagttgtcatgataaagtcagcacacacaaaaaggcttcttacacatacctgtcttaaaccatgtgtagagctttaaaaacagaaaaaaaaccccatatacttatgaccatcttaaatcaagaaaattgcatatttccattctggtctttctgggccagatttttatattggttttcagtaaatgtctatctataatatttcattatagagtccagtagcttaatactgacactgacttgatacagcatgaagtttctagtgccacacacagtatttagaaaacctttaggcgtgaatgactcatgtgggatatatgtaaacataatgtttattttatctcacaaatgcatgtgaaatgtataattacatcttaggaatccaaaatggtctgcagagagtgagcggaggcaccagatcaatgttggttctttgcactggtgagattctgcctgatgaatattaaagatatcctgctttctgagaactctatcaccagatggcagttgggatatgggaggaactaaagcatcctgttttgtatctgtccagatcattatttctgtctcttgttttttcttcctggttcaggatacttttttaaggggttgagaattgaagattttccaaaagcgttcatgaatttagagcattccacccaatataataaaacctgttaagaatgtcagtctttgttcaaacatctgtttgttctatctccagtcattaaatcagtgctgctgcatgacactcttaactcctgactttttatatccagtcataaagttgactttcagcacaaaagatacttataaacaaataaaaaatttttatttttctctcttactgatgtaagctttggcactcttttgactggtgccattagacatcttgattattgtgacaactctagacctgcctgctttattaccctggtgggatggatggttctgtaaatgaagggatatttaaacttgctactgttgttcaacaccattaatggtcagtgtgaaccattacaaagaatgtggcaacttgcttgtgcctaaaaggaggaattggaactagaatgtgtgactctgtggggactgcataggtttgttaattgacctatagctaaaccttaatgtgtttgtgtgtctatacattgctttccgcatttcaagacatccagacgctattaccaacattttcctgtgcattaacctctgcatgtgaaaacttttaacagttactgaactatgtaaatatgtgaatttttttatttaggtggatgcattttttgtctgtttactgctcttctcagctttattcaataaacttgcattttaagggttgtattggcaattttaacttaaaatgtgcatcatgatggaaggtgcagacttttttggaagtttccgagaggagggtctatagaccatttgtcagaaatcagatcagccctcaaagaatggggtctgtgggctagttaaaatagaaataaacttttaaaatatccacagaa

SEQ ID NO: 4140 - protein, 44 aa, Homo sapiens; identical to SEQ ID NO: 4138

SEQ ID NO: 4141 - DNA, 6161 bp, Homo sapiens
ggacgatgggctagttcctggtgcgtcacgggggagttccttaaaggggaagcgagccgggctacggggcgagcgcggggtgcggtggtcggcggggaggcccccgcgctttaaaataatgcccgcggcgcccgcgcgaccatgcaatggcgagcgctcgtcctggggctggtgctcctccggcttggcctccatggagtattgtggctcgtcttcgggctggggcccagcatgggcttctaccagcgctttccgctcagcttcggcttccagcgtctgaggagccccgacggccccgcgtcgcccacctcggggcccgtgggccggcctgggggggtatccgggccgtcgtggctgcagccgccggggaccggggcagcgcagagcccgcgcaaggctccgcggcgtcctgggccggggatgtgcggcccagccaactggggctacgtgctgggcggccggggccgcggcccggacgagtacgagaagcgctacagcggcgccttccctccgcagctgcgtgcccagatgcgcgacctggcacggggcatgttcgtctttggctacgacaactacatggctcacgccttcccccaggacgagctcaaccccatccactgccgcggccgtgggcccgaccgcggggacccttcaaatctgaacatcaatgatgtactagggaactactcattgactcttgttgatgcattggatacacttgcaataatgggaaattcatccgagttccagaaagccgtcaagttagtgatcaacacagtttcatttgacaaagattccaccgtccaagtctttgaggccacgataagggtcctgggaagcctcctttctgctcacagaataataactgactccaagcagccctttggtgacatgacaattaaggactatgataatgagttgttatacatggcccatgacctggcggtgcggctcctccctgcttttgaaaacaccaagacagggattccatatcctcgggtgaatctaaagacaggagttcctcctgacaccaataatgagacatgcacagcgggagccggttccctcctggtggaatttgggattctgagtcgactcctgggggactccacatttgagtgggtggccagacgagcagtgaaagccctttggaacctccggagcaatgatacaggattactaggcaatgtcgtgaacattcagacgggccactgggttggaaagcagagtggcctgggtgccgggctggactccttctatgaatacctcttgaaatcttacattctctttggagaaaaagaagacctagaaatgtttaatgctgcatatcagagtattcagaactacttaagaagagggcgggaagcctgcaatgaaggagaaggagaccctccactctatgtcaacgtgaacatgttcagtgggcagctgatgaacacctggattgactctctgcaggcctttttccctggactgcaggtgctgataggagatgtggaagatgccatctgccttcatgccttctactatgccatatggaaacgatatggtgccctccctgagagatataactggcagctgcaggcccctgacgttctcttctacccactgagaccagagttagtggaatccacatatctcctctaccaggcaaccaagaatcccttctacctccatgtaggaatggatattctgcagagtctggaaaagtacacaaaagtcaagtgtgggtacgccacgctgcatcacgtcattgacaagtccacagaagaccggatggagagcttctttctcagtgagacctgtaaatatttgtatctgctgtttgatgaagacaatccagtacacaagtctggaaccagatacatgttcacaacagagggacacattgtatctgtggatgagcatcttcgggaattgccatggaaggaattcttctctgaagagggagggcaggaccaagggggaaagtctgtgcacaggccgaaacctcatgagttaaaagtcatcaactccagctccaactgcaatcgtgtacctgatgagaggaggtactccctgcccttaaagagcatctacatgcgacagattgaccagatggttggtttgatttgatctgctctctgtgaggcctcatcttgaaccagaccttaacgaccaaacccagaccatgccaaagtccagtctgaaatgaaaggggacagaagtcttgctgtccatggtggtgtaggaatttctgtgcaacacctcaccacgtctggttaatccttgcacacttcagtgtttctctcctgttcaataaaatgccctgttaaggatataatttgaagtgagaagatacatggaaattgccctcttatgacatgttgatgttataagcacaatagatggggcatctttggattgatgttcacagctttatacttcagaacctaagtctcttcactttgctggcacctgctatactggagtattgctatgtctttaaaaaattttttttattatattttatttttttgagacagggtcttgatatttttttgggacagggttacctgggctcaagtgatccttctgcctcagcctcccgagtagctgggattacaggtgagcaccactgtacctggctagctacttctttgttagaggattgagaatgaaatttctgcaaaagggcccatggttcatttggtatccctatttaattgcattgaaaatgtcatcctttctgttgttagataattggggtcttcccctgatatccaaccgtgattttggatcacatgggagaaaaagtcatccagtttttcatgtttgcctcaagtaatctttacagtgttacaaattatttgcttaagaagaatggtcttaaccagaattcttaacagatagtctcttaggttattatgttatggtctaagaggttaactgacatcttttgggtggtattttgcattttgaatatgaacttacctgaggaactcccatagttccagaatcaggtgccttttagggagagaacaatacctaagattgtctgagcttccatctttctcatatttcctaagcaaggattctcacttctgaccatatttgggttagagttctgttttgtttctgttttctgtgtctagtgccaattagctaaatcagggagaaagaaatgatcacatgacttttagcatccttgagccatttctctgtgtaatacaggctttagattagtgccttatattggttttggtttggggcactggatgtcgcagctactgctatggtttcaggaggcctgtttagccacatggtgagaccgtggtgaaagggggatggaaattgcttggccagtctttgcctttcatcctgtaaaagtaagcatgtagaaggaggaagttgtgctaaaatgcctttgtttttttgttattattttcttagccagaacatctctctttgaactcacactgatacacacctgctactcttacacagtgcagcagggttgactcttagtctggcttccatgaagcgtcatgggtggaaacgcattctagtaaaaaaggtaggaaatccctaaaacttccagcctcacatagcacggttctcacctgtcactgttttcccacctctaaggatttcatgtacatcttttcaaagctagaaataagcactgtctaagtttatgttgcatttttagtcaaaagggagaaatcttattccttcttgaaaattttaagtgttatggttttatatagttcagttctttgagatttttgaaaagagtattttcagtaataaacgtgccatctctatctcttaaacatttattacaacaattgttttaaaatagaaaaaataaaatgcttctattttaccttttttcatttcagaagcattattctgtttattaacagtgtcccatctactgaatagaaaactttgagaataatatatatatatattttaaatgttttcactgactcattgaaaatgttaattacacacacatgcatgcatgcacacacgagcatacttgtacctttgtctctgggcaaacaggtgggactgttagtgacccatttgggaaaatagagcatctcagagaaggaggtgagttcttcctgcctgtgatttctcttggcgctcccctcctctcccgctctggcttctgtggcggcagtggtgggtaagcactccagtgttctcttaatgaggcactttgcctgtcactcgagcaagcctgggtgttccttcctcctcatgctcctggaatagggaatagggatctcatgcttgcaaactacacaatgctgcaggtgcttcccaggggccacaggctgtcaggaaacgtgttttatgttaagtcacaaacccacttgacttctgggtactggaattaataccagtgggtgagactgagggtgagtgagttagtacatattaatcctggttgttgagcttccagactaccccgtccaaagtttgatgctatgtagtcagtggtttgtggggctggatgccagaaggttctttgagccagtttcaaaggttacttgttttttttttttttttttaaagtcagaatgttaacagctgtgatatatcctgcagggcttttgcagtttcttctgttctgtgttctgaaatactgggtagagaatggctgaggaggagattaccagagaagttgctttgctcagtgctttgccccaggattgcctcaaatctgagtggacttcatcctttgcggcggctctgagcctggcccatcttcctattcccacgtgtagctagtgtctagtgtcagctttgctcagtgtggtggaaacattttgcagaactgttgtagaaagctgccttatagttggcttgacaaagcataattctctcataacaaactttcaaatcattacagtagcttagctactttagttgatgtgaccgaggaatcccttctagaatcataggtggcaagggagggtttgctagctctccatttgcactggccattgtgaaaaaccagcttctgtattcaaatctttccttcatttttttaaattttttttttggcagcgcttgtgctggaacttactcattgtaactgaatcctcagggcttttcttgttttagatcatggactgtgcacgtgacacttaaataattttctatgtatttaaagaaaaatgcaccaggatggtgtctgtgcacgtgactattagaggagcgtctgtagaagtacctggtttggtcagtgcagttgtgcaatctgagggccttgtttcctcctcccctttccccttctccccaccaaaggaaaatatccctcttaatgatttcgtagttcagtttactgaatgattaccacctgtaattcctctttggattgtgtagactcaacatgagacattcctttctgctttctggagggcaccaggggcctttctctttgataaattttttttgtctgttgacaaaaacaaaaatcttttttcaaatgtagtgctggtgaaaaggtagggctgagtgattaccttagccacagggtggctgagcaggaactttagaagaaaatcctgagctttcctgtccattcccagcatccagctcctattctagtgcctcttccctgcagggcagggaccccttgggaaatcgaggaggtgggacgggctgggccctgtgtcccaggtttcacagggctcagggttatgctcccgcttgaatctggacgtgaatctggtaaaaatatcaagtacctgtggaactccctgattctataccctcttccttctttctgcaaggcagaggaataatatttttaaaggttattttgttttagttttaaatagcaaaacacaagctgcatttttatttattttgcataagaaaggtaaatctttttacaaaaaaaagtatagagttggaaactctgggaaaacttacggaaatacacaaatgcttctctgtaatgtgcaatatgctttgcaactgtagatgatattttatgtttaatctgtaaataagaaatgtatttaaattaaaagggatctttttgtaaaaggaccaaatgttcttttataaatgtaataaggaatatcttgctctttaaaatttattaggatttttatgagtaatttttattaaaagatttctttttttgagttgtc

SEQ ID NO: 4142 - protein, 657 aa, Homo sapiens; identical to SEQ ID NO: 381

SEQ ID NO: 4143 - DNA, 2319 bp, Homo sapiens
ggctagttcctggtgcgtcacgggggagttccttaaaggggaagcgagccgggctacggggcgagcgcggggtgcggtggtcggcggggaggcccccgcgctttaaaataatgcccgcggcgcccgcgcgaccatgcaatggcgagcgctcgtcctggggctggtgctcctccggcttggcctccatggagtattgtggctcgtcttcgggctggggcccagcatgggcttctaccagcgctttccgctcagcttcggcttccagcgtctgaggagccccgacggccccgcgtcgcccacctcggggcccgtgggccggcctgggggggtatccgggccgtcgtggctgcagccgccggggaccggggcagcgcagagcccgcgcaaggctccgcggcgtcctgggccggggatgtgcggcccagccaactggggctacgtgctgggcggccggggccgcggcccggacgagtacgagaagcgctacagcggcgccttccctccgcagctgcgtgcccagatgcgcgacctggcacggggcatgttcgtctttggctacgacaactacatggctcacgccttcccccaggacgagctcaaccccatccactgccgcggccgtgggcccgaccgcggggacccttcaaatctgaacatcaatgatgtactagggaactactcattgactcttgttgatgcattggatacacttgcaataatgggaaattcatccgagttccagaaagccgtcaagttagtgatcaacacagtttcatttgacaaagattccaccgtccaagtctttgaggccacgataagggtcctgggaagcctcctttctgctcacagaataataactgactccaagcagccctttggtgacatgacaattaaggactatgataatgagttgttatacatggcccatgacctggcggtgcggctcctccctgcttttgaaaacaccaagacagggattccatatcctcgggtgaatctaaagacaggagttcctcctgacaccaataatgagacatgcacagcgggagccggttccctcctggtggaatttgggattctgagtcgactcctgggggactccacatttgagtgggtggccagacgagcagtgaaagccctttggaacctccggagcaatgatacaggattactaggcaatgtcgtgaacattcagacgggccactgggttggaaagcagagtggcctgggtgccgggctggactccttctatgaatacctcttgaaatcttacattctctttggagaaaaagaagacctagaaatgtttaatgctgcatatcagagtattcagaactacttaagaagagggcgggaagcctgcaatgaaggagaaggagaccctccactctatgtcaacgtgaacatgttcagtgggcagctgatgaacacctggattgactctctgcaggcctttttccctggactgcaggtgctgataggagatgtggaagatgccatctgccttcatgccttctactatgccatatggaaacgatatggtgccctccctgagagatataactggcagctgcaggcccctgacgttctcttctacccactgagaccagagttagtggaatccacatatctcctctaccaggcaaccaagaatcccttctacctccatgtaggaatggatattctgcagagtctggaaaagtacacaaaagtcaagtgtgggtacgccacgctgcatcacgtcattgacaagtccacagaagaccggatggagagcttctttctcagtgagacctgtaaatatttgtatctgctgtttgatgaagacaatccagtacacaagtctggaaccagatacatgttcacaacagagggacacattgtatctgtggatgagcatcttcgggaattgccatggaaggaattcttctctgaagagggagggcaggaccaagggggaaagtctgtgcacaggccgaaacctcatgagttaaaagtcatcaactccagctccaactgcaatcgtgtacctgatgagaggaggtactccctgcccttaaagagcatctacatgcgacagattgaccagatggttggtttgatttgatctgctctctgtgaggcctcatcttgaaccagaccttaacgaccaaacccagaccatgccaaagtccagtctgaaatgaaaggggacagaagtcttgctgtccatggtggtgtaggaatttctgtgcaacacctcaccacgtctggttaatccttgcacacttcagtgtttctctcctgttcaataaaatgccctgttaaggatataatttg

SEQ ID NO: 4144 - protein, 657 aa, Homo sapiens; identical to SEQ ID NO: 381

SEQ ID NO: 4145 - DNA, 766 bp, Homo sapiens
gccgggctacggggcgagcgcggggtgcggtggtcggcggggaggcccccgcgctttaaaataatgcccgcggcgcccgcgcgaccatgcaatggcgagcgctcgtcctggggctggtgctcctccggcttggcctccatggagtattgtggctcgtcttcgggctggggcccagcatgggcttctaccagcgctttccgctcagcttcggcttccagcgtctgaggagccccgacggccccgcgtcgcccacctcggggcccgtgggccggcctgggggggtatccgggccgtcgtggctgcagccgccggggaccggggcagcgcagagcccgcgcaaggctccgcggcgtcctgggccggggatgtgcggcccagccaactggggctacgtgctgggcggccggggccgcggcccggacgagtacgagaagcgctacagcggcgccttccctccgcagctgcgtgcccagatgcgcgacctggcacggggcatgttcgtctttggctacgacaactacatggctcacgccttcccccaggacgagctcaaccccatccactgccgcggccgtgggcccgaccgcggggaccctttgagagcatgatttctaccgaagcaaggggacatcccaagctaaattcaaaggactgagccttttcaaaattctaggaaaccgatgagtttttcttgcttaaccatagcgtttatacgtataagtgtattttctatctcaatttttttgagaaaaaatattaaattttg

SEQ ID NO: 4146 - protein, 187 aa, Homo sapiens
MASARPGAGAPPAWPPWSIVARLRAGAQHGLLPALSAQLRLPASEEPRRPRVAHLGARGPAWGGIRAVVAAAAGDRGSAEPAQGSAASWAGDVRPSQLGLRAGRPGPRPGRVREALQRRLPSAAACPDARPGTGHVRLWLRQLHGSRLPPGRAQPHPLPRPWARPRGPFESMISTEARGHPKLNSKD

SEQ ID NO: 4147 - DNA, 994 bp, Homo sapiens
ccggtgcgggccggtgcgggccagtgcaggccaggcccggccggggcgaggcaggtggccaggtccgaggaccgcgtcgcacagcagctttcaggacctggagagaaatcgagatgaagaagggaagtcacttgcttcatggccagggaagggctccagcaagacatgggctcctgaaagtgacagtgtgtgaaggcccggagaggcacaggacctgtcccctcgccctccttggattgcagcaaggaaagaggtgtgtcttccgcagaaaaatgtgcatgttcttttagatgtgtggcctccgagcaaggtatttagcctgcctctatgtgctcacctggaaaatggggtgatgaagaagatgatgatgataatgggaactccctcttggagctgctgtgcagatgaattttccttctaacagtcaggcccctctgctgcaagtctgctggagttttctggaggtccactccagaccttgtttgcctgggtatcaccagccgaggctgcagaacagcaaagattgctgcctgttccttcctttggaagctttgtcccagggaggcacccaccagatgccagctggagctcttctgtataaggaaaagtgggcaagttttgagttcaacgtgaggcctcaaggatgtgtgcaacccatggtacttgaatttacttattgactgttttttggaaatccttatttcccaaaactcgtggaaggagctgacttctggcaggaaacgtggaactggcagcgtgtcgtgcaagcatctgcaatcccagtcctgagctggacttctcagagaggctgggcattatttatggagatgtcggagtgacagggggaacttctggccaggaactgccggtggtgtcacatccttaacctggctgacatcggaacaccctggggggagcatttctccaggaaaggatggtgggtcaggagcccgcatggtgtcttttcaaagcaataataaagatatcagaaggg

SEQ ID NO: 4148 - protein, 91 aa, Homo sapiens
MNFPSNSQAPLLQVCWSFLEVHSRPCLPGYHQPRLQNSKDCCLFLPLEALSQGGTHQMPAGALLYKEKWASFEFNVRPQGCVQPMVLEFTY

SEQ ID NO: 4149 - DNA, 1920 bp, Homo sapiens
gggggctggaggcagcagcgcccccgcactccccgcgtctcgcacacttgcaccggtcgctcgcgcgcagcccggcgtcgccccacgccgcgctcgctcctccctccctcctcccgctccgtggctcccgtgctcctggcgaggctcaggcgcggagcgcgcggacgggcgcaccgacagacggccccggggacgcctcggctcgcgcctcccgggcgggctatgttgattgccccgccggggccggcccgcgggatcagcacagcccggcccgcggccccggcggccaatcgggactatgaaccggaaagcgcggcgctgcctgggccacctctttctcagcctgggcatggtctacctccggatcggtggcttctcctcagtggtagctctgggcgcaagcatcatctgtaacaagatcccaggcctggctcccagacagcgggcgatctgccagagccggcccgacgccatcatcgtcataggagaaggctcacaaatgggcctggacgagtgtcagtttcagttccgcaatggccgctggaactgctctgcactgggagagcgcaccgtcttcgggaaggagctcaaagtggggagccgggaggctgcgttcacctacgccatcattgccgccggcgtggcccacgccatcacagctgcctgtacccagggcaacctgagcgactgtggctgcgacaaagagaagcaaggccagtaccaccgggacgagggctggaagtggggtggctgctctgccgacatccgctacggcatcggcttcgccaaggtctttgtggatgcccgggagatcaagcagaatgcccggactctcatgaacttgcacaacaacgaggcaggccgaaagatcctggaggagaacatgaagctggaatgtaagtgccacggcgtgtcaggctcgtgcaccaccaagacgtgctggaccacactgccacagtttcgggagctgggctacgtgctcaaggacaagtacaacgaggccgttcacgtggagcctgtgcgtgccagccgcaacaagcggcccaccttcctgaagatcaagaagccactgtcgtaccgcaagcccatggacacggacctggtgtacatcgagaagtcgcccaactactgcgaggaggacccggtgaccggcagtgtgggcacccagggccgcgcctgcaacaagacggctccccaggccagcggctgtgacctcatgtgctgtgggcgtggctacaacacccaccagtacgcccgcgtgtggcagtgcaactgtaagttccactggtgctgctatgtcaagtgcaacacgtgcagcgagcgcacggagatgtacacgtgcaagtgagccccgtgtgcacaccaccctcccgctgcaagtcagattgctgggaggactggaccgtttccaagctgcgggctccctggcaggatgctgagcttgtcttttctgctgaggagggtacttttcctgggtttcctgcaggcatccgtgggggaaaaaaaatctctcagagccctcaactattctgttccacacccaatgctgctccaccctcccccagacacagcccaggtccctccgcggctggagcgaagccttctgcagcaggaactctggacccctgggcctcatcacagcaatatttaacaatttattctgataaaaataatattaatttatttaattaaaaagaattcttccacctcgtcgggatccgttttctgcaatcaaagtggactgcttgctttcctagcaggatgattttgttgctaggacaaggagccgtgtagaagtgtacataactattctttatgcagatatttctactagctgattttgcaggtacccaccttgcagcactagatgtttaagtacaagaggagacatcttttatgcatatatagatatacacacac

SEQ ID NO: 4150 - protein, 349 aa, Homo sapiens; identical to SEQ ID NO: 383

SEQ ID NO: 4151 - DNA, 1714 bp, Homo sapiens
gaggggcgggggctggaggcagcagcgcccccgcactccccgcgtctcgcacacttgcaccggtcgctcgcgcgcagcccggcgtcgccccacgccgcgctcgctcctccctccctcctcccgctccgtggctcccgtgctcctggcgaggctcaggcgcggagcgcgcggacgggcgcaccgacagacggccccggggacgcctcggctcgcgcctcccgggcgggctatgttgattgccccgccggggccggcccgcgggatcagcacagcccggcccgcggccccggcggccaatcgggactatgaaccggaaagcgcggcgctgcctgggccacctctttctcagcctgggcatggtctacctccggatcggtggcttctcctcagtggtagctctgggcgcaagcatcatctgtaacaagatcccaggcctggctcccagacagcgggcgatctgccagagccggcccgacgccatcatcgtcataggagaaggctcacaaatgggcctggacgagtgtcagtttcagttccgcaatggccgctggaactgctctgcactgggagagcgcaccgtcttcgggaaggagctcaaagtggggagccgggaggctgcgttcacctacgccatcattgccgccggcgtggcccacgccatcacagctgcctgtacccagggcaacctgagcgactgtggctgcgacaaagagaagcaaggccagtaccaccgggacgagggctggaagtggggtggctgctctgccgacatccgctacggcatcggcttcgccaaggtctttgtggatgcccgggagatcaagcagaatgcccggactctcatgaacttgcacaacaacgaggcaggccgaaagatcctggaggagaacatgaagctggaatgtaagtgccacggcgtgtcaggctcgtgcaccaccaagacgtgctggaccacactgccacagtttcgggagctgggctacgtgctcaaggacaagtacaacgaggccgttcacgtggagcctgtgcgtgccagccgcaacaagcggcccaccttcctgaagatcaagaagccactgtcgtaccgcaagcccatggacacggacctggtgtacatcgagaagtcgcccaactactgcgaggaggacccggtgaccggcagtgtgggcacccagggccgcgcctgcaacaagacggctccccaggccagcggctgtgacctcatgtgctgtgggcgtggctacaacacccaccagtacgcccgcgtgtggcagtgcaactgtaagttccactggtgctgctatgtcaagtgcaacacgtgcagcgagcgcacggagatgtacacgtgcaagtgagccccgtgtgcacaccaccctcccgctgcaagtcagattgctgggaggactggaccgtttccaagctgcgggctccctggcaggatgctgagcttgtcttttctgctgaggagggtacttttcctgggtttcctgcaggcatccgtgggggaaaaaaaatctctcagagccctcaactattctgttccacacccaatgctgctccaccctcccccagacacagcccaggtccctccgcggctggagcgaagccttctgcagcaggaactctggacccctgggcctcatcacagcaatatttaacaatttattctgataaaaataatattaatttatttaattaaaaagaattcttccac

SEQ ID NO: 4152 - protein, 349 aa, Homo sapiens; identical to SEQ ID NO: 383

SEQ ID NO: 4153 - DNA, 1663 bp, Homo sapiens
gagagtgcaggcgctgaggacagcgacgatcccgagacgagacccaacggcgagaaaggagagagcaagagatgccatggactacaaggtgatgaataccactatgagctcactacaagatctcaaagatttcaagccactggctgttacaaagcataaagccacccttctggagcagcggcgggaggcaggctgggaggaggccccaagttttggccagacgatagaccacctccttaggtgtccggggagctgctgaaacataatgaggaagatgctgctgatccaaaggataaaaacacagaaactagaaccaagaagcacctaaagtggactcatgcccagcatccctgcagactgactttctctgagctatagttctgcattggactgtttttcctttgctatcacctgcccaacacacaatcctggatgcttttgattggttggatttcttttttttttttcctgccttttctttttctttccttgaccctgggaattataaacgagaaattgctttaaaaagtattgttctgtgctaaaattagccttgtttatgaacaagttttatccctagggatttcctgaattgcaatcccagattaccttgtaaatggggctgtgttgtttgatttgtatagtactgatctgtaggttaaaatacgtttcctttcttttgtttcattctttttttaaaagtctggatccaggtaatggcctgagtcacatttgcttagctactgaagcgatctcaatatgttatcgcttagagttgaaacataatcaaacatacgttatacctggggctcttgcacactatttgatatatatatgttactctacaaagaaacacaaaccttgtatgttgaaatgtaattcctgtttgatcctgcagctagaatgctaaagaaattgcaaatatcaaaagtgacttcaaataccctgaatataagctagtcaacagtaagtggatggttccagaataccatattctaagacaaagcaggaattagagatcaactgacctcatccataatgttgctcaggtctgtctgtggatctgtccattttggagtaaaaaacaaggcatgcttctgtgattgtgtttatgaaaactgtagtatttcagatttatgttttgcaattgtgcctgccttgcaataaaacaccttcagttgactcagcaataaggtctctgtcaatttcctgcaaaactgtgtccttattggctttctaaaaaagtccagtgtagacctatcagtggtgacctgctagacatttcagctggatctagcattattgctctttcagaaatagcactagagctgtccattgtctacacatggggtcagagttgtatggtcagattctcaattcttcatattaccatcagctacagaaatctctagtcacagcctaaccctgttacatatatgtgctgccatctgccattgtgttctaactctggagtccctatttatttctgagattttaggacaagacaaaaatcctctggacctcagtgtcctcatatacaaaatgggaataatgatacttcctatgattgtggtgataagtgcctgtaaaaggacatcacatggatggtactttgcacgttgtaaattcattgggatgtggcaatgttcaataaatggtggtt

SEQ ID NO: 4154 - protein, 60 aa, Homo sapiens
MDYKVMNTTMSSLQDLKDFKPLAVTKHKATLLEQRREAGWEEAPSFGQTIDHLLRCPGSC

SEQ ID NO: 4155 - DNA, 1807 bp, Homo sapiens
agtatttcagtgacatcatccactcaggagagttggggcgaggctggctgaggttctcaaggagctgagttttgagttcaggtgctcgtgtagcagtggaatgatgcctcctgacctttcagacctttgagacctctgggcggtcttagaaatcacttcaagcctccagtccaggatacgactgcctaggggaattccagggaaaggtggcagagatgccatggactacaaggtgatgaataccactatgagctcactacaagatctcaaagatttcaagccactggctgttacaaagcataaagccacccttctggagcagcggcgggaggcaggctgggaggaggccccaagttttggccagacgatagaccacctccttaggtgtccggggagctgctgaaacataatgaggaagatgctgctgatccaaaggataaaaacacagaaactagaaccaagaagcacctaaagtggactcatgcccagcatccctgcagactgactttctctgagctatagttctgcattggactgtttttcctttgctatcacctgcccaacacacaatcctggatgcttttgattggttggatttcttttttttttttcctgccttttctttttctttccttgaccctgggaattataaacgagaaattgctttaaaaagtattgttctgtgctaaaattagccttgtttatgaacaagttttatccctagggatttcctgaattgcaatcccagattaccttgtaaatggggctgtgttgtttgatttgtatagtactgatctgtaggttaaaatacgtttcctttcttttgtttcattctttttttaaaagtctggatccaggtaatggcctgagtcacatttgcttagctactgaagcgatctcaatatgttatcgcttagagttgaaacataatcaaacatacgttatacctggggctcttgcacactatttgatatatatatgttactctacaaagaaacacaaaccttgtatgttgaaatgtaattcctgtttgatcctgcagctagaatgctaaagaaattgcaaatatcaaaagtgacttcaaataccctgaatataagctagtcaacagtaagtggatggttccagaataccatattctaagacaaagcaggaattagagatcaactgacctcatccataatgttgctcaggtctgtctgtggatctgtccattttggagtaaaaaacaaggcatgcttctgtgattgtgtttatgaaaactgtagtatttcagatttatgttttgcaattgtgcctgccttgcaataaaacaccttcagttgactcagcaataaggtctctgtcaatttcctgcaaaactgtgtccttattggctttctaaaaaagtccagtgtagacctatcagtggtgacctgctagacatttcagctggatctagcattattgctctttcagaaatagcactagagctgtccattgtctacacatggggtcagagttgtatggtcagattctcaattcttcatattaccatcagctacagaaatctctagtcacagcctaaccctgttacatatatgtgctgccatctgccattgtgttctaactctggagtccctatttatttctgagattttaggacaagacaaaaatcctctggacctcagtgtcctcatatacaaaatgggaataatgatacttcctatgattgtggtgataagtgcctgtaaaaggacatcacatggatggtactttgcacgttgtaaattcattgggatgtggcaatgttcaataaatggtggtt

SEQ ID NO: 4156 - protein, 60 aa, Homo sapiens; identical to SEQ ID NO: 4154

SEQ ID NO: 4157 - DNA, 740 bp, Homo sapiens
acgccagtcctggccctgctctccacaaaagcccaggaaactcctaacattgcttccaatcattaaaaactttcacaagagtcagtcattaacaccttccgcaagaggccttaggctcacctctccaaggagactgaaaatcagaaggaatacatttccagtggaattataaaggtcctaaattattacctgggtggtctttcttaagtcattttccagaggagaagccagctgccctctcttgacatagccatgtgaagatgctcaagtactgaagatcctaagcctgccaacaaacatgctgaataatacatccattgtatgggctagaagtatgagtactatattgaataaatggcgacagcagaaatcattgtcttcttcctactcttgagtgaaaacagccagtctgtcactactaaatatgatgctagctgaagggattttatagatgccctctatcaagttaaggtaattctcttctatccctaacttgctgagagtttttatcaggaatgaaattcaaattctgcctaacttttttttctgtgtcaattgatatgattacacaactgatacgatgaattacactgatcgatttcaaatattgacacactttgcatgtttgaaataaattctacttggaaatgatgtataatactttatattcattattggattcagtttgctgaagttgaaggttttagtcgaagatttttaatctaagttctgaagagata

SEQ ID NO: 4158 - protein, 31 aa, Homo sapiens
MLNNTSIVWARSMSTILNKWRQQKSLSSSYS

SEQ ID NO: 4159 - DNA, 1351 bp, Homo sapiens
atggaatctacacatccccttcagttccacaactcactgcttaccttggaggaaacccagatctatgacatgccagtgactcctagtgataacatttttgtgttgcaggaatgctgccaaatcttgtccttggaattgacaacctcaggtttctgtggcacctctgtgattccaaatcagcgatcaggtgggcagcggtctgggcagtcacccacagggagtacacttggtgctgcacgttcggactttcagtcttgctcaaagcaaagaatctccaagagcgctgaggctacggattcattcgggtggggcgagtggcgcagaggcggcgacactggcaggcgtccggctgccgccacctcccgggtgtggcgggtctggggcccggggtctccggccagagcagctgtggagccacgtgcaacacgcgcgttgccctcagcccgggcggggaccggacgcatccggagctgcggggaggagccgggcgccgcccccggcggcagtgccagccgcgtgggagggcacggaccggcggaggggcagacgacggaggcggccaagctggaggaacgggaccgagggatcgaccgaggctggctggctaggggtgggactggcagagctacggacaggtgggagcagtcagacagcctgagagagggagaccagaacgcaaagagagcgagagcattaagtaggcagggagaggcacacagaaagatagacagcaacactcgcgtgctccctccctccacacgccctcctcttaccgagcgaagcggccaggggcacagagtgggagaggactgtgggcacagaagaccggaagagggacgctgcattgctggtgggacggagggattcggacggacggacagaccagcgcacagactggcagcctgcgagagtggcagctttgagagcagagcgcagcaaagcgagaatcccgcgccgagctgctagtcggacccacagacggtcggactgacagacgtgcagacggacagaagagcagacaggaggcgggggcgcgttcactcccggcggccagccggccagagaaggcggcggtggcaccttctgagcgcgtccggagcagagaccagcagcagcaggggcagcggggacacaagccgcgaccgagccgccgccgcagccctggctgccacagctgtgtgggatcccagccgacactgcagaaagctccttttactagcagttaaataaatcgaccaaaaacaaaacaaacaaacaaacccaacaacaacaacaacaacaaaagccaagccaaaagccaaaacaaacaaatccagccaaatcaatcattgagaaacaataatattaataa

SEQ ID NO: 4160 - protein, 321 aa, Homo sapiens
MESTHPLQFHNSLLTLEETQIYDMPVTPSDNIFVLQECCQILSLELTTSGFCGTSVIPNQRSGGQRSGQSPTGSTLGAARSDFQSCSKQRISKSAEATDSFGWGEWRRGGDTGRRPAAATSRVWRVWGPGSPARAAVEPRATRALPSARAGTGRIRSCGEEPGAAPGGSASRVGGHGPAEGQTTEAAKLEERDRGIDRGWLARGGTGRATDRWEQSDSLREGDQNAKRARALSRQGEAHRKIDSNTRVLPPSTRPPLTERSGQGHRVGEDCGHRRPEEGRCIAGGTEGFGRTDRPAHRLAACESGSFESRAQQSENPAPSC

SEQ ID NO: 4161 - DNA, 568 bp, Homo sapiens
gtgcccacagtcctctcccactctgtgcccctggccgcttcgctcggctgtctgactgctcccacctgtccgtagctctgccagtcccacccctagccagccagcctcggtcgatccctcggtcccgttcctccagcttggccgcctccgtcgtctgcccctccgccggtccgtgccctcccacgcggctggcactgccgccgggggcggcgcccggctcctccccgcagctccggatgcgtccggtccccgcccgggctgagggcaacgcgcgtgttgcacgtggctccacagctgctctggccggagaccccgggccccagacccgccacacccgggaggtggcggcagccggacgcctgccagtgtcgccgcctctgcgccactgggagcatccagaactggcccatccagagtgatggcacctgctgggtgcgccgggcgcccgcggtaccactcattccctgggccgttctccgccagccctaaggctggagacaaagcgcatgagccacgcgcagcagcgtgagcatcattaatcagaaagaaaactggcacgttgccccct

SEQ ID NO: 4162 - protein, 60 aa, Homo sapiens
MRPVPARAEGNARVARGSTAALAGDPGPQTRHTREVAAAGRLPVSPPLRHWEHPELAHPE

SEQ ID NO: 4163 - DNA, 3372 bp, Homo sapiens
gggtctccggccagagcagctgtggagccacgtgcaacacgcgcgttgccctcagcccgggcggggaccggacgcatccggagctgcggggaggagccgggcgccgcccccggcggcagtgccagccgcgtgggagggcacggaccggcggaggggcagacgacggaggcggccaagctggaggaacgggaccgagggatcgaccgaggctggctggctaggggtgggactggcagagctacggacaggtgggagcagtcagacagcctgagagagggagaccagaacgcaaagagagcgagagcattaagtaggcagggagaggcacacagaaagatagacagcaacactcgcgtgctccctccctccacacgccctcctcttaccgagcgaagcggccaggggcacagagtgggagaggactgtgggcacagaagaccggaagagggacgctgcattgctggtgggacggagggattcggacggacggacagaccagcgcacagactggcagcctgcgagagtggcagctttgagagcagagcgcagcaaagcgagaatcccgcgccgagctgctagtcggacccacagacggtcggactgacagacgtgcagacggacagaagagcagacaggaggcgggggcgcgttcactcccggcggccagccggccagagaaggcggcggtggcaccttctgagcgcgtccggagcagagaccagcagcagcaggggcagcggggacacaagccgcgaccgagccgccgccgcagccctggctgccacagctgtgtgggatcccagccgacactgcagaaagctccttttactagcagttaaataaatcgaccaaaaacaaaacaaacaaacaaacccaacaacaacaacaacaacaaaagccaagccaaaagccaaaacaaacaaatccagccaaatcaatcattgagaaacaataatattaataaaatccaaaactaaatcaaaccaatcaaggcaccaagacgcaggggggatatccacagttcgatcaaggttgacgatgtgtcacactgtgtaagggaatcgcatggagatgggcattccgaactgttaatggggacatgggactccagttgtctctgatcacttgtgtggattttcctggcgtagaacgacagaagccgctagtaagtcgccaagacctacagcaggaattctgcaccaaagggcataaaatcttgttattttaatttgcatctgggagaatgtctgagcaaggagacctgaatcaggcaatagcagaggaaggagggactgagcaggagacggccactccagagaacggcattgttaaatcagaaagtctggatgaagaggagaaactggaactgcagaggcggctggaggctcagaatcaagaaagaagaaaatccaagtcaggagcaggaaaaggtaaactgactcgcagccttgctgtctgtgaggaatcttctgccagaccaggaggtgaaagtcttcaggatcagactctctgaaaactgcaaatggaaaggaattcaaaagaatttagattaaaagttaaataaaaagtaggcacagtagtgctgaattttcctcaaaggctctcttttgataaggctgaaccaaatataatcccaagtatcctctctccttccttgttggagatgtcttacctctcagctccccaaaatgcacttgcctataagaaacacaattgctggttcatatgaaacttaggaaatagtgaataaggtgcatttaactttggagaaatacttttatggctttggtggagatttctcaatactgcaaaagttgtccagaaatgaatctgagctgatggtgactttaagttaatattattaatatatcactgcatatttttacccttatttttgctccttacagcaagattagtaggttataaaaatttaaatttaaacaaaattatttcatgacaaaatgggaaacttcacatcatacttatttttgtttgcctttcaggcatcatattagcttttataaaaaatggtcttgctgctgaaattgtacttattttatcagaggctgggtgcagtcaagacaaaagtaaaatggtttacctgagcccaggggagggaaaattgattaagatatcattatttttgtttggtttggttttgcttttttcctcttactttaattgaaatactctgaattcccctcatggaaacagagagcattgagagcactttctttaaaaggaccaaaaataaattcctaatagattttgtcctaagagagtgtttttttttctagcatcattttctttacatgccactcatgtcataaggcatggacaggctatctttcagtggccattactatgtttcgtacacatgctttattttacttgggctctgagaaatgtgtggctttccttcagcattttatttgtgcttctctttttaatggagattgaaaagggagaataatgtgaatatcacggcttatattattaaatgttgattgatggcttgtaatgtactgcacacaatatatgttaactctgcagaatgacagaccctgggagaagtaatgccccagttgtcccccactcctaatgccaggcagagaaggacagcctttatagacttaatctgctttttgtcccatttgacaaggtaccaggaggaaattttttaagggatcaactgtatcacagtgcccactctggacctaagtctagtgtatccatacaattggtgcagagaaataaggtgtaaatggtgctttgttcctgctggttccaagctcagaaaccaagactagctttgtaggagagaatgagagcctgcaagcctctctttggattggctgaggagtggtgggagcagggggttgatagaaaacatccagacacacatataagcaagtggccgtgctacctttttagagaataaagaaacagacttttgagtttatatgcaatgccttcattaggtaccaccggcacttacaaaatgtgcggactgaatcccagagaacactggcagatgtatacagtatatggattgtatcgcttccccaatgtttgtaaattcacagtatttggaaaactgccttcattttccagtgtgggaaaaactcttgctacctgtattacttgatctcagacccatacctgatggttcagtctgtccttaagttaaaagaattttgcttttctaatgttatactatttacctgtcagtgtattactgcaacttgaatcactcttttactgttgttggatataaacttatcctgtaccaatgtatttattaacacttgtattttattattgagcatatcaataaaaatattaaaaaataacagattgttttttaccaac

SEQ ID NO: 4164 - protein, 89 aa, Homo sapiens; identical to SEQ ID NO: 385

SEQ ID NO: 4165 - DNA, 3167 bp, Homo sapiens
aggtttgctacctgatcacctcctgaagatgtagggttgacgatgtgtcacactgtgtaagggaatcgcatggagatgggcattccgaactgttaatggggacatgggactccagttgtctctgatcacttgtgtggattttcctggcgtagaacgacagaagccgctagtaagtcgccaagacctacagcaggaattctgcaccaaagggcataaaatcttgttattttaatttgcatctgggagaatgtctgagcaaggagacctgaatcaggcaatagcagaggaaggagggactgagcaggagacggccactccagagaacggcattgttaaatcagaaagtctggatgaagaggagaaactggaactgcagaggcggctggaggctcagaatcaagaaagaagaaaatccaagtcaggagcaggaaaaggtaaactgactcgcagccttgctgtctgtgaggaatcttctgccagaccaggaggtgaaagtcttcaggatcaggaatcaattcatttacagctttccagtttttccagcctgcaagaggaggataaatctaggaaagatgactctgaaagagaaaaagaaaaggataaaaacaaagataaaacctctgaaaaacccaagatcagaatgttatcaaaagattgcagccaagaatacacggattctacaggcatagacttacacgagtttctgattaacacattaaagaataattccagggacaggatgatacttttgaaaatggagcaggaaattattgatttcattgctgacaacaataatcattataaaaagttccctcagatgtcatcgtatcagaggatgcttgtccatcgagtggcagcttattttggattggatcacaatgtggatcaaacaggaaaatctgttatcatcaacaagaccagcagcaccagaataccagagcaaaggttttgtgaacatttaaaagatgaaaaaggtgaagaatcccagaagcggtttatcttgaagcgagataactctagtattgataaagaagacaatcagtcagtttgctcccaggaaagcctttttgtggaaaacaggggcaacagagatggctcagggagaacatctgggagtcgacagagcagctcagaaaatgaactcaagtggtctgaccaccaaagggcctggagcagcacagactccgacagttccaaccgcaatctaaagcccgccatgaccaagacggcgagttttgggggcatcacggtgctgaccaggggtgacagcacttccagtactaggagtaccgggaagctgtccaaagcaggttccgagtcttccagcagtgcaggctcctcaggatcgctgtcccgcacccatccacctctccagagcacacccctagtctcaggtgtggcagctggctctccaggctgtgtgccttatccagagaatggaatagggggccaggttgctcccagcagcaccagctacatcctccttccacttgaagctgcaacaggcatcccgcctggaagcatccttcttaatccacacacaggccagccctttgtgaatcccgatggaactcctgcaatatacaacccacccaccagtcagcagcccctgcgaagcgccatggtggggcagtcccaacagcagccaccacagcagcagccctccccgcagccccaacagcaggtccagccaccgcagccacagatggcaggccctctggtcactcagtctgtccaggggctgcaggcttcctcccagtcagtgcaatatccagcagtctcttttcctccccagcacctcctacctgtgtctccaacgcagcactttcccatgagagatgatgtggcaacacagtttggccagatgaccctgagccggcagtcctcgggggagactcctgaacccccatcaggtcctgtctacccatcctcccttatgccacagccggcccagcagcccagctatgtaatcgcctctacaggccagcagcttcctacaggaggattctcaggctctggccctcccatctcccagcaggtcctccagccccctccctcaccacagggatttgtgcaacagcctccgcctgcacagatgcctgtatattattacccatctggtcagtaccctacctcaaccacgcaacagtaccggcccatggccccggttcagtacaacgctcagaggagtcaacagatgccacaggcagcacagcaagcaggttaccagccagtcttgtctggtcaacagggattccaaggcctaataggagtgcagcagccacctcagagtcagaacgtgataaataaccaacaaggaactccggtgcaaagcgtgatggtttcctacccaacaatgtcttcttatcaggtgccaatgacccagggttctcaaggactgccccagcagtcataccaacagccaatcatgctacctaaccaggcaggtcaagggtcactcccagccactggaatgcctgtttactgtaatgtcacaccgcccacccctcagaacaaccttaggctgattggcccacactgcccctccagcactgtcccagtgatgtcagctagctgcagaacaaactgtgcaagtatgagcaatgctggttggcaggtcaaattctgagagctctggctgtggtacatttcttcagatatttctcatggcctttgatggaagaggaacaaggtgggaaaactggctgaggacttaagtattcactcaacactcaaatgattgctgctggtattctgtaaaaaataaacaaagactaatatacacgttagctggttaatggtgcatatttctgtcatgtctgctaggtatgcctttatagcttagctagtgacatgaattcatcaaggtaagattttctcctaccactgaataccactgtgtagattataatatccctaatttggattagttttgtactttgtgttgagtttgtgatgctaaaagtatttaaaaattatatactaaatcacattgtaccaaagctgtaatggaaaagcaaagaagaattgatgaattgaaggaataatttatatacattatagagttttcttttttaatggatatatactgtattgtagtgtttaatcaaaataaaactatttgaccttatggaggaaggtcatgtttttaccaccagtttggttca

SEQ ID NO: 4166 - protein, 793 aa, Homo sapiens
MSEQGDLNQAIAEEGGTEQETATPENGIVKSESLDEEEKLELQRRLEAQNQERRKSKSGAGKGKLTRSLAVCEESSARPGGESLQDQESIHLQLSSFSSLQEEDKSRKDDSEREKEKDKNKDKTSEKPKIRMLSKDCSQEYTDSTGIDLHEFLINTLKNNSRDRMILLKMEQEIIDFIADNNNHYKKFPQMSSYQRMLVHRVAAYFGLDHNVDQTGKSVIINKTSSTRIPEQRFCEHLKDEKGEESQKRFILKRDNSSIDKEDNQSVCSQESLFVENRGNRDGSGRTSGSRQSSSENELKWSDHQRAWSSTDSDSSNRNLKPAMTKTASFGGITVLTRGDSTSSTRSTGKLSKAGSESSSSAGSSGSLSRTHPPLQSTPLVSGVAAGSPGCVPYPENGIGGQVAPSSTSYILLPLEAATGIPPGSILLNPHTGQPFVNPDGTPAIYNPPTSQQPLRSAMVGQSQQQPPQQQPSPQPQQQVQPPQPQMAGPLVTQSVQGLQASSQSVQYPAVSFPPQHLLPVSPTQHFPMRDDVATQFGQMTLSRQSSGETPEPPSGPVYPSSLMPQPAQQPSYVIASTGQQLPTGGFSGSGPPISQQVLQPPPSPQGFVQQPPPAQMPVYYYPSGQYPTSTTQQYRPMAPVQYNAQRSQQMPQAAQQAGYQPVLSGQQGFQGLIGVQQPPQSQNVINNQQGTPVQSVMVSYPTMSSYQVPMTQGSQGLPQQSYQQPIMLPNQAGQGSLPATGMPVYCNVTPPTPQNNLRLIGPHCPSSTVPVMSASCRTNCASMSNAGWQVKF

SEQ ID NO: 4167 - DNA, 3436 bp, Homo sapiens
tatgtgctattagatttgcaaattgctgatctcccagtgactttccctcttagatcccagttgagtatggttaccttgagaactgtggtattagccatgttagagcatgctccactggggagttctgtgcagtctatttttaatgctatttaatgaaggagcgagcgcctcactcagcaataaaagaagcatgagggaagacagagcagtgcatggttatggatactggacaaggatatttggaaaggttgacgatgtgtcacactgtgtaagggaatcgcatggagatgggcattccgaactgttaatggggacatgggactccagttgtctctgatcacttgtgtggattttcctggcgtagaacgacagaagccgctagtaagtcgccaagacctacagcaggaattctgcaccaaagggcataaaatcttgttattttaatttgcatctgggagaatgtctgagcaaggagacctgaatcaggcaatagcagaggaaggagggactgagcaggagacggccactccagagaacggcattgttaaatcagaaagtctggatgaagaggagaaactggaactgcagaggcggctggaggctcagaatcaagaaagaagaaaatccaagtcaggagcaggaaaaggtaaactgactcgcagccttgctgtctgtgaggaatcttctgccagaccaggaggtgaaagtcttcaggatcaggaatcaattcatttacagctttccagtttttccagcctgcaagaggaggataaatctaggaaagatgactctgaaagagaaaaagaaaaggataaaaacaaagataaaacctctgaaaaacccaagatcagaatgttatcaaaagattgcagccaagaatacacggattctacaggcatagacttacacgagtttctgattaacacattaaagaataattccagggacaggatgatacttttgaaaatggagcaggaaattattgatttcattgctgacaacaataatcattataaaaagttccctcagatgtcatcgtatcagaggatgcttgtccatcgagtggcagcttattttggattggatcacaatgtggatcaaacaggaaaatctgttatcatcaacaagaccagcagcaccagaataccagagcaaaggttttgtgaacatttaaaagatgaaaaaggtgaagaatcccagaagcggtttatcttgaagcgagataactctagtattgataaagaagacaatcagcaaaacagaatgcatccatttagagatgacagacgaagtaaatcaattgaagagagagaagaggaatatcagagagtgagggagagaatatttgcacacgattcagtttgctcccaggaaagcctttttgtggaaaacagtaggctcttggaagacagtaacatatgcaatgagacctataagaaaagacagctctttcggggcaacagagatggctcagggagaacatctgggagtcgacagagcagctcagaaaatgaactcaagtggtctgaccaccaaagggcctggagcagcacagactccgacagttccaaccgcaatctaaagcccgccatgaccaagacggcgagttttgggggcatcacggtgctgaccaggggtgacagcacttccagtactaggagtaccgggaagctgtccaaagcaggttccgagtcttccagcagtgcaggctcctcaggatcgctgtcccgcacccatccacctctccagagcacacccctagtctcaggtgtggcagctggctctccaggctgtgtgccttatccagagaatggaatagggggccaggttgctcccagcagcaccagctacatcctccttccacttgaagctgcaacaggcatcccgcctggaagcatccttcttaatccacacacaggccagccctttgtgaatcccgatggaactcctgcaatatacaacccacccaccagtcagcagcccctgcgaagcgccatggtggggcagtcccaacagcagccaccacagcagcagccctccccgcagccccaacagcaggtccagccaccgcagccacagatggcaggccctctggtcactcagagagatgatgtggcaacacagtttggccagatgaccctgagccggcagtcctcgggggagactcctgaacccccatcaggtcctgtctacccatcctcccttatgccacagccggcccagcagcccagctatgtaatcgcctctacaggccagcagcttcctacaggaggattctcaggctctggccctcccatctcccagcaggtcctccagccccctccctcaccacagggatttgtgcaacagcctccgcctgcacagatgcctgtatattattacccatctggtcagtaccctacctcaaccacgcaacagtaccggcccatggccccggttcagtacaacgctcagaggagtcaacagatgccacaggcagcacagcaagcaggttaccagccagtcttgtctggtcaacagggattccaaggcctaataggagtgcagcagccacctcagagtcagaacgtgataaataaccaacaaggaactccggtgcaaagcgtgatggtttcctacccaacaatgtcttcttatcaggtgccaatgacccagggttctcaaggactgccccagcagtcataccaacagccaatcatgctacctaaccaggcaggtcaagggtcactcccagccactggaatgcctgtttactgtaatgtcacaccgcccacccctcagaacaaccttaggctgattggcccacactgcccctccagcactgtcccagtgatgtcagctagctgcagaacaaactgtgcaagtatgagcaatgctggttggcaggtcaaattctgagagctctggctgtggtacatttcttcagatatttctcatggcctttgatggaagaggaacaaggtgggaaaactggctgaggacttaagtattcactcaacactcaaatgattgctgctggtattctgtaaaaaataaacaaagactaatatacacgttagctggttaatggtgcatatttctgtcatgtctgctaggtatgcctttatagcttagctagtgacatgaattcatcaaggtaagattttctcctaccactgaataccactgtgtagattataatatccctaatttggattagttttgtactttgtgttgagtttgtgatgctaaaagtatttaaaaattatatactaaatcacattgtaccaaagctgtaatggaaaagcaaagaagaattgatgaattgaaggaataatttatatacattatagagttttcttttttaatggatatatactgtattgtagtgtttaatcaaaataaaactatttgaccttatggaggaaggtcatgtttttaccaccagtttggttca

SEQ ID NO: 4168 - protein, 812 aa, Homo sapiens; identical to SEQ ID NO: 389

SEQ ID NO: 4169 - DNA, 1075 bp, Homo sapiens
agagaagaagcaggcagcttgagacaggtggagctggatcaagctgtgaacgtgatttgctggaagctggtcattagtgttgacgatgtgtcacactgtgtaagggaatcgcatggagatgggcattccgaactgttaatggggacatgggactccagttgtctctgatcacttgtgtggattttcctggcgtagaacgacagaagccgctagtaagtcgccaagacctacagcaggaattctgcaccaaagggcataaaatcttgttattttaatttgcatctgggagaatgtctgagcaaggagacctgaatcaggcaatagcagaggaaggagggactgagcaggagacggccactccagagaacggcattgttaaatcagaaagtctggatgaagaggagaaactggaactgcagaggcggctggaggctcagaatcaagaaagaagaaaatccaagtcaggagcaggaaaaggtaaactgactcgcagccttgctgtctgtgaggaatcttctgccagaccaggaggtgaaagtcttcaggatcagactctctgaaaactgcaagcctctctttggattggctgaggagtggtgggagcagggggttgatagaaaacatccagacacacatataagcaagtggccgtgctacctttttagagaataaagaaacagacttttgagtttatatgcaatgccttcattaggtaccaccggcacttacaaaatgtgcggactgaatcccagagaacactggcagatgtatacagtatatggattgtatcgcttccccaatgtttgtaaattcacagtatttggaaaactgccttcattttccagtgtgggaaaaactcttgctacctgtattacttgatctcagacccatacctgatggttcagtctgtccttaagttaaaagaattttgcttttctaatgttatactatttacctgtcagtgtattactgcaacttgaatcactcttttactgttgttggatataaacttatcctgtaccaatgtatttattaacacttgtattttattattgagcatatcaataaaaatatt

SEQ ID NO: 4170 - protein, 89 aa, Homo sapiens; identical to SEQ ID NO: 385

SEQ ID NO: 4171 - DNA, 2391 bp, Homo sapiens
agagaagaagcaggcagcttgagacaggtggagctggatcaagctgtgaacgtgatttgctggaagctggtcattagtgttgacgatgtgtcacactgtgtaagggaatcgcatggagatgggcattccgaactgttaatggggacatgggactccagttgtctctgatcacttgtgtggattttcctggcgtagaacgacagaagccgctagtaagtcgccaagacctacagcaggaattctgcaccaaagggcataaaatcttgttattttaatttgcatctgggagaatgtctgagcaaggagacctgaatcaggcaatagcagaggaaggagggactgagcaggagacggccactccagagaacggcattgttaaatcagaaagtctggatgaagaggagaaactggaactgcagaggcggctggaggctcagaatcaagaaagaagaaaatccaagtcaggagcaggaaaaggtaaactgactcgcagccttgctgtctgtgaggaatcttctgccagaccaggaggtgaaagtcttcaggatcagactctctgaaaactgcaaatggaaaggaattcaaaagaatttagattaaaagttaaataaaaagtaggcacagtagtgctgaattttcctcaaaggctctcttttgataaggctgaaccaaatataatcccaagtatcctctctccttccttgttggagatgtcttacctctcagctccccaaaatgcacttgcctataagaaacacaattgctggttcatatgaaacttaggaaatagtgaataaggtgcatttaactttggagaaatacttttatggctttggtggagatttctcaatactgcaaaagttgtccagaaatgaatctgagctgatggtgactttaagttaatattattaatatatcactgcatatttttacccttatttttgctccttacagcaagattagtaggttataaaaatttaaatttaaacaaaattatttcatgacaaaatgggaaacttcacatcatacttatttttgtttgcctttcaggcatcatattagcttttataaaaaatggtcttgctgctgaaattgtacttattttatcagaggctgggtgcagtcaagacaaaagtaaaatggtttacctgagcccaggggagggaaaattgattaagatatcattatttttgtttggtttggttttgcttttttcctcttactttaattgaaatactctgaattcccctcatggaaacagagagcattgagagcactttctttaaaaggaccaaaaataaattcctaatagattttgtcctaagagagtgtttttttttctagcatcattttctttacatgccactcatgtcataaggcatggacaggctatctttcagtggccattactatgtttcgtacacatgctttattttacttgggctctgagaaatgtgtggctttccttcagcattttatttgtgcttctctttttaatggagattgaaaagggagaataatgtgaatatcacggcttatattattaaatgttgattgatggcttgtaatgtactgcacacaatatatgttaactctgcagaatgacagaccctgggagaagtaatgccccagttgtcccccactcctaatgccaggcagagaaggacagcctttatagacttaatctgctttttgtcccatttgacaaggtaccaggaggaaattttttaagggatcaactgtatcacagtgcccactctggacctaagtctagtgtatccatacaattggtgcagagaaataaggtgtaaatggtgctttgttcctgctggttccaagctcagaaaccaagactagctttgtaggagagaatgagagcctgcaagcctctctttggattggctgaggagtggtgggagcagggggttgatagaaaacatccagacacacatataagcaagtggccgtgctacctttttagagaataaagaaacagacttttgagtttatatgcaatgccttcattaggtaccaccggcacttacaaaatgtgcggactgaatcccagagaacactggcagatgtatacagtatatggattgtatcgcttccccaatgtttgtaaattcacagtatttggaaaactgccttcattttccagtgtgggaaaaactcttgctacctgtattacttgatctcagacccatacctgatggttcagtctgtccttaagttaaaagaattttgcttttctaatgttatactatttacctgtcagtgtattactgcaacttgaatcactcttttactgttgttggatataaacttatcctgtaccaatgtatttattaacacttgtattttattattgagcatatcaataaaaatatt

SEQ ID NO: 4172 - protein, 89 aa, Homo sapiens; identical to SEQ ID NO: 385

SEQ ID NO: 4173 - DNA, 2419 bp, Homo sapiens
agagaagaagcaggcagcttgagacaggtggagctggatcaagctgtgaacgtgatttgctggaagctggtcattagtgttgacgatgtgtcacactgtgtaagggaatcgcatggagatgggcattccgaactgttaatggggacatgggactccagttgtctctgatcacttgtgtggattttcctggcgtagaacgacagaagccgctagtaagtcgccaagacctacagcaggaattctgcaccaaagggcataaaatcttgttattttaatttgcatctgggagaatgtctgagcaaggagacctgaatcaggcaatagcagaggaaggagggactgagcaggagacggccactccagagaacggcattgttaaatcagaaagtctggatgaagaggagaaactggaactgcagaggcggctggaggctcagaatcaagaaagaagaaaatccaagtcaggagcaggaaaaggtaaactgactcgcagccttgctgtctgtgaggaatcttctgccagaccaggaggtgaaagtcttcaggatcagactctctgaaaactgcaaatggaaaggaattcaaaagaatttagattaaaagttaaataaaaagtaggcacagtagtgctgaattttcctcaaaggctctcttttgataaggctgaaccaaatataatcccaagtatcctctctccttccttgttggagatgtcttacctctcagctccccaaaatgcacttgcctataagaaacacaattgctggttcatatgaaacttaggaaatagtgaataaggtgcatttaactttggagaaatacttttatggctttggtggagatttctcaatactgcaaaagttgtccagaaatgaatctgagctgatggtgactttaagttaatattattaatatatcactgcatatttttacccttatttttgctccttacagcaagattagtaggttataaaaatttaaatttaaacaaaattatttcatgacaaaatgggaaacttcacatcatacttatttttgtttgcctttcaggcatcatattagcttttataaaaaatggtcttgctgctgaaattgtacttattttatcagaggctgggtgcagtcaagacaaaagtaaaatggtttacctgagcccaggggagggaaaattgattaagatatcattatttttgtttggtttggttttgcttttttcctcttactttaattgaaatactctgaattcccctcatggaaacagagagcattgagagcactttctttaaaaggaccaaaaataaattcctaatagattttgtcctaagagagtgtttttttttctagcatcattttctttacatgccactcatgtcataaggcatggacaggctatctttcagtggccattactatgtttcgtacacatgctttattttacttgggctctgagaaatgtgtggctttccttcagcattttatttgtgcttctctttttaatggagattgaaaagggagaataatgtgaatatcacggcttatattattaaatgttgattgatggcttgtaatgtactgcacacaatatatgttaactctgcagaatgacagaccctgggagaagtaatgccccagttgtcccccactcctaatgccaggcagagaaggacagcctttatagacttaatctgctttttgtcccatttgacaaggtaccaggaggaaattttttaagggatcaactgtatcacagtgcccactctggacctaagtctagtgtatccatacaattggtgcagagaaataaggtgtaaatggtgctttgttcctgctggttccaagctcagaaaccaagactagctttgtaggagagaatgagagcctgcaagcctctctttggattggctgaggagtggtgggagcagggggttgatagaaaacatccagacacacatataagcaagtggccgtgctacctttttagagaataaagaaacagacttttgagtttatatgcaatgccttcattaggtaccaccggcacttacaaaatgtgcggactgaatcccagagaacactggcagatgtatacagtatatggattgtatcgcttccccaatgtttgtaaattcacagtatttggaaaactgccttcattttccagtgtgggaaaaactcttgctacctgtattacttgatctcagacccatacctgatggttcagtctgtccttaagttaaaagaattttgcttttctaatgttatactatttacctgtcagtgtattactgcaacttgaatcactcttttactgttgttggatataaacttatcctgtaccaatgtatttattaacacttgtattttattattgagcatatcaataaaaatattaaaaaataacagattgttttttaccaac

SEQ ID NO: 4174 - protein, 89 aa, Homo sapiens; identical to SEQ ID NO: 385

SEQ ID NO: 4175 - DNA, 3352 bp, Homo sapiens
agagaagaagcaggcagcttgagacaggtggagctggatcaagctgtgaacgtgatttgctggaagctggtcattagtgttagaaaccccgtcttatttatttcatccttcaccctaccatgattattgcaattattattatttatttttcatcttttttcaggttgacgatgtgtcacactgtgtaagggaatcgcatggagatgggcattccgaactgttaatggggacatgggactccagttgtctctgatcacttgtgtggattttcctggcgtagaacgacagaagccgctagtaagtcgccaagacctacagcaggaattctgcaccaaagggcataaaatcttgttattttaatttgcatctgggagaatgtctgagcaaggagacctgaatcaggcaatagcagaggaaggagggactgagcaggagacggccactccagagaacggcattgttaaatcagaaagtctggatgaagaggagaaactggaactgcagaggcggctggaggctcagaatcaagaaagaagaaaatccaagtcaggagcaggaaaaggtaaactgactcgcagccttgctgtctgtgaggaatcttctgccagaccaggaggtgaaagtcttcaggatcaggaatcaattcatttacagctttccagtttttccagcctgcaagaggaggataaatctaggaaagatgactctgaaagagaaaaagaaaaggataaaaacaaagataaaacctctgaaaaacccaagatcagaatgttatcaaaagattgcagccaagaatacacggattctacaggcatagacttacacgagtttctgattaacacattaaagaataattccagggacaggatgatacttttgaaaatggagcaggaaattattgatttcattgctgacaacaataatcattataaaaagttccctcagatgtcatcgtatcagaggatgcttgtccatcgagtggcagcttattttggattggatcacaatgtggatcaaacaggaaaatctgttatcatcaacaagaccagcagcaccagaataccagagcaaaggttttgtgaacatttaaaagatgaaaaaggtgaagaatcccagaagcggtttatcttgaagcgagataactctagtattgataaagaagacaatcagcaaaacagaatgcatccatttagagatgacagacgaagtaaatcaattgaagagagagaagaggaatatcagagagtgagggagagaatatttgcacacgattcagtttgctcccaggaaagcctttttgtggaaaacagtaggctcttggaagacagtaacatatgcaatgagacctataagaaaagacagctctttcggggcaacagagatggctcagggagaacatctgggagtcgacagagcagctcagaaaatgaactcaagtggtctgaccaccaaagggcctggagcagcacagactccgacagttccaaccgcaatctaaagcccgccatgaccaagacggcgagttttgggggcatcacggtgctgaccaggggtgacagcacttccagtactaggagtaccgggaagctgtccaaagcaggttccgagtcttccagcagtgcaggctcctcaggatcgctgtcccgcacccatccacctctccagagcacacccctagtctcaggtgtggcagctggctctccaggctgtgtgccttatccagagaatggaatagggggccaggttgctcccagcagcaccagctacatcctccttccacttgaagctgcaacaggcatcccgcctggaagcatccttcttaatccacacacaggccagccctttgtgaatcccgatggaactcctgcaatatacaacccacccaccagtcagcagcccctgcgaagcgccatggtggggcagtcccaacagcagccaccacagcagcagccctccccgcagccccaacagcaggtccagccaccgcagccacagatggcaggccctctggtcactcagagagatgatgtggcaacacagtttggccagatgaccctgagccggcagtcctcgggggagactcctgaacccccatcaggtcctgtctacccatcctcccttatgccacagccggcccagcagcccagctatgtaatcgcctctacaggccagcagcttcctacaggaggattctcaggctctggccctcccatctcccagcaggtcctccagccccctccctcaccacagggatttgtgcaacagcctccgcctgcacagatgcctgtatattattacccatctggtcagtaccctacctcaaccacgcaacagtaccggcccatggccccggttcagtacaacgctcagaggagtcaacagatgccacaggcagcacagcaagcaggttaccagccagtcttgtctggtcaacagggattccaaggcctaataggagtgcagcagccacctcagagtcagaacgtgataaataaccaacaaggaactccggtgcaaagcgtgatggtttcctacccaacaatgtcttcttatcaggtgccaatgacccagggttctcaaggactgccccagcagtcataccaacagccaatcatgctacctaaccaggcaggtcaagggtcactcccagccactggaatgcctgtttactgtaatgtcacaccgcccacccctcagaacaaccttaggctgattggcccacactgcccctccagcactgtcccagtgatgtcagctagctgcagaacaaactgtgcaagtatgagcaatgctggttggcaggtcaaattctgagagctctggctgtggtacatttcttcagatatttctcatggcctttgatggaagaggaacaaggtgggaaaactggctgaggacttaagtattcactcaacactcaaatgattgctgctggtattctgtaaaaaataaacaaagactaatatacacgttagctggttaatggtgcatatttctgtcatgtctgctaggtatgcctttatagcttagctagtgacatgaattcatcaaggtaagattttctcctaccactgaataccactgtgtagattataatatccctaatttggattagttttgtactttgtgttgagtttgtgatgctaaaagtatttaaaaattatatactaaatcacattgtaccaaagctgtaatggaaaagcaaagaagaattgatgaattgaaggaataatttatatacattatagagttttcttttttaatggatatatactgtattgtagtgtttaatcaaaataaaactatttgaccttatggaggaaggtcatgtttttaccaccagtttggttca

SEQ ID NO: 4176 - protein, 812 aa, Homo sapiens; identical to SEQ ID NO: 389

SEQ ID NO: 4177 - DNA, 2373 bp, Homo sapiens
aacagattttaactctgaaaagccatttccagtgtctatagactattgtgagcctggagaagtagcatttagttgggatagcttcactagagctgcctgccaaagacttccttccacaggatcttgtcgcaccagcaactgacaggagcttgggagctcgggagcttgggagagggcttatgtttttaataatgtagctgtcagttcgaagcctggaaatgttgaccctcaaagggcataaaatcttgttattttaatttgcatctgggagaatgtctgagcaaggagacctgaatcaggcaatagcagaggaaggagggactgagcaggagacggccactccagagaacggcattgttaaatcagaaagtctggatgaagaggagaaactggaactgcagaggcggctggaggctcagaatcaagaaagaagaaaatccaagtcaggagcaggaaaaggtaaactgactcgcagccttgctgtctgtgaggaatcttctgccagaccaggaggtgaaagtcttcaggatcagactctctgaaaactgcaaatggaaaggaattcaaaagaatttagattaaaagttaaataaaaagtaggcacagtagtgctgaattttcctcaaaggctctcttttgataaggctgaaccaaatataatcccaagtatcctctctccttccttgttggagatgtcttacctctcagctccccaaaatgcacttgcctataagaaacacaattgctggttcatatgaaacttaggaaatagtgaataaggtgcatttaactttggagaaatacttttatggctttggtggagatttctcaatactgcaaaagttgtccagaaatgaatctgagctgatggtgactttaagttaatattattaatatatcactgcatatttttacccttatttttgctccttacagcaagattagtaggttataaaaatttaaatttaaacaaaattatttcatgacaaaatgggaaacttcacatcatacttatttttgtttgcctttcaggcatcatattagcttttataaaaaatggtcttgctgctgaaattgtacttattttatcagaggctgggtgcagtcaagacaaaagtaaaatggtttacctgagcccaggggagggaaaattgattaagatatcattatttttgtttggtttggttttgcttttttcctcttactttaattgaaatactctgaattcccctcatggaaacagagagcattgagagcactttctttaaaaggaccaaaaataaattcctaatagattttgtcctaagagagtgtttttttttctagcatcattttctttacatgccactcatgtcataaggcatggacaggctatctttcagtggccattactatgtttcgtacacatgctttattttacttgggctctgagaaatgtgtggctttccttcagcattttatttgtgcttctctttttaatggagattgaaaagggagaataatgtgaatatcacggcttatattattaaatgttgattgatggcttgtaatgtactgcacacaatatatgttaactctgcagaatgacagaccctgggagaagtaatgccccagttgtcccccactcctaatgccaggcagagaaggacagcctttatagacttaatctgctttttgtcccatttgacaaggtaccaggaggaaattttttaagggatcaactgtatcacagtgcccactctggacctaagtctagtgtatccatacaattggtgcagagaaataaggtgtaaatggtgctttgttcctgctggttccaagctcagaaaccaagactagctttgtaggagagaatgagagcctgcaagcctctctttggattggctgaggagtggtgggagcagggggttgatagaaaacatccagacacacatataagcaagtggccgtgctacctttttagagaataaagaaacagacttttgagtttatatgcaatgccttcattaggtaccaccggcacttacaaaatgtgcggactgaatcccagagaacactggcagatgtatacagtatatggattgtatcgcttccccaatgtttgtaaattcacagtatttggaaaactgccttcattttccagtgtgggaaaaactcttgctacctgtattacttgatctcagacccatacctgatggttcagtctgtccttaagttaaaagaattttgcttttctaatgttatactatttacctgtcagtgtattactgcaacttgaatcactcttttactgttgttggatataaacttatcctgtaccaatgtatttattaacacttgtattttattattgagcatatcaataaaaatatt

SEQ ID NO: 4178 - protein, 89 aa, Homo sapiens; identical to SEQ ID NO: 385

SEQ ID NO: 4179 - DNA, 2401 bp, Homo sapiens
aacagattttaactctgaaaagccatttccagtgtctatagactattgtgagcctggagaagtagcatttagttgggatagcttcactagagctgcctgccaaagacttccttccacaggatcttgtcgcaccagcaactgacaggagcttgggagctcgggagcttgggagagggcttatgtttttaataatgtagctgtcagttcgaagcctggaaatgttgaccctcaaagggcataaaatcttgttattttaatttgcatctgggagaatgtctgagcaaggagacctgaatcaggcaatagcagaggaaggagggactgagcaggagacggccactccagagaacggcattgttaaatcagaaagtctggatgaagaggagaaactggaactgcagaggcggctggaggctcagaatcaagaaagaagaaaatccaagtcaggagcaggaaaaggtaaactgactcgcagccttgctgtctgtgaggaatcttctgccagaccaggaggtgaaagtcttcaggatcagactctctgaaaactgcaaatggaaaggaattcaaaagaatttagattaaaagttaaataaaaagtaggcacagtagtgctgaattttcctcaaaggctctcttttgataaggctgaaccaaatataatcccaagtatcctctctccttccttgttggagatgtcttacctctcagctccccaaaatgcacttgcctataagaaacacaattgctggttcatatgaaacttaggaaatagtgaataaggtgcatttaactttggagaaatacttttatggctttggtggagatttctcaatactgcaaaagttgtccagaaatgaatctgagctgatggtgactttaagttaatattattaatatatcactgcatatttttacccttatttttgctccttacagcaagattagtaggttataaaaatttaaatttaaacaaaattatttcatgacaaaatgggaaacttcacatcatacttatttttgtttgcctttcaggcatcatattagcttttataaaaaatggtcttgctgctgaaattgtacttattttatcagaggctgggtgcagtcaagacaaaagtaaaatggtttacctgagcccaggggagggaaaattgattaagatatcattatttttgtttggtttggttttgcttttttcctcttactttaattgaaatactctgaattcccctcatggaaacagagagcattgagagcactttctttaaaaggaccaaaaataaattcctaatagattttgtcctaagagagtgtttttttttctagcatcattttctttacatgccactcatgtcataaggcatggacaggctatctttcagtggccattactatgtttcgtacacatgctttattttacttgggctctgagaaatgtgtggctttccttcagcattttatttgtgcttctctttttaatggagattgaaaagggagaataatgtgaatatcacggcttatattattaaatgttgattgatggcttgtaatgtactgcacacaatatatgttaactctgcagaatgacagaccctgggagaagtaatgccccagttgtcccccactcctaatgccaggcagagaaggacagcctttatagacttaatctgctttttgtcccatttgacaaggtaccaggaggaaattttttaagggatcaactgtatcacagtgcccactctggacctaagtctagtgtatccatacaattggtgcagagaaataaggtgtaaatggtgctttgttcctgctggttccaagctcagaaaccaagactagctttgtaggagagaatgagagcctgcaagcctctctttggattggctgaggagtggtgggagcagggggttgatagaaaacatccagacacacatataagcaagtggccgtgctacctttttagagaataaagaaacagacttttgagtttatatgcaatgccttcattaggtaccaccggcacttacaaaatgtgcggactgaatcccagagaacactggcagatgtatacagtatatggattgtatcgcttccccaatgtttgtaaattcacagtatttggaaaactgccttcattttccagtgtgggaaaaactcttgctacctgtattacttgatctcagacccatacctgatggttcagtctgtccttaagttaaaagaattttgcttttctaatgttatactatttacctgtcagtgtattactgcaacttgaatcactcttttactgttgttggatataaacttatcctgtaccaatgtatttattaacacttgtattttattattgagcatatcaataaaaatattaaaaaataacagattgttttttaccaac

SEQ ID NO: 4180 - protein, 89 aa, Homo sapiens; identical to SEQ ID NO: 385

SEQ ID NO: 4181 - DNA, 2921 bp, Homo sapiens
catttccagtgtctatagactattgtgagcctggagaagtagcatttagttgggatagcttcactagagctgcctgccaaagacttccttccacaggatcttgtcgcaccagcaactgacaggagcttgggagctcgggagcttgggagagggcttatgtttttaataatgtagctgtcagttcgaagcctggaaatgttgaccctcaaaggtttattgccaaaattagataccatatttatgctgaattattaccttttcaatagttttttttgaccttgcagactactgtattctttatacctagggaagcatgtctatgtttggaacctgcaaataatttttcagtcatcttagagatgctgcagaacatcaatgccacatcttgagtcagaagtcgagggtcatttgttcaaaagttggagaaatatcctcttttgttgcttcttctactctgtagtggagaatggggaactggtagttgtgtgggagttatgtgtctctaagatttgtcgacccattttgatggcaaggtgtattcacaagtgtgtgtaaagggggtgtggatgggacaactgcatctgcctcttgtgcatgccttgggtacttgatttcatcttgttttttcccccttttgtataaaattctcaaaattgctcatttggatttgaatatgaaaggagaaatgaaatctctaaagaatgatagtaaataccttgcactgactttattttctgatatcttaaccttctagggcataaaatcttgttattttaatttgcatctgggagaatgtctgagcaaggagacctgaatcaggcaatagcagaggaaggagggactgagcaggagacggccactccagagaacggcattgttaaatcagaaagtctggatgaagaggagaaactggaactgcagaggcggctggaggctcagaatcaagaaagaagaaaatccaagtcaggagcaggaaaaggtaaactgactcgcagccttgctgtctgtgaggaatcttctgccagaccaggaggtgaaagtcttcaggatcagactctctgaaaactgcaaatggaaaggaattcaaaagaatttagattaaaagttaaataaaaagtaggcacagtagtgctgaattttcctcaaaggctctcttttgataaggctgaaccaaatataatcccaagtatcctctctccttccttgttggagatgtcttacctctcagctccccaaaatgcacttgcctataagaaacacaattgctggttcatatgaaacttaggaaatagtgaataaggtgcatttaactttggagaaatacttttatggctttggtggagatttctcaatactgcaaaagttgtccagaaatgaatctgagctgatggtgactttaagttaatattattaatatatcactgcatatttttacccttatttttgctccttacagcaagattagtaggttataaaaatttaaatttaaacaaaattatttcatgacaaaatgggaaacttcacatcatacttatttttgtttgcctttcaggcatcatattagcttttataaaaaatggtcttgctgctgaaattgtacttattttatcagaggctgggtgcagtcaagacaaaagtaaaatggtttacctgagcccaggggagggaaaattgattaagatatcattatttttgtttggtttggttttgcttttttcctcttactttaattgaaatactctgaattcccctcatggaaacagagagcattgagagcactttctttaaaaggaccaaaaataaattcctaatagattttgtcctaagagagtgtttttttttctagcatcattttctttacatgccactcatgtcataaggcatggacaggctatctttcagtggccattactatgtttcgtacacatgctttattttacttgggctctgagaaatgtgtggctttccttcagcattttatttgtgcttctctttttaatggagattgaaaagggagaataatgtgaatatcacggcttatattattaaatgttgattgatggcttgtaatgtactgcacacaatatatgttaactctgcagaatgacagaccctgggagaagtaatgccccagttgtcccccactcctaatgccaggcagagaaggacagcctttatagacttaatctgctttttgtcccatttgacaaggtaccaggaggaaattttttaagggatcaactgtatcacagtgcccactctggacctaagtctagtgtatccatacaattggtgcagagaaataaggtgtaaatggtgctttgttcctgctggttccaagctcagaaaccaagactagctttgtaggagagaatgagagcctgcaagcctctctttggattggctgaggagtggtgggagcagggggttgatagaaaacatccagacacacatataagcaagtggccgtgctacctttttagagaataaagaaacagacttttgagtttatatgcaatgccttcattaggtaccaccggcacttacaaaatgtgcggactgaatcccagagaacactggcagatgtatacagtatatggattgtatcgcttccccaatgtttgtaaattcacagtatttggaaaactgccttcattttccagtgtgggaaaaactcttgctacctgtattacttgatctcagacccatacctgatggttcagtctgtccttaagttaaaagaattttgcttttctaatgttatactatttacctgtcagtgtattactgcaacttgaatcactcttttactgttgttggatataaacttatcctgtaccaatgtatttattaacacttgtattttattattgagcatatcaataaaaatattaaaaaataacagattgttttttaccaac

SEQ ID NO: 4182 - protein, 89 aa, Homo sapiens; identical to SEQ ID NO: 385

SEQ ID NO: 4183 - DNA, 3126 bp, Homo sapiens
catttccagtgtctatagactattgtgagcctggagaagtagcatttagttgggatagcttcactagagctgcctgccaaagacttccttccacaggatcttgtcgcaccagcaactgacaggagcttgggagctcgggagcttgggagagggcttatgtttttaataatgtagctgtcagttcgaagcctggaaatgttgaccctcaaaggtttattgccaaaattagataccatatttatgctgaattattaccttttcaatagttttttttgaccttgcagactactgtattctttatacctagggaagcatgtctatgtttggaacctgcaaataatttttcagtcatcttagagatgctgcagaacatcaatgccacatcttgagtcagaagtcgagggtcatttgttcaaaagttggagaaatatcctcttttgttgcttcttctactctgtagtggagaatggggaactggtagttgtgtgggagttatgtgtctctaagatttgtcgacccattttgatggcaaggtgtattcacaagtgtgtgtaaagggggtgtggatgggacaactgcatctgcctcttgtgcatgccttgggtacttgatttcatcttgttttttcccccttttgtataaaattctcaaaattgctcatttggatttgaatatgaaaggagaaatgaaatctctaaagaatgatagtaaataccttgcactgactttattttctgatatcttaaccttctagggcataaaatcttgttattttaatttgcatctgggagaatgtctgagcaaggagacctgaatcaggcaatagcagaggaaggagggactgagcaggagacggccactccagagaacggcattgttaaatcagaaagtctggatgaagaggagaaactggaactgcagaggcggctggaggctcagaatcaagaaagaagaaaatccaagtcaggagcaggaaaaggtaaactgactcgcagccttgctgtctgtgaggaatcttctgccagaccaggaggtgaaagtcttcaggatcaggtatatccccttgccattatcattaattgcatgaatgggatccacctttgtgtgcatgactcttaatttggtgttaaacagtgttttgggggagaaaaatataattgaagaaaataattcattttttggctttatcccctgcttatgcaacattctaaaatagtttaatggtttgtcacagagtattaaatttgtttttttccagactctctgaaaactgcaaatggaaaggaattcaaaagaatttagattaaaagttaaataaaaagtaggcacagtagtgctgaattttcctcaaaggctctcttttgataaggctgaaccaaatataatcccaagtatcctctctccttccttgttggagatgtcttacctctcagctccccaaaatgcacttgcctataagaaacacaattgctggttcatatgaaacttaggaaatagtgaataaggtgcatttaactttggagaaatacttttatggctttggtggagatttctcaatactgcaaaagttgtccagaaatgaatctgagctgatggtgactttaagttaatattattaatatatcactgcatatttttacccttatttttgctccttacagcaagattagtaggttataaaaatttaaatttaaacaaaattatttcatgacaaaatgggaaacttcacatcatacttatttttgtttgcctttcaggcatcatattagcttttataaaaaatggtcttgctgctgaaattgtacttattttatcagaggctgggtgcagtcaagacaaaagtaaaatggtttacctgagcccaggggagggaaaattgattaagatatcattatttttgtttggtttggttttgcttttttcctcttactttaattgaaatactctgaattcccctcatggaaacagagagcattgagagcactttctttaaaaggaccaaaaataaattcctaatagattttgtcctaagagagtgtttttttttctagcatcattttctttacatgccactcatgtcataaggcatggacaggctatctttcagtggccattactatgtttcgtacacatgctttattttacttgggctctgagaaatgtgtggctttccttcagcattttatttgtgcttctctttttaatggagattgaaaagggagaataatgtgaatatcacggcttatattattaaatgttgattgatggcttgtaatgtactgcacacaatatatgttaactctgcagaatgacagaccctgggagaagtaatgccccagttgtcccccactcctaatgccaggcagagaaggacagcctttatagacttaatctgctttttgtcccatttgacaaggtaccaggaggaaattttttaagggatcaactgtatcacagtgcccactctggacctaagtctagtgtatccatacaattggtgcagagaaataaggtgtaaatggtgctttgttcctgctggttccaagctcagaaaccaagactagctttgtaggagagaatgagagcctgcaagcctctctttggattggctgaggagtggtgggagcagggggttgatagaaaacatccagacacacatataagcaagtggccgtgctacctttttagagaataaagaaacagacttttgagtttatatgcaatgccttcattaggtaccaccggcacttacaaaatgtgcggactgaatcccagagaacactggcagatgtatacagtatatggattgtatcgcttccccaatgtttgtaaattcacagtatttggaaaactgccttcattttccagtgtgggaaaaactcttgctacctgtattacttgatctcagacccatacctgatggttcagtctgtccttaagttaaaagaattttgcttttctaatgttatactatttacctgtcagtgtattactgcaacttgaatcactcttttactgttgttggatataaacttatcctgtaccaatgtatttattaacacttgtattttattattgagcatatcaataaaaatattaaaaaataacagattgttttttaccaac

SEQ ID NO: 4184 - protein, 108 aa, Homo sapiens
MSEQGDLNQAIAEEGGTEQETATPENGIVKSESLDEEEKLELQRRLEAQNQERRKSKSGAGKGKLTRSLAVCEESSARPGGESLQDQVYPLAIIINCMNGIHLCVHDS

SEQ ID NO: 4185 - DNA, 2178 bp, Homo sapiens
ggatgggacaactgcatctgcctcttgtgcatgccttggggcataaaatcttgttattttaatttgcatctgggagaatgtctgagcaaggagacctgaatcaggcaatagcagaggaaggagggactgagcaggagacggccactccagagaacggcattgttaaatcagaaagtctggatgaagaggagaaactggaactgcagaggcggctggaggctcagaatcaagaaagaagaaaatccaagtcaggagcaggaaaaggtaaactgactcgcagccttgctgtctgtgaggaatcttctgccagaccaggaggtgaaagtcttcaggatcagactctctgaaaactgcaaatggaaaggaattcaaaagaatttagattaaaagttaaataaaaagtaggcacagtagtgctgaattttcctcaaaggctctcttttgataaggctgaaccaaatataatcccaagtatcctctctccttccttgttggagatgtcttacctctcagctccccaaaatgcacttgcctataagaaacacaattgctggttcatatgaaacttaggaaatagtgaataaggtgcatttaactttggagaaatacttttatggctttggtggagatttctcaatactgcaaaagttgtccagaaatgaatctgagctgatggtgactttaagttaatattattaatatatcactgcatatttttacccttatttttgctccttacagcaagattagtaggttataaaaatttaaatttaaacaaaattatttcatgacaaaatgggaaacttcacatcatacttatttttgtttgcctttcaggcatcatattagcttttataaaaaatggtcttgctgctgaaattgtacttattttatcagaggctgggtgcagtcaagacaaaagtaaaatggtttacctgagcccaggggagggaaaattgattaagatatcattatttttgtttggtttggttttgcttttttcctcttactttaattgaaatactctgaattcccctcatggaaacagagagcattgagagcactttctttaaaaggaccaaaaataaattcctaatagattttgtcctaagagagtgtttttttttctagcatcattttctttacatgccactcatgtcataaggcatggacaggctatctttcagtggccattactatgtttcgtacacatgctttattttacttgggctctgagaaatgtgtggctttccttcagcattttatttgtgcttctctttttaatggagattgaaaagggagaataatgtgaatatcacggcttatattattaaatgttgattgatggcttgtaatgtactgcacacaatatatgttaactctgcagaatgacagaccctgggagaagtaatgccccagttgtcccccactcctaatgccaggcagagaaggacagcctttatagacttaatctgctttttgtcccatttgacaaggtaccaggaggaaattttttaagggatcaactgtatcacagtgcccactctggacctaagtctagtgtatccatacaattggtgcagagaaataaggtgtaaatggtgctttgttcctgctggttccaagctcagaaaccaagactagctttgtaggagagaatgagagcctgcaagcctctctttggattggctgaggagtggtgggagcagggggttgatagaaaacatccagacacacatataagcaagtggccgtgctacctttttagagaataaagaaacagacttttgagtttatatgcaatgccttcattaggtaccaccggcacttacaaaatgtgcggactgaatcccagagaacactggcagatgtatacagtatatggattgtatcgcttccccaatgtttgtaaattcacagtatttggaaaactgccttcattttccagtgtgggaaaaactcttgctacctgtattacttgatctcagacccatacctgatggttcagtctgtccttaagttaaaagaattttgcttttctaatgttatactatttacctgtcagtgtattactgcaacttgaatcactcttttactgttgttggatataaacttatcctgtaccaatgtatttattaacacttgtattttattattgagcatatcaataaaaatatt

SEQ ID NO: 4186 - protein, 89 aa, Homo sapiens; identical to SEQ ID NO: 385

SEQ ID NO: 4187 - DNA, 2206 bp, Homo sapiens
ggatgggacaactgcatctgcctcttgtgcatgccttggggcataaaatcttgttattttaatttgcatctgggagaatgtctgagcaaggagacctgaatcaggcaatagcagaggaaggagggactgagcaggagacggccactccagagaacggcattgttaaatcagaaagtctggatgaagaggagaaactggaactgcagaggcggctggaggctcagaatcaagaaagaagaaaatccaagtcaggagcaggaaaaggtaaactgactcgcagccttgctgtctgtgaggaatcttctgccagaccaggaggtgaaagtcttcaggatcagactctctgaaaactgcaaatggaaaggaattcaaaagaatttagattaaaagttaaataaaaagtaggcacagtagtgctgaattttcctcaaaggctctcttttgataaggctgaaccaaatataatcccaagtatcctctctccttccttgttggagatgtcttacctctcagctccccaaaatgcacttgcctataagaaacacaattgctggttcatatgaaacttaggaaatagtgaataaggtgcatttaactttggagaaatacttttatggctttggtggagatttctcaatactgcaaaagttgtccagaaatgaatctgagctgatggtgactttaagttaatattattaatatatcactgcatatttttacccttatttttgctccttacagcaagattagtaggttataaaaatttaaatttaaacaaaattatttcatgacaaaatgggaaacttcacatcatacttatttttgtttgcctttcaggcatcatattagcttttataaaaaatggtcttgctgctgaaattgtacttattttatcagaggctgggtgcagtcaagacaaaagtaaaatggtttacctgagcccaggggagggaaaattgattaagatatcattatttttgtttggtttggttttgcttttttcctcttactttaattgaaatactctgaattcccctcatggaaacagagagcattgagagcactttctttaaaaggaccaaaaataaattcctaatagattttgtcctaagagagtgtttttttttctagcatcattttctttacatgccactcatgtcataaggcatggacaggctatctttcagtggccattactatgtttcgtacacatgctttattttacttgggctctgagaaatgtgtggctttccttcagcattttatttgtgcttctctttttaatggagattgaaaagggagaataatgtgaatatcacggcttatattattaaatgttgattgatggcttgtaatgtactgcacacaatatatgttaactctgcagaatgacagaccctgggagaagtaatgccccagttgtcccccactcctaatgccaggcagagaaggacagcctttatagacttaatctgctttttgtcccatttgacaaggtaccaggaggaaattttttaagggatcaactgtatcacagtgcccactctggacctaagtctagtgtatccatacaattggtgcagagaaataaggtgtaaatggtgctttgttcctgctggttccaagctcagaaaccaagactagctttgtaggagagaatgagagcctgcaagcctctctttggattggctgaggagtggtgggagcagggggttgatagaaaacatccagacacacatataagcaagtggccgtgctacctttttagagaataaagaaacagacttttgagtttatatgcaatgccttcattaggtaccaccggcacttacaaaatgtgcggactgaatcccagagaacactggcagatgtatacagtatatggattgtatcgcttccccaatgtttgtaaattcacagtatttggaaaactgccttcattttccagtgtgggaaaaactcttgctacctgtattacttgatctcagacccatacctgatggttcagtctgtccttaagttaaaagaattttgcttttctaatgttatactatttacctgtcagtgtattactgcaacttgaatcactcttttactgttgttggatataaacttatcctgtaccaatgtatttattaacacttgtattttattattgagcatatcaataaaaatattaaaaaataacagattgttttttaccaac

SEQ ID NO: 4188 - protein, 89 aa, Homo sapiens; identical to SEQ ID NO: 385

SEQ ID NO: 4189 - DNA, 465 bp, Homo sapiens
accagagcaaaggttttgtgaacatttaaaagatgaaaaaggtgaagaatcccagaagcggtttatcttgaagcgagataactctagtattgataaagaagacaatcagtcagtttgctcccaggaaagcctttttgtggaaaacaggtaaaataaaatttacttttccatgtctttagaggaacaacgtctgtcatgtgtgtcttgtgtattcataaatatatatcccatatatgtgtgtgcttgaatatatgtattagcagatacatatatctatgcgtacacacatatatgttatttaacacatctacaaatgatctaatttggaaaaaaaattttctttcagttaattccaaacagaattgtaaaactttttcttatttaaagtctcaatttctggtccttgcaaaggtatacttcctattaccttcaccaggcattaagaataataaatatggagacatc

SEQ ID NO: 4190 - protein, 89 aa, Homo sapiens
MCVLCIHKYISHICVCLNICISRYIYLCVHTYMLFNTSTNDLIWKKNFLSVNSKQNCKTFSYLKSQFLVLAKVYFLLPSPGIKNNKYGD

SEQ ID NO: 4191 - DNA, 1451 bp, Homo sapiens
gcttcctcccagtcagtgcaatatccagcagtctcttttcctccccagcacctcctacctgtgtctccaacgcagcactttcccatggtcctccagccccctccctcaccacagggatttgtgcaacagcctccgcctgcacagatgcctgtatattattacccatctggtcagtaccctacctcaaccacgcaacagtaccggcccatggccccggttcagtacaacgctcagaggagtcaacagatgccacaggcagcacagcaagcagttgcagtgacaggtggatttctacagactgaatctgtggccatagtacttatttcaagataattggccaaggctaggttacatcctgtagccatgcaacagtgacagtaatttgatcacaataatgctgaccccatgacttttgacttcataattatcttgctgtagtcagctggccaacagcacttcatcaatgaaaatatccaccaggaggaatattatcatggggacagttattagagccacctccattttgactttgccccaagcttggtctggggaaaaagcttcttaaagttgcctcagcagtagtttgctgcctcccagcctggttttaagtatatccataattaacacgacgggtagaggtgcaagaatgccacattttcttctaagccatgcaacctcattaagaaagtaaaacgtttgtgagtctttcatgcggtctttctccctctgggttgttgaagctctctggatgtcagcacagcactatgggccaggaaagttcagagaattacttcaataatatgacagcctcttccatttaaaatggaattcaatgctggcttcccttggaggcattcattgaaattccgtgcatgatccattcctctagtcatttaacaatgtgtctcatgtttgccctgatttaaagaaagaaagaaagaaagaaagaaagaaaaccagctttgtatttgtgataacatggatcaggatagtataattgcagtgaagaggcccctgagcctgcagtaataggatggttcatctgatgtgtactgccattagaaaatgacccatgcatgaatgttctcaggggacagtaaagaggcttttaagaattacattctgtgtagtatgaaagctaatgagcaaaagaggaagtacgaagaaaaactactgcttcaggaagcatggttccacttaggtagggcctgtcacagctcccctcaaattcatttggatagacaggccattactaggatgactactatattacccccatgcccatgcacactccctgcaggtcatcctgtaccaagttcctaaggaattaaaaccagcgagtaataaatggtgaggaaaagaaagaggatggatacagcaactgccaataaataagttaaaaaaagacatttacgtcaaagatgaaagaagtcgtaatgaacttcaacagc

SEQ ID NO: 4192 - protein, 82 aa, Homo sapiens
MVLQPPPSPQGFVQQPPPAQMPVYYYPSGQYPTSTTQQYRPMAPVQYNAQRSQQMPQAAQQAVAVTGGFLQTESVAIVLISR

SEQ ID NO: 4193 - DNA, 1167 bp, Homo sapiens
gtatgtggctaggtacagttaactagaaaagggcctcaatacttttatcaaatctttgatgtgatccatatttctttataaatattaaatgtcagtgtccttgatcaataatttttcttagtagtgccctgttcttcccatttcaaagatgagtgagaaaactaagcagcagttcctaaactgaggactgaaggtttctgggagtttctgctgttaaagatagttaccagccagtcttgtctggtcaacagggattccaaggcctaataggagtgcagcagccacctcagagtcagaacgtgataaataaccaacaaggaactccggtgcaaagcgtgatggtttcctacccaacaatgtcttcttatcaggtgccaatgacccagggttctcaaggactgccccagcagtcataccaacagccaatcatgctacctaaccaggcaggtcaagggtcactcccagccactggaatgcctgtttactgtaatgtcacaccgcccacccctcagaacaaccttaggctgattggcccacactgcccctccagcactgtcccagtgatgtcagctagctgcagaacaaactgtgcaagtatgagcaatgctggttggcaggtcaaattctgagagctctggctgtggtacatttcttcagatatttctcatggcctttgatggaagaggaacaaggtgggaaaactggctgaggacttaagtattcactcaacactcaaatgattgctgctggtattctgtaaaaaataaacaaagactaatatacacgttagctggttaatggtgcatatttctgtcatgtctgctaggtatgcctttatagcttagctagtgacatgaattcatcaaggtaagattttctcctaccactgaataccactgtgtagattataatatccctaatttggattagttttgtactttgtgttgagtttgtgatgctaaaagtatttaaaaattatatactaaatcacattgtaccaaagctgtaatggaaaagcaaagaagaattgatgaattgaaggaataatttatatacattatagagttttcttttttaatggatatatactgtattgtagtgtttaatcaaaataaaactatttgaccttatggaggaaggtcatgtttttaccaccagtttggttca

SEQ ID NO: 4194 - protein, 96 aa, Homo sapiens
MVSYPTMSSYQVPMTQGSQGLPQQSYQQPIMLPNQAGQGSLPATGMPVYCNVTPPTPQNNLRLIGPHCPSSTVPVMSASCRTNCASMSNAGWQVKF

SEQ ID NO: 4195 - DNA, 1103 bp, Homo sapiens
aattattataaaatctgatttaagtgttgaccatagcctccagttccagccagctgaaaagataagcacatttgtatttgtgtggacaagtctgcagacttcttattgttgtctcaagccagacaatacaacccttttaaataacagttcctcataaggttaccagccagtcttgtctggtcaacagggattccaaggcctaataggagtgcagcagccacctcagagtcagaacgtgataaataaccaacaaggaactccggtgcaaagcgtgatggtttcctacccaacaatgtcttcttatcaggtgccaatgacccagggttctcaaggactgccccagcagtcataccaacagccaatcatgctacctaaccaggcaggtcaagggtcactcccagccactggaatgcctgtttactgtaatgtcacaccgcccacccctcagaacaaccttaggctgattggcccacactgcccctccagcactgtcccagtgatgtcagctagctgcagaacaaactgtgcaagtatgagcaatgctggttggcaggtcaaattctgagagctctggctgtggtacatttcttcagatatttctcatggcctttgatggaagaggaacaaggtgggaaaactggctgaggacttaagtattcactcaacactcaaatgattgctgctggtattctgtaaaaaataaacaaagactaatatacacgttagctggttaatggtgcatatttctgtcatgtctgctaggtatgcctttatagcttagctagtgacatgaattcatcaaggtaagattttctcctaccactgaataccactgtgtagattataatatccctaatttggattagttttgtactttgtgttgagtttgtgatgctaaaagtatttaaaaattatatactaaatcacattgtaccaaagctgtaatggaaaagcaaagaagaattgatgaattgaaggaataatttatatacattatagagttttcttttttaatggatatatactgtattgtagtgtttaatcaaaataaaactatttgaccttatggaggaaggtcatgtttttaccaccagtttggttca

SEQ ID NO: 4196 - protein, 96 aa, Homo sapiens; identical to SEQ ID NO: 4194

SEQ ID NO: 4197 - DNA, 1575 bp, Homo sapiens
aaattctctcagaagctagtggtgaaacagaagaaaagcatcacatgcgtcccacttgctgttgcctttttgtctaaggcagtggttatcgtgaattcctcagggtagcaagtcatttggttcactaggacataaaaaaatagaatttatccaaagttaatgggctgtttggtggtctctatgtgtgaaatgagattgtccaggagaagaggatagtcagggaatgagtcaatttaattttaaaataacttgataatctgtgaattctccaaatatcctcaaaaccaaagaaaaagccaaatatgaaaggtgtaatttatagtagtcaattggtatcaatagagtcttctgtttttgtgccatgaataatttatcattgtcacatgtattcaatagaccattctgcataacaatagaaatgtcagtgaatttttaaagccataatcttgttcactcttagaagtaaaaaaaagagaaaatgcattcttagggaataaacatctgataacacattctgaatgtggagactgagatgtctgaaggctgccttttgaaccagtagttttaccccatgaaacatcactgtgttctttctgcacaaccagttcaaaagatctcttttcttcgcaggttaccagccagtcttgtctggtcaacagggattccaaggcctaataggagtgcagcagccacctcagagtcagaacgtgataaataaccaacaaggaactccggtgcaaagcgtgatggtttcctacccaacaatgtcttcttatcaggtgccaatgacccagggttctcaaggactgccccagcagtcataccaacagccaatcatgctacctaaccaggcaggtcaagggtcactcccagccactggaatgcctgtttactgtaatgtcacaccgcccacccctcagaacaaccttaggctgattggcccacactgcccctccagcactgtcccagtgatgtcagctagctgcagaacaaactgtgcaagtatgagcaatgctggttggcaggtcaaattctgagagctctggctgtggtacatttcttcagatatttctcatggcctttgatggaagaggaacaaggtgggaaaactggctgaggacttaagtattcactcaacactcaaatgattgctgctggtattctgtaaaaaataaacaaagactaatatacacgttagctggttaatggtgcatatttctgtcatgtctgctaggtatgcctttatagcttagctagtgacatgaattcatcaaggtaagattttctcctaccactgaataccactgtgtagattataatatccctaatttggattagttttgtactttgtgttgagtttgtgatgctaaaagtatttaaaaattatatactaaatcacattgtaccaaagctgtaatggaaaagcaaagaagaattgatgaattgaaggaataatttatatacattatagagttttcttttttaatggatatatactgtattgtagtgtttaatcaaaataaaactatttgaccttatggaggaaggtcatgtttttaccaccagtttggttca

SEQ ID NO: 4198 - protein, 96 aa, Homo sapiens; identical to SEQ ID NO: 4194

SEQ ID NO: 4199 - DNA, 3763 bp, Homo sapiens
ccggcccgggacccgctcgcgcagacttctcgggcggactgaggacgccgccgctcggggccgcccctgtgctcgccttcagcgcccgctcagcccgccgtccgcgccccggtggcgggcccgacgcccgcattccgcccgtgtccaggcgcagagctcccgccccggggagcttcctggccgtcggcgggccccgcggcccgcgcgctcggcgccctgctcgccgggcagaggggaaggcggcggccggctggggatgggcggcccggctgcgccgaggggcgccgggaggctccgcgcgctgctgctggcgctggtggtcgcggggatccccgcgggcgcctacaacctcgacccgcagcgccccgtgcacttccagggccccgctgactcgttcttcggctacgcagttctggagcatttccacgacaacacgcgctgggtccttgtgggcgcaccaaaggcagattccaaatacagcccttcagtgaagtctcctggggctgtgtttaagtgccgtgttcacaccaaccctgaccggagatgcaccgaactggacatggctcgagggaagaatcggggcacgtcctgcggaaagacctgccgggaagaccgcgatgatgagtggatgggggtgagcctggcccgacagcccaaggctgatggccgtgtgttggcctgtgctcatcgctggaagaacatctactatgaagccgaccacatcctaccccatggcttctgctacatcatcccctccaacctccaggccaaaggcaggacgctgatcccttgctatgaagagtataagaagaagtacggagaggaacacggctcctgccaggctgggatagcgggcttcttcaccgaggagctggtggtgatgggtgctccagggtcattttattgggctggaaccatcaaagtgctgaaccttacggacaacacctatttaaaactgaacgacgaagtgatcatgaacaggcggtacacctacctgggctacgcagtgaccgctggccacttctctcacccgtccaccattgatgtggtaggaggtgccccacaggacaaaggcatcggcaaggtttatattttcagagctgaccgaagatcaggcaccttaattaagatctttcaagcatcaggtaaaaagatgggctcttacttcggctcctccttgtgcgcagttgacctgaatggggacggcctctctgacctgctggtgggggcccccatgttttctgagatcagggatgagggacaggtcactgtctacatcaacagaggaaatggagccctcgaggagcagctggctctgactggggatggtgcctacaatgcgcactttggagagagcattgccagcctggacgatctggacaatgatgggttcccagatgtggccattggtgcacccaaggaggatgacttcgcaggggcggtctatatctatcatggtgatgccggtgggatagtccctcagtactcaatgaaactgtctgggcagaagataaatccagtgctccggatgtttggtcagtccatatcgggaggcattgatatggatggaaatggctatcctgatgtcactgttggagccttcatgtccgacagcgtggttcttctcagagcaaggcctgtcattacggtggatgtctccatcttcctcccgggctccatcaacatcacagcgcctcagtgtcacgacggacagcagcctgtgaactgcctgaacgtcaccacctgcttcagcttccatggcaaacacgttccaggagagattggcctgaattatgttctgatggctgacgtggccaaaaaggagaagggccagatgcccagggtctactttgtgctgctgggagagaccatgggtcaggtcacagagaagctgcagctgacttacatggaggagacgtgtcgtcactatgtggcccatgtgaagcggagggtgcaggacgtcatcagcccgatcgtgtttgaagcagcctacagcctcagtgagcatgtgactggagaggaggagagggaactgccgcctctgacaccagttctccgctggaaaaagggacaaaagattgcccaaaagaatcagactgtttttgaaaggaattgccgttcagaggactgtgccgcagacctgcagcttcagggtaaactgctgctctccagtatggatgagaaaaccctgtatctagctttgggggctgtgaagaacatctccctaaacatctctatctccaacctcggagatgatgcctatgatgccaacgtgtccttcaatgtttcccgggagctcttcttcatcaacatgtggcagaaggaggagatgggcatctcctgtgagctgctggaatcggacttcctcaaatgcagcgtgggatttcctttcatgaggtcaaagtcaaagtatgaattcagcgtgatctttgatacaagccacctgtctggggaagaggaagttctcagcttcattgttactgctcagagtggcaacacggagcgctctgaatccctgcatgacaacaccctcgtgctgatggtgccactgatgcacgaggtggacacgtccatcaccggaatcatgtctccaacctcctttgtatatggcgagtccgtggacgcagccaacttcattcagctggatgacctggagtgtcactttcagcccatcaatatcacccttcaggtctacaacactggcccaagcacccttccagggtcatctgtcagcatctctttccctaatcgactctcatctggtggtgcagagatgtttcatgtccaggaaatggtggtgggccaagagaagggaaactgctctttccagaaaaacccaactccctgcatcatccctcaagaacaagaaaatatcttccacacaatatttgcttttttcacaaagtctggaagaaaagtcttggactgtgaaaaaccaggaatttcttgcctaacagcacactgtaactttagtgctcttgctaaagaagaaagtcgtactatagacatttacatgctgctgaacacagaaatactgaaaaaggacagttcgtctgtcatccagttcatgtcccgcgccaaggtgaaggtggatcctgccctaagggtggtggaaatagctcatgggaacccagaagaggtgacggtggtcttcgaggccctgcacaatctggagccccgtggctacgtcgtggggtggatcatcgccatcagtttgttggtgggaatcctcatcttcctgctgctggccgtgctgctctggaagatgggcttctttcgccgaaggtacaaagaaattatcgaagctgagaagaaccggaaagagaatgaagacagttgggactgggtccagaaaaaccagtgagctgccacaccagtcacatgacctgatcactagcctgtcatccttggtctttgtatcttccatatttggaagaaaaaaatcttctccagatttttcggaggccccactgatgctgttctcttcttcattctatcaagcccaggtgccagcctgaggcagccacttcggccaggtcacacgaccggggccagcaccacttcctttaaagatgaactctgaactttggagagtgagctacagagccgagcaatatttatggatgcaacacgcatggtcaaccctcaggggaaaactgttacctaaagtatttttataaatataagccttttatactgattatgtcttttatatttgtatcgatgttttattatttctattaaatagttatataattcactc

SEQ ID NO: 4200 - protein, 1035 aa, Homo sapiens; identical to SEQ ID NO: 393

SEQ ID NO: 4201 - DNA, 7887 bp, Homo sapiens
ccggcccgggacccgctcgcgcagacttctcgggcggactgaggacgccgccgctcggggccgcccctgtgctcgccttcagcgcccgctcagcccgccgtccgcgccccggtggcgggcccgacgcccgcattccgcccgtgtccaggcgcagagctcccgccccggggagcttcctggccgtcggcgggccccgcggcccgcgcgctcggcgccctgctcgccgggcagaggggaaggcggcggccggctggggatgggcggcccggctgcgccgaggggcgccgggaggctccgcgcgctgctgctggcgctggtggtcgcggggatccccgcgggcgcctacaacctcgacccgcagcgccccgtgcacttccagggccccgctgactcgttcttcggctacgcagttctggagcatttccacgacaacacgcgctgggtccttgtgggcgcaccaaaggcagattccaaatacagcccttcagtgaagtctcctggggctgtgtttaagtgccgtgttcacaccaaccctgaccggagatgcaccgaactggacatggctcgagggaagaatcggggcacgtcctgcggaaagacctgccgggaagaccgcgatgatgagtggatgggggtgagcctggcccgacagcccaaggctgatggccgtgtgttggcctgtgctcatcgctggaagaacatctactatgaagccgaccacatcctaccccatggcttctgctacatcatcccctccaacctccaggccaaaggcaggacgctgatcccttgctatgaagagtataagaagaagtacggagaggaacacggctcctgccaggctgggatagcgggcttcttcaccgaggagctggtggtgatgggtgctccagggtcattttattgggctggaaccatcaaagtgctgaaccttacggacaacacctatttaaaactgaacgacgaagtgatcatgaacaggcggtacacctacctgggctacgcagtgaccgctggccacttctctcacccgtccaccattgatgtggtaggaggtgccccacaggacaaaggcatcggcaaggtttatattttcagagctgaccgaagatcaggcaccttaattaagatctttcaagcatcaggtaaaaagatgggctcttacttcggctcctccttgtgcgcagttgacctgaatggggacggcctctctgacctgctggtgggggcccccatgttttctgagatcagggatgagggacaggtcactgtctacatcaacagaggaaatggagccctcgaggagcagctggctctgactggggatggtgcctacaatgcgcactttggagagagcattgccagcctggacgatctggacaatgatgggttcccagatgtggccattggtgcacccaaggaggatgacttcgcaggggcggtctatatctatcatggtgatgccggtgggatagtccctcagtactcaatgaaactgtctgggcagaagataaatccagtgctccggatgtttggtcagtccatatcgggaggcattgatatggatggaaatggctatcctgatgtcactgttggagccttcatgtccgacagcgtggttcttctcagagcaaggcctgtcattacggtggatgtctccatcttcctcccgggctccatcaacatcacagcgcctcagtgtcacgacggacagcagcctgtgaactgcctgaacgtcaccacctgcttcagcttccatggcaaacacgttccaggagagattggcctgaattatgttctgatggctgacgtggccaaaaaggagaagggccagatgcccagggtctactttgtgctgctgggagagaccatgggtcaggtcacagagaagctgcagctgacttacatggaggagacgtgtcgtcactatgtggcccatgtgaagcggagggtgcaggacgtcatcagcccgatcgtgtttgaagcagcctacagcctcagtgagcatgtgactggagaggaggagagggaactgccgcctctgacaccagttctccgctggaaaaagggacaaaagattgcccaaaagaatcagactgtttttgaaaggaattgccgttcagaggactgtgccgcagacctgcagcttcagggtaaactgctgctctccagtatggatgagaaaaccctgtatctagctttgggggctgtgaagaacatctccctaaacatctctatctccaacctcggagatgatgcctatgatgccaacgtgtccttcaatgtttcccgggagctcttcttcatcaacatgtggcagaaggaggagatgggcatctcctgtgagctgctggaatcggacttcctcaaatgcagcgtgggatttcctttcatgaggtcaaagtcaaagtatgaattcagcgtgatctttgatacaagccacctgtctggggaagaggaagttctcagcttcattgttactgctcagagtggcaacacggagcgctctgaatccctgcatgacaacaccctcgtgctgatggtgccactgatgcacgaggtggacacgtccatcaccggaatcatgtctccaacctcctttgtatatggcgagtccgtggacgcagccaacttcattcagctggatgacctggagtgtcactttcagcccatcaatatcacccttcaggtctacaacactggcccaagcacccttccagggtcatctgtcagcatctctttccctaatcgactctcatctggtggtgcagagatgtttcatgtccaggaaatggtggtgggccaagagaagggaaactgctctttccagaaaaacccaactccctgcatcatccctcaagaacaagaaaatatcttccacacaatatttgcttttttcacaaagtctggaagaaaagtcttggactgtgaaaaaccaggaatttcttgcctaacagcacactgtaactttagtgctcttgctaaagaagaaagtcgtactatagacatttacatgctgctgaacacagaaatactgaaaaaggacagttcgtctgtcatccagttcatgtcccgcgccaaggtgaaggtggatcctgccctaagggtggtggaaatagctcatgggaacccagaagaggtgacggtggtcttcgaggccctgcacaatctggagccccgtggctacgtcgtggggtggatcatcgccatcagtttgttggtgggaatcctcatcttcctgctgctggccgtgctgctctggaagatgggcttctttcgccgaaggtacaaagaaattatcgaagctgagaagaaccggaaagagaatgaagacagttgggactgggtccagaaaaaccagtgagctgccacaccagtcacatgacctgatcactagcctgtcatccttggtctttgtatcttccatatttggaagaaaaaaatcttctccagatttttcggaggccccactgatgctgttctcttcttcattctatcaagcccaggtgccagcctgaggcagccacttcggccaggtcacacgaccggggccagcaccacttcctttaaagatgaactctgaactttggagagtgagctacagagccgagcaatatttatggatgcaacacgcatggtcaaccctcaggggaaaactgttacctaaagtatttttataaatataagccttttatactgattatgtcttttatatttgtatcgatgttttattatttctattaaatagttatataattcactcaagcactgatatctggcctaaaatcttggaagtacatgtccatgaatacaaattttaaaggatgaaaatcttaccgtactttggaacttgctgtttaaaaagacagatgaaataagttgaagaaacctcatgtaatgaatccaccaggctggcagtggtgcatataaactgtgggtgtggcaagaccccgaagacatttcacatctttatcgcctcgatcaagtgtggagtcacatgctaatgtgtgctaaagaactgtaagtgttttttcatatgtacttttcattggaagattcccaacaagaatttggatggaaaacctgatccctagcaagaagtctgctctgtatcacctttatatagcagacatgtcaccctgcttctacacagatgatggatgaaagcttggagcaatgccatgtggtcatctggtaaacctcagaatggcgtctcatcctggacatcctgcatcagagttcacacaccacaaggactaaatccttgtcccctaagcaaagaattgggtctgaatgctgtgagggattgcctttttgtggtaattttcattgagagatcttcatttcccctaccaccctggctgtcccagctagtggtgattgcagattccttcccagagaggacatttaaccgttttaaaaaaaatgtcttagattgggttcccaagaagcagtccctgaaacaaggatttgtgtgcaagtaacttattaaggaagtattcccaggggataccagtaagagagtgggggaagcaggacaaggaaggagacaaagccaggcaaatgtttgtcatttcagggagagctccatgaagtttagcctcagcctgatcaggggaactccggaggaaaagttaggcctcagaggtgtcccaacctgaatcaaggggctggctgcacccagaggagatgtaaacgttttattctcaattcctgctggcgtaatggctccagtagctcaggacagtcctctaaaggacaaccacagatgcatcctcagccaggggagacacagggaaatgatgcaaaagaaatgatgcaaaggatctgagcagaacactgcccctccccaccccctgaatgtgtgagtgctgagttacggccttcagtatccaagctctctgtttgacagtagatatattgtcagatgcactgtgctgcttagttttgagtgcagtgtgattttctgaaagggcaatgagatgatggatgtagcatgctcagcactgacctggcccatagtgatcactcaataactgttaacagctatggctgctattcctactgatggataaccatctaataagacagaaaacatggggctaagagcagggtctaacggagtcttaatggcttattacagcctgccaaagtgccagctacatacacatggcatccagtgcggatgaaacaatctataaaaccaagggtctttcttatagcaccttttttactggaagctaacacgttgggagtccgtgaacattgtcaaaaagacatcaaactcaacttctgggaagacagatttttaatacacatacttggctaatactcacaaacatatctaaagttttggcaaaattatgagggtgatgggtgggtactaacctggcatggagcaggtgtgtcttttggtttcttatgcagttgactctgctgcagggagattacagatgtaacctcatgcttctcttcctggtgaacatgggaatagaccaaaaaaatcaagggtcaatggcatgaactaagctgatcctggaaatcagggatgttgcatctaactgtgggatggaggcacagaggtagctacagggagcaggacgaggcaaagaaagcagctgtcactcagagttcgcttatgagttttatcaaaagcagcaagaaaagcagtcttgggtgggttttatcacttattaacagccatttatgaggcccctgctgtgtgtcaggcactgtgcaaggtgctggaggttccccagagaacacttcagggacattttgcctcagggtggcaaaatgcagtggcatgtggactttttgaatgggatgccatttgcagctttcctttgatggactcttgttcataatgccatgttttctttaatgaatcatttaggattcttaggtgatatttctggaacagcaccatcaacagctttggccacatgcacttagagcaactaacttgcctcctgccggggtgtaggtgcgttggtgacagtgtagaagggtgattcgcaggcccatgttctgcccaccagcaaagccccactggagaagggtagactcctgtgggcagtctcagagctgggacctatttgcttctgcttgattctgcgtgggtggacccacatgagcagctgtatacccaggaggtcactaagactttataaaggcaggttttaagaaaaccagccttggcatcaccaccagcagatactgaaagcctccccaggaacctgtctggggaaggatgatgcctctgctggtctgatcgtgctgagtagcaggtgggctacggggactggggagttaagcattttgtgcagtgatagagaagtcaagcatatcgttagcgctctctcaacttgggcagttcacaagctccttcccagctcagaagccctctctatgctctcaggggaagcagatggggtggatcagtacatctgtgttacccttccagaatattatttgaaaattctacagtatgttctactttctccccttcctgcttccatggtttcactgtggaatcctataagatattctcctgagcagtattatttcagtttccttcagcttttagttgaatcttcaatgtggttttaaccaactgttcagagaactgaaatggtttttaaatatgaaaaaggacctttgtaaaaatggagtaaaacagtgccccttttttaaaaaaagttttgcttatgcttaatttacataggactcaggagagtttggaacatcctccaagtgggccatagagctgtcacaaagaagaggccatgatgtttagaaacaaggggacactagcaggaggggcagggtccactggcttagtggcaactgacaggcatccattccgaataactcagcactgaggtttcctcaggcagttctttaggaaaactgtcagcatcatgggtactcagaggtatggtagaccttgtagaagatccactaggaagtcctccttcaccaaatcatgtagctactgcccttgagccaaaggcaatgaggtttaaaacaaaaacccaacagcactcctgggaacatcctgttttccatgcggaagcatagcagatccccagacgatccgtgtgctgtatgctacctgttgaaccctagcatggtggctttttaaaaggttatttatgacttttatttttgggtaaggcattatggccaggtgcatgcagttatgtctgggttacgtgtgaaacgtacatctggtgaactgtatacttggctcaaacttctcaaaatttagaggtgctggaaaggattgtcacttggagcctttagtagacaaaaggcagaaagtgagcatcatttcagaaatgctttagtatgcacacttttagctgatattttgatatatagaataataatatacacagtggagaatattcaaagagtggctgaagggagaatacagagccagtagggccaaaatgaaacttctaggatgtcttctgaattttcagcacatggggggaataagtgaacaaatttcccaacatcgtgcaatgctttatagcacaatgatctagatttcagactgtgttaaggttttttctttgttgatgttgttgttttaattctaatgtgcacggtgtgactggcagagtgagtttaaaagctttacgagtgattaattgcttggcaggcacccacgctatctgcatttccagaactttactgatgcatccatgtacatttccactgaggaattttggtgggtggggggaggttgtgctgcctcacaatgtcacgtgtattaaagtctaagcagtcacttctgattcacttgcactgtttgggaaatgtcaggtttacaaaaacatacatgtttggaataaaaaatggctgcaaacaattcag

SEQ ID NO: 4202 - protein, 1035 aa, Homo sapiens; identical to SEQ ID NO: 393

SEQ ID NO: 4203 - DNA, 724 bp, Homo sapiens
aaggagcaagtggacacagcctgcctcccataagctgtctggctcactcattttattcctggaaatcagaagtcaatcatttcctgagaaatgaggaaaaagatggaggtcacagagaccagtaagagcaaggagggagaggaaaaagctgaacatgaaactcgaggaagaaacagaatatgcagaggaataaaaaaaacccaactctctcaaccctggattgaatgctgtgcacttcctgaggcaatggatcacggaggagtttatctaagggacatgccaatcactcattccccagggctggattctctagcctgagtcctatttcaggtcagatgtgaagaaaactatttgcctgaataccaaactttaaactcactgtaaaaattaccttcagagaaacaactggaaggataagctgcataccctcagatttctttcttttgttccccagagggtgataagaacatttggtatattctgtgcaacccctgttcttcttttccttctttcaacactcataccctcttcattacatggtctgtgttacttgaacccttctaaataattttctgaactacatctttaattgcaagacacccccaaaactataagagtaggaaagagtagaaacaactaagatgaaataaacccatcaggtctttatctatttcctacccaattacgaaaagcaaaggagaaaaataaaataactctgagaagc

SEQ ID NO: 4204 - protein, 75 aa, Homo sapiens
MRKKMEVTETSKSKEGEEKAEHETRGRNRICRGIKKTQLSQPWIECCALPEAMDHGGVYLRDMPITHSPGLDSLA

SEQ ID NO: 4205 - DNA, 638 bp, Homo sapiens
gaaaaatcttcaagtaagttgtgttgtttcttccacaggacagttcgtctgtcatccagttcatgtcccgcgccaaggtgaaggtggatcctgccctaagggtggtggaaatagctcatgggaacccagaagaggtgacgatgggcttctttcgccgaaggtacaaagaaattatcgaagctgagaagaaccggaaagagaatgaagacagttgggactgggtccagaaaaaccagtgagctgccacaccagtcacatgacctgatcactagcctgtcatccttggtctttgtatcttccatatttggaagaaaaaaatcttctccagatttttcggaggccccactgatgctgttctcttcttcattctatcaagcccaggtgccagcctgaggcagccacttcggccaggtcacacgaccggggccagcaccacttcctttaaagatgaactctgaactttggagagtgagctacagagccgagcaatatttatggatgcaacacgcatggtcaaccctcaggggaaaactgttacctaaagtatttttataaatataagccttttatactgattatgtcttttatatttgtatcgatgttttattatttctattaaatagttatataattcactc

SEQ ID NO: 4206 - protein, 58 aa, Homo sapiens
MSRAKVKVDPALRVVEIAHGNPEEVTMGFFRRRYKEIIEAEKNRKENEDSWDWVQKNQ

SEQ ID NO: 4207 - DNA, 3263 bp, Homo sapiens
gggctctgcccgctcgcctgctcgcctggtgggggagaggggagcggggccgacacaggactgcagttgacagcagataactgaaagctcggaaagcgaaaccgtggataagcaggggaactgtggcatcccatttaaaattgcttctgaagagaagcatgaggttacatctgtaatctccctgcagcagagtcaactgcataagaaaccaaaagacacacctgctccatgccagcctaagccaccacataaaaagtcagaccatctgctggaagaaccacatggagaggccctgagtcaacatggagaggaagaaggacttgactgaatccagccttccagctgtccctaccaaggtgccaggcatgagaatgaagctgtcttgaactctgaagaccagcttagccaccaggtaaatgccactaagtgacctcactcaatgtcatgtgggacggaagaatcaccccgccaaacccttcctggatccctgacccagaaatttgtcagatgtaatggttgtgaaaagccattcaatttgggggcagtttgtatgcagcatagctagctggtatgatacaacagcctgcaattcaggcagcagcagcactaacaacgatgaaatcctgcaggagcgaactcctttggggtgcctgcctaattgttttcttttctgagagtctcctccccagtatcccctaaaccaccatcctgcatctttctcccccactagcctccgtgggagacatatgacccacattgggccaggtggattctctccctcccaactcccttcctcccttccacagttgatgggagtagacatttgactagagctgggccaggcagatcctctctcccagatatgtgggaccaggaatcagaggtggctgatcattctgcgtctgtggctagtagtccttgagatgcaagtttggaggggctggaggcaactatctccctacgatgtgtagggaaacatagagaaagctggtctgcggtgggaagagaatgatgcggatgtgtagccaagtagagagaaggggcttccttctgttgaccttccttctgctgggtgggggcgacagggagtgaggcaagcccagccttgtctcctagcctcctctaagcaccactcactcagaaagcccaacaccaagctcctcctcttgccaaactaattcgcatcttgccttccccaccctgattaagggcacccatcctttgtctgaacttatcttaaggagagacagctattctttttttctccctgacctctcaagtccaactggtcagcaaaccctgcctgtcctaccttgacccatggcaatggccctactcttgcccccacactgtccctagatctctctttccttttagagacagggtcttgctctaccacctggtgcagtggtatgatcatagctcactgcaacttcaaattcttaggctcaagtaaacctctggccttggcctcccaaagcactgggattacaggcatgagccactgcacccagccccagatctctctctcgacacagatctggtcatgccaccgctctgctcacagacctcccatgctccccctttgtcctggttagcagtggccttcacaactgtggcagacggtcttgctgcaggtcagtgactgccctgacaaactttacaagctgctctccacaaaccctgcttattttcccacctcttccttccctctggatggaatcttcatctacccttccctgcctggaaaactcaaaccacactaaaggtcagactcgaatgacacctcatttatgaaatatcccctggcttctgtgtgctaagcgcagtgctaaacattttccttgcataacctctacataccaaactggaggtgatggtctcctttttacagaggaagaaactgagggtcacagaaggtaagcagcccccttaaggcctcatgtcaggcaagtgtgagagtcaggattgctgcccacagctgtcagcctgaaagctgctctcatctaccacactgttctctgtgaccttttaatcctccctcctccttgggggcaagggagggggactcatggcaccttcttctcagtttccagagcagttactgcgcagcactcaccaccctccattatgcctgcaggtctattgctaggtggtgaggcggtcaagtgcagggaagggcacagttattgctgcatcccagtgcctagtccaggcaaagcaaggactggggcaaagtaagcgttcgagaaatgtgagccgaaatgagatactgctctgggttgactagcaaagctgttgtgacccaggtggcctcattcaacagcctcctcaaagctttcctgccacccgttagttacggcaagccctggtctgggcacacggtgtgtccctggcggccgtgactgccctctccctcccagtctgtggcagagggcagagtctgccttctcaggtcctggctctttggatcccacacagctgggtgacctcagggttctccccacccatgacagcatctcctgcaaccatgcttttttaaacaaacacagcaaaagcaaggcaaagcaggtggtgggctggaggaggcaggggctgtgcagaggagacaggacacccctgagaggcagagccaggtggggcggccagaaggagggcatgcagactataaggggaagtggggcacggccacaacactccccactctgtgccctgtctggttccacacacccagccataaaggacacagctcctctcattttaagagcccatataaaggcagaaggaagtcacatacacacacacacacgcgcacgcacacacacacacacccacacacactcatgcaccaaagccctcaactcagcaagaagccttgtcttttcagatgccaaacactgagcaggctttgttctccacccacaaaccagaggctgtctcagcaggaaggagttggagttggagaaaaaggagaattaagaatctatctggcgatgtggattaaataaacaacaaattggcagattgtttttaaaaggtaacatccactattggcaaacagacatttctgatacactgcttgtgggagggtgaattggtatgacctttctacagggcaatctgcaatagtaataaaaggcttaggccgggcggggtggctcacacctgtaatcccagcactttgggaggctaaggcgggaggatcacctgaggtcaagagttcaagaccaccctggccaacatggcaaaacctggtctctact

SEQ ID NO: 4208 - protein, 80 aa, Homo sapiens
MQTIRGSGARPQHSPLCALSGSTHPAIKDTAPLILRAHIKAEGSHIHTHTRARTHTHTHTHSCTKALNSARSLVFSDAKH

SEQ ID NO: 4209 - DNA, 503 bp, Homo sapiens
gactgcagttgacagcagataactgaaagctcggaaagcgaaaccgtggataagcaggggaactgtggcatcccatttaaaattgcttctgaagagaagcatgaggttacatctgtaatctccctgcagcagagtcaactgcataagaaaccaaaagacacacctgctccatgccagcctaagccaccacataaaaagtcagaccatctgctggaagaaccacatggagaggccctgagtcaacatggagaggaagaaggacttgactgaatccagccttccagctgtccctaccaaggtgccaggcatgagaatgaagctgtcttgaactctgaagaccagcttagccaccagatgccaaacactgagcaggctttgttctccacccacaaaccagaggctgtctcagcaggaaggagttggagttggagaaaaaggagaattaagaatctatctggcgatgtggattaaataaacaacaaattggcagattgtttttaaaa

SEQ ID NO: 4210 - protein, 38 aa, Homo sapiens
MPNTEQALFSTHKPEAVSAGRSWSWRKRRIKNLSGDVD

SEQ ID NO: 4211 - DNA, 2391 bp, Homo sapiens
cagtccggccgggcggagctaggggcgggcccctgcgtctctgggcgctggagcgcggcgactatcacgccgcgtggcggacggacggactgacggacgcgcagccttacccgaaaggccatggcggagcacgcccctcgccgctgctgcctgggctgggacttcagcacgcagcaggtaaaggttgttgctgttgatgcagagttgaatgtcttctatgaggaaagtgtgcattttgacagagatcttccagaatttgggactcagggtggtgttcatgtgcacaaggatgggctgacggtcacttctccagtactaatgtgggtccaggcactggatatcatcttggagaagatgaaggcttcgggcttcgacttctctcaagtcctagccttgtccggggcgggccagcaacacggaagtatatactggaaggctggagcccagcaggcactgacaagcttatcaccagacctccggctacaccagcagctgcaggactgtttctccatcagcgactgcccggtgtggatggactccagcaccacagcccagtgccgccagctggaggctgctgtgggtggtgctcaggctctcagctgcctcacggggtcccgtgcctatgagcgttttacagggaaccaaattgcaaaaatttaccagcagaaccccgaggcctactcacatacggagagaatttctttggtcagtagctttgctgcttccctgttccttggctcttactcccctattgactacagtgatggttctggaatgaatttgttgcagatacaggataaagtctggtcccaggcttgccttggtgcctgtgcacctcatttagaggagaagcttagcccaccagtaccatcatgctcagttgtgggagccatttcttcctactacgtccagcgctacggatttcctccaggatgcaaagtggtggccttcactggggacaacccagcgtcgctggcaggcatgagactggaggaaggtgacattgcggtcagcctgggcaccagtgacaccctgtttctctggctccaagagcccatgcctgccctggaaggccacatcttctgcaacccggttgactcccagcactacatggcactcctgtgctttaaaaatggctccctcatgagagagaagatccgcaacgagtctgtatcccgttcctggagcgatttctctaaggcactgcagtccacagagatgggcaacggtggaaacctgggtttttattttgatgtaatggagatcacccctgaaattattggacgtcataggtttaacacagaaaaccacaaggttgcagcattccctggggatgtggaggttcgagcactaattgaaggacaattcatggccaagaggattcacgcagaaggcctgggctatcgagtcatgtccaagacaaagattttggccacaggaggagcatctcacaatagagaaatcttacaggtgcttgcagatgtgtttgatgccccggtgtatgttatagacactgccaactcggcctgtgtgggttctgcataccgagcttttcatggtcttgcaggtggaacagatgtgcccttttcagaggttgtgaagttagctccaaatcccagactagctgctaccccaagcccgggagcttctcaggtgagagaccatcggaatttgtttgtagcatttgcattatgaaagcccgctagggttttttcccccaccaaaaggtcacctacattgaacgtgatgtgctcaactaaaggagaaattctgctttattgaaattatcaagaaaatggagctaaagggccatgttgtcagctgcaagtcacagatactgctgattttacagccagggtcagatggattgctgggcatatttgtattgcttcttatgcctcacggtgggcccttccatgtcactgggctataaaagctactgaaaggatccatcactgaaattcaagacatgctgggtttctagcactgaaatctcaagtctagacccaagatagctgtgcagtcacccaggccaggaaatccctgtgaaggcagacctcacttgttgcaggttgggtccctcagaaagcagagtctgagatgtcaactaagatatatgaggtttatgggagtcgggggagttgctcttggaatccacaactgcagaaaggaaagggagtagacaggattggacagagggagaaggtgagcagcaatgcaatttctggagcctaagctattcctacagaaagctccgaagctgagatgacctttagagttttacccagttggtctaaggggctgggcctttataccccatgtcaatcagtcatcacatgtgggccaccccaggatggggtgaggcagctctttatagctaaagcagtctcc

SEQ ID NO: 4212 - protein, 524 aa, Homo sapiens
MAEHAPRRCCLGWDFSTQQVKVVAVDAELNVFYEESVHFDRDLPEFGTQGGVHVHKDGLTVTSPVLMWVQALDIILEKMKASGFDFSQVLALSGAGQQHGSIYWKAGAQQALTSLSPDLRLHQQLQDCFSISDCPVWMDSSTTAQCRQLEAAVGGAQALSCLTGSRAYERFTGNQIAKIYQQNPEAYSHTERISLVSSFAASLFLGSYSPIDYSDGSGMNLLQIQDKVWSQACLGACAPHLEEKLSPPVPSCSVVGAISSYYVQRYGFPPGCKVVAFTGDNPASLAGMRLEEGDIAVSLGTSDTLFLWLQEPMPALEGHIFCNPVDSQHYMALLCFKNGSLMREKIRNESVSRSWSDFSKALQSTEMGNGGNLGFYFDVMEITPEIIGRHRFNTENHKVAAFPGDVEVRALIEGQFMAKRIHAEGLGYRVMSKTKILATGGASHNREILQVLADVFDAPVYVIDTANSACVGSAYRAFHGLAGGTDVPFSEVVKLAPNPRLAATPSPGASQVRDHRNLFVAFAL

SEQ ID NO: 4213 - DNA, 3741 bp, Homo sapiens
cagtccggccgggcggagctaggggcgggcccctgcgtctctgggcgctggagcgcggcgactatcacgccgcgtggcggacggacggactgacggacgcgcagccttacccgaaaggccatggcggagcacgcccctcgccgctgctgcctgggctgggacttcagcacgcagcaggtaaaggttgttgctgttgatgcagagttgaatgtcttctatgaggaaagtgtgcattttgacagagatcttccagaatttgggactcagggtggtgttcatgtgcacaaggatgggctgacggtcacttctccagtactaatgtgggtccaggcactggatatcatcttggagaagatgaaggcttcgggcttcgacttctctcaagtcctagccttgtccggggcgggccagcaacacggaagtatatactggaaggctggagcccagcaggcactgacaagcttatcaccagacctccggctacaccagcagctgcaggactgtttctccatcagcgactgcccggtgtggatggactccagcaccacagcccagtgccgccagctggaggctgctgtgggtggtgctcaggctctcagctgcctcacggggtcccgtgcctatgagcgttttacagggaaccaaattgcaaaaatttaccagcagaaccccgaggcctactcacatacggagagaatttctttggtcagtagctttgctgcttccctgttccttggctcttactcccctattgactacagtgatggttctggaatgaatttgttgcagatacaggataaagtctggtcccaggcttgccttggtgcctgtgcacctcatttagaggagaagcttagcccaccagtaccatcatgctcagttgtgggagccatttcttcctactacgtccagcgctacggatttcctccaggatgcaaagtggtggccttcactggggacaacccagcgtcgctggcaggcatgagactggaggaaggtgacattgcggtcagcctgggcaccagtgacaccctgtttctctggctccaagagcccatgcctgccctggaaggccacatcttctgcaacccggttgactcccagcactacatggcactcctgtgctttaaaaatggctccctcatgagagagaagatccgcaacgagtctgtatcccgttcctggagcgatttctctaaggcactgcagtccacagagatgggcaacggtggaaacctgggtttttattttgatgtaatggagatcacccctgaaattattggacgtcataggtttaacacagaaaaccacaaggttgcagcattccctggggatgtggaggttcgagcactaattgaaggacaattcatggccaagaggattcacgcagaaggcctgggctatcgagtcatgtccaagacaaagattttggccacaggaggagcatctcacaatagagaaatcttacaggtgcttgcagatgtgtttgatgccccggtgtatgttatagacactgccaactcggcctgtgtgggttctgcataccgagcttttcatggtcttgcaggtggaacagatgtgcccttttcagaggttgtgaagttagctccaaatcccagactagctgctaccccaagcccgggagcttctcaggtctacgaggcccttctcccccagtatgccaaactcgagcagagaatcttgtctcagacccgggggcctccggagtgaacaggcatccctgttgcccctgcctgcccagatttactgaccccatttgtcgacatggccccagacaggagggatccacttctctgttctgaacagctcttcctgcccctactgactccttggagtgtccaggaccatcttaaagccgccctcagcacatctgcatgaagatagataggcactcctgtccctgtgcccgtgtgccccagggcaggaaagcatctctcttttcctgtcttttatcccaggaggcaggacaacactgagactgggatatgtccaataaaaactatgacttttccccttgcagaggcagaattaaagctaatctagggactcaaatcagcagaatgggggagacaaagcccggtctcaccccctaacctcatcctatctctttctccaaccctgactgcccactcctccacaaaccgtgacccatagccgcccccaccccataccttgatctaccatccatcctcttccccaatccaaaccccacagtctcttctctcccacaccctgccctccttgtttcagctgtctgaggtgcctcgcagggcctctcttacttgccccatgctcaccctttccatgctgtccccattctctcctttcaccatctctcctctccccctccttcatctctcctccctccccaaactcacttggcataattcacaacctcccacccaaacaatgggcctggtggacgtgcttcctgtgccctccctttagctatgcccacagatcactgagagggaccatctcccaagtggtgcagtttagaacttctctccctttttctccctcattccctctctcttcttgcagtccacttgctgaagaagttgtgtcatttctctggaagaatttccaaaattctggatttcttttttattttggagtatttcatcagctgaaaagtgattctcactttgagttttcttcctatatttgtatagtgagttcctttttccttcctctttatccctcctgttttactttatacctctctattccttgctcaaattattgcaaaagcctctatagaaagtcctctgtgatctgactcctgcagactcttccagatttttctgcccaaggcctttactgagctcaggactccagctaaatcaaaatacgcatgttctcacccagagtgacaaaatcctgcagataggtttaagacctagtggctcagagcagtagctactgggaagttaaaaggaaggggcttagaaaatgaatgggaccaaaggcatcacttctgatggagatgaagccatcttgaaagtgagtggtgtcctttggaggcatggtggatgaaaggcgcaaaggaagcaagaggttaaagataatggcccattagatacaacagcaagcccaagattccgaagaagacagacaactccccctagtaccacctagacattactttttaaagacattttacattattgtccagcagaaaaaggctgtcttggaccatgaaacagtaaactgtaactaaacacttcaacatgaatttgaaaataaataattgtggatataaaagaacaccagagatcagaaattcaaaaactcagaataaaaatgaaaaagctacaagcatatatgagaagagaactgactgaacttgggaaataatttgaacaaaaagataaatcttcacagatatgaatactaaattatatcttaatgaaaatagatatggtcacaagtacattaaggcacgtagaaggtaggagtaagaaaagctaagagaagcaaaacaaacaaagcaatattaaaggaagagccaaaaagacccagaaataaaatgacagataaagaagattgtcaaagaaaagatgatacaggtaagattggaactcatgaagacaaaagataagacagtggcatagagttaatatttaaaattcaaatattaaaactcaaataaaccccaaagaacttttggaaaacaaaagaaaaccttaaactttatcttgaaagggtctatcttgt

SEQ ID NO: 4214 - protein, 536 aa, Homo sapiens; identical to SEQ ID NO: 395

SEQ ID NO: 4215 - DNA, 1990 bp, Homo sapiens
ggagcgcggcgactatcacgccgcgtggcggacggacggactgacggacgcgcagccttacccgaaaggccatggcggagcacgcccctcgccgctgctgcctgggctgggacttcagcacgcagcaggtaaaggttgttgctgttgatgcagagttgaatgtcttctatgaggaaagtgtgcattttgacagagatcttccagaatttgggactcagggtggtgttcatgtgcacaaggatgggctgacggtcacttctccagtactaatgtgggtccaggcactggatatcatcttggagaagatgaaggcttcgggcttcgacttctctcaagtcctagccttgtccggggcgggccagcaacacggaagtatatactggaaggctggagcccagcaggcactgacaagcttatcaccagacctccggctacaccagcagctgcaggactgtttctccatcagcgactgcccggtgtggatggactccagcaccacagcccagtgccgccagctggaggctgctgtgggtggtgctcaggctctcagctgcctcacggggtcccgtgcctatgagcgttttacagggaaccaaattgcaaaaatttaccagcagaaccccgaggcctactcacatacggagagaatttctttggtcagtagctttgctgcttccctgttccttggctcttactcccctattgactacagtgatggttctggaatgaatttgttgcagatacaggataaagtctggtcccaggcttgccttggtgcctgtgcacctcatttagaggagaagcttagcccaccagtaccatcatgctcagttgtgggagccatttcttcctactacgtccagcgctacggatttcctccaggatgcaaagtggtggccttcactggggacaacccagcgtcgctggcaggcatgagactggaggaaggtgacattgcggtcagcctgggcaccagtgacaccctgtttctctggctccaagagcccatgcctgccctggaaggccacatcttctgcaacccggttgactcccagcactacatggcactcctgtgctttaaaaatggctccctcatgagagagaagatccgcaacgagtctgtatcccgttcctggagcgatttctctaaggcactgcagtccacagagatgggcaacggtggaaacctgggtttttattttgatgtaatggagatcacccctgaaattattggacgtcataggtttaacacagaaaaccacaaggttgcagcattccctggggatgtggaggttcgagcactaattgaaggacaattcatggccaagaggattcacgcagaaggcctgggctatcgagtcatgtccaagacaaagattttggccacaggaggagcatctcacaatagagaaatcttacaggtgcttgcagatgtgtttgatgccccggtgtatgttatagacactgccaactcggcctgtgtgggttctgcataccgagcttttcatggtcttgcaggtggaacagatgtgcccttttcagaggttgtgaagttagctccaaatcccagactagctgctaccccaagcccgggagcttctcaggtctacgaggcccttctcccccagtatgccaaactcgagcagagaatcttgtctcagacccgggggcctccggagtgaacaggcatccctgttgcccctgcctgcccagatttactgaccccatttgtcgacatggccccagacaggagggatccacttctctgttctgaacagctcttcctgcccctactgactccttggagtgtccaggaccatcttaaagccgccctcagcacatctgcatgaagatagataggcactcctgtccctgtgcccgtgtgccccagggcaggaaagcatctctcttttcctgtcttttatcccaggaggcaggacaacactgagactgggatatgtccaataaaaactatgacttttccccttgc

SEQ ID NO: 4216 - protein, 536 aa, Homo sapiens; identical to SEQ ID NO: 395

SEQ ID NO: 4217 - DNA, 3235 bp, Homo sapiens
ggagcgcggcgactatcacgccgcgtggcggacggacggactgacggacgcgcagccttacccgaaaggccatggcggagcacgcccctcgccgctgctgcctgggctgggacttcagcacgcagcaggtaaaggttgttgctgttgatgcagagttgaatgtcttctatgaggaaagtgtgcattttgacagagatcttccagaatttgggactcagggtggtgttcatgtgcacaaggatgggctgacggtcacttctccagtactaatgtgggtccaggcactggatatcatcttggagaagatgaaggcttcgggcttcgacttctctcaagtcctagccttgtccggggcgggccagcaacacggaagtatatactggaaggctggagcccagcaggcactgacaagcttatcaccagacctccggctacaccagcagctgcaggactgtttctccatcagcgactgcccggtgtggatggactccagcaccacagcccagtgccgccagctggaggctgctgtgggtggtgctcaggctctcagctgcctcacggggtcccgtgcctatgagcgttttacagggaaccaaattgcaaaaatttaccagcagaaccccgaggcctactcacatacggagagaatttctttggtcagtagctttgctgcttccctgttccttggctcttactcccctattgactacagtgatggttctggaatgaatttgttgcagatacaggataaagtctggtcccaggcttgccttggtgcctgtgcacctcatttagaggagaagcttagcccaccagtaccatcatgctcagttgtgggagccatttcttcctactacgtccagcgctacggatttcctccaggatgcaaagtggtggccttcactggggacaacccagcgtcgctggcaggcatgagactggaggaaggtgacattgcggtcagcctgggcaccagtgacaccctgtttctctggctccaagagcccatgcctgccctggaaggccacatcttctgcaacccggttgactcccagcactacatggcactcctgtgctttaaaaatggctccctcatgagagagaagatccgcaacgagtctgtatcccgttcctggagcgatttctctaaggcactgcagtccacagagatgggcaacggtggaaacctgggtttttattttgatgtaatggagatcacccctgaaattattggacgtcataggtttaacacagaaaaccacaaggttgcagcattccctggggatgtggaggttcgagcactaattgaaggacaattcatggccaagaggattcacgcagaaggcctgggctatcgagtcatgtccaagacaaagattttggccacaggaggagcatctcacaatagagaaatcttacaggtgcttgcagatgtgtttgatgccccggtgtatgttatagacactgccaactcggcctgtgtgggttctgcataccgagcttttcatggtcttgcaggtggaacagatgtgcccttttcagaggttgtgaagttagctccaaatcccagactagctgctaccccaagcccgggagcttctcaggtctacgaggcccttctcccccagtatgccaaactcgagcagagaatcttgtctcagacccgggggcctccggagtgaacaggcatccctgttgcccctgcctgcccagatttactgaccccatttgtcgacatggccccagacaggagggatccacttctctgttctgaacagctcttcctgcccctactgactccttggagtgtccaggaccatcttaaagccgccctcagcacatctgcatgaagatagataggcactcctgtccctgtgcccgtgtgccccagggcaggaaagcatctctcttttcctgtcttttatcccaggaggcaggacaacactgagactgggatatgtccaataaaaactatgacttttccccttgcagaggcagaattaaagctaatctagggactcaaatcagcagaatgggggagacaaagcccggtctcaccccctaacctcatcctatctctttctccaaccctgactgcccactcctccacaaaccgtgacccatagccgcccccaccccataccttgatctaccatccatcctcttccccaatccaaaccccacagtctcttctctcccacaccctgccctccttgtttcagctgtctgaggtgcctcgcagggcctctcttacttgccccatgctcaccctttccatgctgtccccattctctcctttcaccatctctcctctccccctccttcatctctcctccctccccaaactcacttggcataattcacaacctcccacccaaacaatgggcctggtggacgtgcttcctgtgccctccctttagctatgcccacagatcactgagagggaccatctcccaagtggtgcagtttagaacttctctccctttttctccctcattccctctctcttcttgcagtccacttgctgaagaagttgtgtcatttctctggaagaatttccaaaattctggatttcttttttattttggagtatttcatcagctgaaaagtgattctcactttgagttttcttcctatatttgtatagtgagttcctttttccttcctctttatccctcctgttttactttatacctctctattccttgctcaaattattgcaaaagcctctatagaaagtcctctgtgatctgactcctgcagactcttccagatttttctgcccaaggcctttactgagctcaggactccagctaaatcaaaatacgcatgttctcacccagagtgacaaaatcctgcagataggtttaagacctagtggctcagagcagtagctactgggaagttaaaaggaaggggcttagaaaatgaatgggaccaaaggcatcacttctgatggagatgaagccatcttgaaagtgagtggtgtcctttggaggcatggtggatgaaaggcgcaaaggaagcaagaggttaaagataatggcccattagatacaacagcaagcccaagattccgaagaagacagacaactccccctagtaccacctagacattactttttaaagacattttacattattgtccagcagaaaaaggctgtcttggaccatgaaacagtaaactgtaactaaacacttcaacatgaatttgaaaataaataattgtggatat

SEQ ID NO: 4218 - protein, 536 aa, Homo sapiens; identical to SEQ ID NO: 395

SEQ ID NO: 4219 - DNA, 3076 bp, Homo sapiens
gctacacttagtgactctgagggacatgcaaccctccccgcatgctgctgctgctgctgcacctacaatcctgccacccccaatgagatctgcccacccctcttggccgccttccccacgctcaggttttcctcactctttccctgggttccacgcgcccgcgtagcccgaactccgaccctgaggctccgcgtcccggcccccatcgcaggggcgcctctaggaaccagaatcccgcagatgactgcacagacaagatcgtgcccccaagttcggcgagccgggcgcccaccgcgcccccagcccacgcccccggagttcctgcgccacccacagcggccctgagcttcaatctgcactttcaaaacttcccagttgcctccagagccctgcagttgaagatcttgtctagcacatggttttgctgttttcctcaccccgaactccctccttggagggccatcgttctctgtctcagattccaccctccttatcacacaactagagcttcggaggaacgtgatggggctcccaactaaggagggaaagaccatcatagctcagggatgaggctccgagatcctcagataacattaattgtcctctgtcttctcttgacttggcacatccttgcttggagcagggcaggagcagctgaaagggaggtggcacctggaggtctcagtcatttcacttctctgagcctcagttttcccatatgcaaagtgaagaggtacactccctcagggttttgcatcttcttaatggcagaaacctagtcaaacaaaatattatgtaaatgttcactataggcagggcgaggtggctcaaacctgtaattccagcacttttagaggcccaggaggctcttgaggtcaggagttcgagaccagcctgaccaacatggcaaaaacctgtctctactaaataatacaaaaattagctgggcatggtgacacacacctgtaattccaactactcggtaggaggctgaggcaggagaatcgcttgaacacaggagggaggcggaggttgcagtgagctgagattgcaccactgcactccatcctaggtgacagagtgagactctctctcaaaaaaaaaacaagtttataaaggaatgtatattgttctgattgacattgaaatagggtcaactacccccggtcaccagagcagcaggaacacctcaggggccacactttggaggcactgcccagaaagatttctgggtctttaaaagtcccttccagtcctgggaaattctatgtgaaaatgatggtccctgcttgctataatccctacaggtgacttattatctaagccatttaacacaggattgaatactatgcgactgtgtgccaagcaagaagcagtgttgtatgggacaccctagctgtgtataaggtatctggtaataacacaggaggccacagtgatagactgtgataacggaagtaattccatatccagtttaagtgtcttttctagggagtataaatcgttatctccattccaatatggactgaaaggtatcgacttttatccatgtgccaaaaattagattggctggttcctctcttctactccataccaggtcaggtatcataataaggactcagagtggtccaagctgcccaaatatctgtgtcttccactctgacctgtctgggaaccccaaatttatatccaactgcttacttgacaactgcagttggtagcctatcaggcatctcaaatttgacctagccaaagcagaagtcctcattttccccgtaaatctcctccccagttttccctgtctgaatcaatggcataagcaactacaccattgctcaaatcagaaccttatgagtcctactgaaaccagccaaagagtcccatagacagttgtttttgtttttgtttttgtttttgtttttgagacagagtttggctcttattgccctcactggagtgcagtggcacgatctcggctcactgcgacctccacctcctgagttcaagtgattctcctgccgcagcctcccaagtagctggaattacaggcacgccaccatgcccagctaagttttgtatttttagtagatacagggtttcatcatgttggccaggctggtcttgaactcccaacttcaggtgacctgcctgcctcagcctcccaaagtgctgggattatagaagttgacccttttgcagttaaagctggaaacttacttgttttatccgagttccttcctcaggaaaggaccttcaggcctctcacaaaaagtatcaaagaactgaagccataaaaagtatcaaaagaactgaaaccagatcactgcactagatgctgggcccctcagtcaccatgattgcttccttgcccctcccatgttcctgttttcttacatattgttacatttctttcctgctatataaacccttggttttggtcagtcaaggagatggatttgagactgcactcccatctccttggctgcagcacctgattaaagccttcttccttggcaatacttgtcatctcagtgattggctttctgtgcaccgagcagcaggacctagaccaaacccctggtgtttcggtaacaatacttgattcctcccatatacagtccatcagcaaaatagcctcaaaagtgtatccaccatccgactacttttttccatgtacactactgcaacattgtcttatatctggactgttgcaatagcagtgaaccagaagggagcttaactggtcctctgaattcattcttgccttaaataaatcttccatatagtaaccaaagtgattccctgccatcattttgatcatgagctcatcaagcaaatactaggctggttgagaaaggtgataatggatatttgaaaaacgagttctatttgggttttctgttcttttgaacgactacaagattgctaaatatcacatttggtatcagacatcgggtgaccaaaaactgaaaggcaaaaaaaatctgaaaccccaaatgtctgctgtagaatttatggcagtgaattctgccattaaggcattcagtgtgttaggaccactattccctggcttccc

SEQ ID NO: 4220 - protein, 34 aa, Homo sapiens
MTAQTRSCPQVRRAGRPPRPQPTPPEFLRHPQRP

SEQ ID NO: 4221 - DNA, 2970 bp, Homo sapiens
agagccggcgagcgagcagcagggactgcgcctggcgcactcacttccgcgtcccgccgccctccggcccgcgcgcgccgatccgccgccgccatcggacaatgggccgccagccccagctgccgtgaacttcctgccgctgctcggccgcccgtgcgtcccggacggcgttcctgccaggcgccggccgggatcgcagctccggggaagcagcggaggacccagcgcctggaacgtacctgcgcctcagccgccgcgcgtttgctccggcccgactcgcggcctcggcgccctcccggccgattcagcttcacccggcccagtcggctgctgccttgctgtgagtttccgtgtttggttgcctaaggaggatgtgattttacttttttgctgttttctttttccttttataatttgaagaggagaaaagaactccgctgagcaggcccgggacggcgaagtgccaccagctaccccaacaaggacgtctccaggggaaagggagttggaagcaaacttggtccagctggcgttgaggtctcaacttcggctggactcttaaatcctggggtcatgcccttcacgctaggcaggtggaagtctttacttgtactgggccggacttgagccccgacccttcgccagcatctccccgctgccctcaacacacacacacacacacacacacacacacacacacacacacacacacacacacacacacacacacggcacctgggctaggcccggacacctgtctgcagcatggataagtatgacgacctgggcctggaggccagtaaattcatcgaggacctgaacatgtatgaggcctctaaggatgggctcttccgagtggacaagggtgcaggcaacaaccccgagtttgaggaaactcgcagggtgttcgccaccaagatggccaaaatccacctccagcagcagcagcagcagctcctgcaggaggagactctgcccagggggagtagaggccctgtcaatggagggggccgcctgggcccacaggcccgttgggaagttgtgggcagcaagctgactgtggatggtgctgccaagcctcctcttgctgcctcgacaggggcacctggggcagtcaccaccctcgctgctgggcagcccccgtacccaccgcaggagcagagatccaggccatacctgcatggcacgaggcatggcagccaggactgtggttccagggagagcctggcgacttctgagatgtctgctttccaccagccaggcccctgtgaggatccttcctgcctcactcatggagactattatgacaacctctccttggcaagcccaaagtggggtgacaaaccaggagtgtcccccagcatcggcctgagtgtagggagtgggtggcctagctccccggggagtgacccaccactgcccaaaccctgcggggaccatcccctaaatcaccgacagctctccctgagctccagcaggtcttctgagggtagcctcggtggtcagaatagtggcattggtggccgcagcagcgagaagccaacaggcctttggtccactgcctcctcccagcgggtgagccctggcctgccttccccaaacttggagaacggagcaccagctgtggggcctgttcagcccaggaccccttctgtgtcagcacccttggccctgagctgccccaggcaaggaggtcttccaagatcaaactcggggctggggggtgaggtttcaggtgtgatgtccaaacccaatgtggacccccaaccctggttccaggatgggcccaaatcttacctttccagttctgccccgtcatcctcgccagctggtctggacggttcacagcagggtgcggtccctgggctggggccgaagcctggctgcacagaccttggcactggtcccaagctcagccccaccagtcttgtccatccagtgatgtccaccctgcctgagttatcttgtaaagagggtcccctgggctggtcttctgatggtagcctgggatctgtgctcctggacagccccagctcccctagggtaaggctgccctgccagcccctcgtcccaggtcctgagctgagaccctctgctgctgagttgaaattagaagccctcacccaacgtctggagcgagagatggatgctcacccgaaggctgattactttggagcctgtgtgaaatgcagcaaaggggtgtttggggctggccaggcctgtcaggccatggggaacctctaccatgacacatgcttcacctgtgcagcttgcagccggaagctgagaggaaaagccttttattttgtcaacggcaaagtgttttgtgaagaagacttcctgtactctggtttccagcagtcggctgacaggtgttttctttgtggacatctgatcatggacatgatcctgcaagccctggggaagtcctaccaccccggctgtttccgctgtgtcatctgtaatgagtgtttggatggggtgcccttcaccgtggactcagagaacaagatctactgtgtccgagattaccacaaggtgctggcccccaagtgtgcagcctgtgggcttcccatccttccacctgaggtaagatgcccttccagacatgctcccaggggcttctaagacatgaatatctccctgggctcatttacaagatccatgtcctgtccttacagcttttaaggtatccttttaaaaatctcaactctggcctggtgcagtggctcacgcctgtaatcccaccccttttaggaggcccaggcaggaaaattgcttgaggcctggagtttaagaacagcctgggcaacatagcaagacctcatctctacaaaaaattgttaaaaattggccaagtgtggtggcatgtgcctgtagtcctagctgcttgagcccaagagtttgaggctgcagcgagctatgatggtgctactgcattccagcaggtgacagcaagaccttgtctcc

SEQ ID NO: 4222 - protein, 620 aa, Homo sapiens
MDKYDDLGLEASKFIEDLNMYEASKDGLFRVDKGAGNNPEFEETRRVFATKMAKIHLQQQQQQLLQEETLPRGSRGPVNGGGRLGPQARWEVVGSKLTVDGAAKPPLAASTGAPGAVTTLAAGQPPYPPQEQRSRPYLHGTRHGSQDCGSRESLATSEMSAFHQPGPCEDPSCLTHGDYYDNLSLASPKWGDKPGVSPSIGLSVGSGWPSSPGSDPPLPKPCGDHPLNHRQLSLSSSRSSEGSLGGQNSGIGGRSSEKPTGLWSTASSQRVSPGLPSPNLENGAPAVGPVQPRTPSVSAPLALSCPRQGGLPRSNSGLGGEVSGVMSKPNVDPQPWFQDGPKSYLSSSAPSSSPAGLDGSQQGAVPGLGPKPGCTDLGTGPKLSPTSLVHPVMSTLPELSCKEGPLGWSSDGSLGSVLLDSPSSPRVRLPCQPLVPGPELRPSAAELKLEALTQRLEREMDAHPKADYFGACVKCSKGVFGAGQACQAMGNLYHDTCFTCAACSRKLRGKAFYFVNGKVFCEEDFLYSGFQQSADRCFLCGHLIMDMILQALGKSYHPGCFRCVICNECLDGVPFTVDSENKIYCVRDYHKVLAPKCAACGLPILPPEVRCPSRHAPRGF

SEQ ID NO: 4223 - DNA, 6988 bp, Homo sapiens
cgagcagcagggactgcgcctggcgcactcacttccgcgtcccgccgccctccggcccgcgcgcgccgatccgccgccgccatcggacaatgggccgccagccccagctgccgtgaacttcctgccgctgctcggccgcccgtgcgtcccggacggcgttcctgccaggcgccggccgggatcgcagctccggggaagcagcggaggacccagcgcctggaacgtacctgcgcctcagccgccgcgcgtttgctccggcccgactcgcggcctcggcgccctcccggccgattcagcttcacccggcccagtcggctgctgccttgctgtgagtttccgtgtttggttgcctaaggaggatgtgattttacttttttgctgttttctttttccttttataatttgaagaggagaaaagaactccgctgagcaggcccgggacggcgaagtgccaccagctaccccaacaaggacgtctccaggggaaagggagttggaagcaaacttggtccagctggcgttgaggtctcaacttcggctggactcttaaatcctggggtcatgcccttcacgctaggcaggtggaagtctttacttgtactgggccggacttgagccccgacccttcgccagcatctccccgctgccctcaacacacacacacacacacacacacacacacacacacacacacacacacacacacacacacacacacggcacctgggctaggcccggacacctgtctgcagcatggataagtatgacgacctgggcctggaggccagtaaattcatcgaggacctgaacatgtatgaggcctctaaggatgggctcttccgagtggacaagggtgcaggcaacaaccccgagtttgaggaaactcgcagggtgttcgccaccaagatggccaaaatccacctccagcagcagcagcagcagctcctgcaggaggagactctgcccagggggagtagaggccctgtcaatggagggggccgcctgggcccacaggcccgttgggaagttgtgggcagcaagctgactgtggatggtgctgccaagcctcctcttgctgcctcgacaggggcacctggggcagtcaccaccctcgctgctgggcagcccccgtacccaccgcaggagcagagatccaggccatacctgcatggcacgaggcatggcagccaggactgtggttccagggagagcctggcgacttctgagatgtctgctttccaccagccaggcccctgtgaggatccttcctgcctcactcatggagactattatgacaacctctccttggcaagcccaaagtggggtgacaaaccaggagtgtcccccagcatcggcctgagtgtagggagtgggtggcctagctccccggggagtgacccaccactgcccaaaccctgcggggaccatcccctaaatcaccgacagctctccctgagctccagcaggtcttctgagggtagcctcggtggtcagaatagtggcattggtggccgcagcagcgagaagccaacaggcctttggtccactgcctcctcccagcgggtgagccctggcctgccttccccaaacttggagaacggagcaccagctgtggggcctgttcagcccaggaccccttctgtgtcagcacccttggccctgagctgccccaggcaaggaggtcttccaagatcaaactcggggctggggggtgaggtttcaggtgtgatgtccaaacccaatgtggacccccaaccctggttccaggatgggcccaaatcttacctttccagttctgccccgtcatcctcgccagctggtctggacggttcacagcagggtgcggtccctgggctggggccgaagcctggctgcacagaccttggcactggtcccaagctcagccccaccagtcttgtccatccagtgatgtccaccctgcctgagttatcttgtaaagagggtcccctgggctggtcttctgatggtagcctgggatctgtgctcctggacagccccagctcccctagggtaaggctgccctgccagcccctcgtcccaggtcctgagctgagaccctctgctgctgagttgaaattagaagccctcacccaacgtctggagcgagagatggatgctcacccgaaggctgattactttggagcctgtgtgaaatgcagcaaaggggtgtttggggctggccaggcctgtcaggccatggggaacctctaccatgacacatgcttcacctgtgcagcttgcagccggaagctgagaggaaaagccttttattttgtcaacggcaaagtgttttgtgaagaagacttcctgtactctggtttccagcagtcggctgacaggtgttttctttgtggacatctgatcatggacatgatcctgcaagccctggggaagtcctaccaccccggctgtttccgctgtgtcatctgtaatgagtgtttggatggggtgcccttcaccgtggactcagagaacaagatctactgtgtccgagattaccacaaggtgctggcccccaagtgtgcagcctgtgggcttcccatccttccacctgagggctcagatgagaccatccgtgtcgtgtccatggacagagactaccacgtggagtgttaccactgcgaggactgtggtctggagctcaatgatgaagatggccaccgctgttatccgctggaggaccacctgttctgtcactcctgccacgtgaagaggctggagaagagaccctcatctacagcccttcaccagcaccacttctagccagagccacttgcagacatcacggcaggggatgaggagccggggttgctgctgctgcttccggtggcccctggggtggaagtggggtaggggaagaggaggggcaggagggagagttcctgtgagcatgtggggggtgcctttcctttaaccagggaggtgaacactacctgcctcctgcgtgtattttccaagtgcttttctctgttgccacattttcctcaggttactcaggaaaatgctccagcatgtgcgagcacatgacctgaggttgcatcatagcaccaaaggaatcctcctgtcccctctgggaacatttcatgcttcagagggagaggtttttattgagcttgtttcacaatatccccttgaagggacagctcagctgccaatacattcaaccctttctcttccttcaggaaaatacctatacccaaatgttccctcccccgacatatatcatggcatgatttaaggcttcttttcacctgagagcttcagttcttctgcagaatggctgcaaatttaattgcattaaggcaagaaggaagctctaatgtgtgctttgtatcctaagataaatttgcttagaaaaccagagtcaagatttgaaataggtgaggcagggtttcctccttagacactgacagcattctctgtaccccttcaaatccttactctcctaaaggcagctgagtccgcgacagaaatttgccctatgtgagtaaaacatactttgggagaagaacttggtgcaggcaccaggatttttttttttgcccacgtgtttgcgctgtttttctctggagttctcaagagttggtgacttggaaggccgcttctgcaaggcaagtctcaggaacccatgcaggtacatcgcttgcacctgtttttagcttatttaatgacgggcttttgggaagagctgcccgcatactgagagacagcttcttataaacaaggagagtttttgtgtgtgcgagatctctaagccagcgtgggagggagcgcctcaggataagttattatattcatttcgttggtttctctcctgcccaattcttggcacaggcattatgtttgaagaaaccaggataaggtacactgcttttgtctgtttaatttttttagttgtttcccttcactttcagtcttccacacacaaaaaatacctcacagagcttcaccaaatcacagattcaggaggaatttggctttcacactggactcagataccttcttcagtgtgttggaaatcactggcttcacacaggcccaactccagctggtcagggcagagtgatcgtaactaaaggtcagtggggaatagatccgattcagtgcttttgccttatgcatttcagcatcctggctccccagggtggcaggagctgagggagggccacacactggcaagatttcaagaccactctctgcactgaagaggtaaaatttgcactgcaagtcacatccctgaggccagaggtcagtaccctttggtatttcgattagaagaagctgcaaaagaaaggcagcccattttaccattgccagccaggccggggacacaggagccggtgtgtgcactctgcctcctcaccttgcacccagagcaagaggactgggtgctgggctgcagaggccggtcagtggagcccctagcacgtgtgaactcaggcttttcattgggcccggctccacttctaggccatgttttgactcatttggtaaccattgcctgtaagcagcacagaattggtgccatggattatcttttccatgttgatggaattcattctgttggaatcctttggccagatgtcacttcagccagggtgtgcatcatcattggttctttttcacaggctgagcctcctgaaaacccatgaacgctggggctggggaagtgaaccctgaggtggggaccctctcttcccatcaaatcatccagctcagtgtggggcgtggcaggggggtaaatgaagccagccaatgtgttaacctgtctctgtcaacctaagaatgttggccttactgacacacctttgctccatgttcaagaccagaagtagctgggatttgtttgcaaattgggtaattagtttaaaaatctgtgattacatttttaaatgaaattttcaaagtggcctagattgaggtgattcagataggtttgcgaatataccattttatattgttgagaaagaacaaaaagggaatttccagatgtcctagaaatcctagcaacagatttctctggttgtcagtttccctggagaaggcgccagataggaatctccaatcagttgtttttctcttcgcttcaggcccttacacaaaagccatgaagagatgttcacctacccggtattttaaatgttctgtaaattattagccaaatagaactgtaatggggttgtatttatgggcgcctagaaagaaaacacaaggacttggtaggccaggaagaaaagattttaaaatttagaatgaatagcccttctgggttttctttttgacaattcttggacttgaggtaaaacaaggaggattgtggccggatttcagatcccaaagccagcctccatcttaggcctttgcctcattgtgccttttaggttttcttacccaccgtctcctgttttgtcttttttttcttttctcctacccctatcttgggacattcagaaactgcctgggtggtttgagaagagacaacccagtttgatctgcaatacaaggatccattcgtaatctctctctcactgatgttattcccccatctgccgtcttggttcatctcaccacagaagggcatttagtcctacccagccatcggctgcgtatgacagcaggatggcacttcccatttctctgtggttagtgctcgagtgaaaacctctttcagctgagtcctctgaggttctgctgttgagtcctgggtggctgatggaatgattgaggaggtctggtcaccctcaagcgccgtcatcgccttgtttccatgggcttctgtcacacaaaatgaagaacagaaatgttaggacttaagagaatgtttggaattcacacctctttgcagtcctttcaaggctgctgctctgtgctgtgtcccatgcatgtgaaagtagagctgtgatggctgctgggacgcttgcaaagatcatgtgtgagaattgagcacaagaccacaaattattactgcttgatgcgcttgttaaaactctatctgccaggaaaccaaattttcttttcttttctttttttttttgagacagggcctcactctgttgcccaggctggagtgcagtggcgcgatctcagctcactgcagcctccacctactgggctcaagtgatcctcccacctcagcctcccgagtagccgggaccacaggcgtgtatgactggctacgcctggctaatttttgtatttttaatagagacgagtttcaccatgttgcccaggatggtctggaactcctgggctcaagtgatctgcccacttccgcctcccaaagtgttgggattatggccattagccactgtacctggcacaatttttttttgtaccctcctttatgccaagaatcagtcctaatttctttactatgtgaagtaacttttaaaggtaatagaaaaggccaggcacagtggctcatgcctgtaatcccaggcgccgtggctcacgcctgtaatcccagcactttgagaggctgaggcgggtggatcacttaaggtcaggagttagagaccagcctgaccaacatggtgaaacactgtctctactaaaaatacaaaattagctgggtttggtggcgcacgcctgtaatcccagctacctgagaggttgaggcaggagaatcgcttgaacctgggaggcagaggttgcagtgagccgagatggtgccattgcactccgacctgggcaacagagcgaaacactgtctcaaaaaaaaaaaaaaaagtaacagaaaaaagagtgaaatatattagctatcttttattctgagccaaaacttgacagatgtgggaaatcttcatatagtgtatgaaaatttcattgtacagggaaattattttcctctgtgtcttttcttttactataaagtgattcagaattttactgttactataaaattatgcaaagtattgtgacaaaactgcatcaatttgttgactattaaagtgctccttgaacatta

SEQ ID NO: 4224 - protein, 676 aa, Homo sapiens; identical to SEQ ID NO: 397

SEQ ID NO: 4225 - DNA, 440 bp, Homo sapiens
cgctccagacgttgggtgagggcttctaatttcaactcagcagcagagggtctcagctcaggacctgggacgaggggctggcagggcagccttaccctaggggagctggggctgtccaggagcacagatcccaggctaccatcagaagaccagcccaggggaccctctttacaagataactcaggcagggtggacatcactggatggacaagactggtggggctgagcttgggaccagtgccaaggtctgtgcagccaggcttcggccccagcccagggaccgcaccctgctgtgaaccgtccagaccagctggcgaggatgacggggcagaactggaaaggcaaccaaacacggaaactcacagcaaggcagcagccgactgggccgggtgaagctgaatcggccgggagggcgccgaggccgcgagtcgggccggagc

SEQ ID NO: 4226 - protein, 39 aa, Homo sapiens
MTGQNWKGNQTRKLTARQQPTGPGEAESAGRAPRPRVGP

SEQ ID NO: 4227 - DNA, 3981 bp, Homo sapiens
atgatctcattcctttttcccatgagatatttttacatcctctttttgtcctaagtcttcggaatctgcatttacactgacagcacattttaagtggttcacagcaagtgccttgtggcagtgtctcctgtgttggacaggcctccacggggcaggagctgtgtttctgcactggcatttcctgcctatacagaaacacacagcaccctctgctgattttggggactgtggccttcaggtcagtcttgcagtctgttttgttttgcttcccctggacatgtctgcctccccacaggactgtggtctggagctcaatgatgaagatggccaccgctgttatccgctggaggaccacctgttctgtcactcctgccacgtgaagaggctggagaagagaccctcatctacagcccttcaccagcaccacttctagccagagccacttgcagacatcacggcaggggatgaggagccggggttgctgctgctgcttccggtggcccctggggtggaagtggggtaggggaagaggaggggcaggagggagagttcctgtgagcatgtggggggtgcctttcctttaaccagggaggtgaacactacctgcctcctgcgtgtattttccaagtgcttttctctgttgccacattttcctcaggttactcaggaaaatgctccagcatgtgcgagcacatgacctgaggttgcatcatagcaccaaaggaatcctcctgtcccctctgggaacatttcatgcttcagagggagaggtttttattgagcttgtttcacaatatccccttgaagggacagctcagctgccaatacattcaaccctttctcttccttcaggaaaatacctatacccaaatgttccctcccccgacatatatcatggcatgatttaaggcttcttttcacctgagagcttcagttcttctgcagaatggctgcaaatttaattgcattaaggcaagaaggaagctctaatgtgtgctttgtatcctaagataaatttgcttagaaaaccagagtcaagatttgaaataggtgaggcagggtttcctccttagacactgacagcattctctgtaccccttcaaatccttactctcctaaaggcagctgagtccgcgacagaaatttgccctatgtgagtaaaacatactttgggagaagaacttggtgcaggcaccaggatttttttttttgcccacgtgtttgcgctgtttttctctggagttctcaagagttggtgacttggaaggccgcttctgcaaggcaagtctcaggaacccatgcaggtacatcgcttgcacctgtttttagcttatttaatgacgggcttttgggaagagctgcccgcatactgagagacagcttcttataaacaaggagagtttttgtgtgtgcgagatctctaagccagcgtgggagggagcgcctcaggataagttattatattcatttcgttggtttctctcctgcccaattcttggcacaggcattatgtttgaagaaaccaggataaggtacactgcttttgtctgtttaatttttttagttgtttcccttcactttcagtcttccacacacaaaaaatacctcacagagcttcaccaaatcacagattcaggaggaatttggctttcacactggactcagataccttcttcagtgtgttggaaatcactggcttcacacaggcccaactccagctggtcagggcagagtgatcgtaactaaaggtcagtggggaatagatccgattcagtgcttttgccttatgcatttcagcatcctggctccccagggtggcaggagctgagggagggccacacactggcaagatttcaagaccactctctgcactgaagaggtaaaatttgcactgcaagtcacatccctgaggccagaggtcagtaccctttggtatttcgattagaagaagctgcaaaagaaaggcagcccattttaccattgccagccaggccggggacacaggagccggtgtgtgcactctgcctcctcaccttgcacccagagcaagaggactgggtgctgggctgcagaggccggtcagtggagcccctagcacgtgtgaactcaggcttttcattgggcccggctccacttctaggccatgttttgactcatttggtaaccattgcctgtaagcagcacagaattggtgccatggattatcttttccatgttgatggaattcattctgttggaatcctttggccagatgtcacttcagccagggtgtgcatcatcattggttctttttcacaggctgagcctcctgaaaacccatgaacgctggggctggggaagtgaaccctgaggtggggaccctctcttcccatcaaatcatccagctcagtgtggggcgtggcaggggggtaaatgaagccagccaatgtgttaacctgtctctgtcaacctaagaatgttggccttactgacacacctttgctccatgttcaagaccagaagtagctgggatttgtttgcaaattgggtaattagtttaaaaatctgtgattacatttttaaatgaaattttcaaagtggcctagattgaggtgattcagataggtttgcgaatataccattttatattgttgagaaagaacaaaaagggaatttccagatgtcctagaaatcctagcaacagatttctctggttgtcagtttccctggagaaggcgccagataggaatctccaatcagttgtttttctcttcgcttcaggcccttacacaaaagccatgaagagatgttcacctacccggtattttaaatgttctgtaaattattagccaaatagaactgtaatggggttgtatttatgggcgcctagaaagaaaacacaaggacttggtaggccaggaagaaaagattttaaaatttagaatgaatagcccttctgggttttctttttgacaattcttggacttgaggtaaaacaaggaggattgtggccggatttcagatcccaaagccagcctccatcttaggcctttgcctcattgtgccttttaggttttcttacccaccgtctcctgttttgtcttttttttcttttctcctacccctatcttgggacattcagaaactgcctgggtggtttgagaagagacaacccagtttgatctgcaatacaaggatccattcgtaatctctctctcactgatgttattcccccatctgccgtcttggttcatctcaccacagaagggcatttagtcctacccagccatcggctgcgtatgacagcaggatggcacttcccatttctctgtggttagtgctcgagtgaaaacctctttcagctgagtcctctgaggttctgctgttgagtcctgggtggctgatggaatgattgaggaggtctggtcaccctcaagcgccgtcatcgccttgtttccatgggcttctgtcacacaaaatgaagaacagaaatgttaggacttaagagaatgtttggaattcacacctctttgcagtcctttcaaggctgctgctctgtgctgtgtcccatgcatgtgaaagtagagctgtgatggctgctgggacgcttgcaaagatcatgtgtgagaattgagcacaagaccacaaattattactgcttgatgcgcttgttaaaactctatctgccaggaaaccaaattttcttttcttttctttttttttttgagacagagcgaaacactgtctcaaaaaaaaaaaaaaaagtaacagaaaaaagagtgaaatatattagctatcttttattctgagccaaaacttgacagatgtgggaaatcttcatatagtgtatgaaaatttcattgtacagggaaattattttcctctgtgtcttttcttttactataaagtgattcagaattttactgttactataaaattatgcaaagtattgtgacaaaactgcatcaatttgttgactattaaagtgctccttgaacatta

SEQ ID NO: 4228 - protein, 48 aa, Homo sapiens
MRLLKLYLPGNQIFFSFLFFFETERNTVSKKKKKVTEKRVKYISYLLF

SEQ ID NO: 4229 - DNA, 1583 bp, Homo sapiens
ccccgcccacccaaaagtgggtgaaaggtcggcggcgccggcactgcagctggggctgagaagccaggacggcccgagaactgacagacggagtgacagacggactgaccatggccgaccagccaaaacccatcagcccgctcaagaacctgctggccggcggctttggcggcgtgtgcctggtgttcgtcggtcaccctctggacacggtcaaggtccgactgcagacacagccaccgagtttgcctggacaacctcccatgtactctgggacctttgactgtttccggaagactctttttagagagattcaggcttcttcaggagaaagcaagtacactggtaccttggactgtgcaaagaagctgtaccaggagtttgggatccgaggcatctacaaagggactgtgcttacccttatgcgagatgtcccagctagtggaatgtatttcatgacatatgaatggctgaaaaatatcttcactccggagggaaagagggtcagtgagctcagtgcccctcggatcttggtggctgggggcattgcagggatcttcaactgggctgtggcaatccccccagatgtgctcaagtctcgattccagactgcacctcctgggaaatatcctaatggtttcagagatgtgctgagggagctgatccgggatgaaggagtcacatccttgtacaaagggttcaatgcagtgatgatccgagccttcccagccaatgcggcctgtttccttggctttgaagttgccatgaagttccttaattgggccacccccaacttgtgaggctgaaggctgctcaagttcacttctggatgctggaagctgtcgttgaggagaaggagtagtaagcagaactaagcagtcttggagggcaaggggaggggaatggtgagatccgagccctgtgcatggacttggtgagactgttgccttaatgacatcctgcaccgtgtataacttagtgtgtcattttgaaacttgaattcattcttatcaatttaagggatcttaaaaggatttggaaatggaacaagtagcttccagaccagatactacctgtggcaagaatgctgcctaccagttaactgctggtcctaccacagtcaaagtattcctcattaaagagagaatctcaggttctcactggaggcactgtgcatattttcaaccagatcaccaggagctgagatcttcttcagtccctagccaggaatacccatttgatttccagggtgccatctaatcctgggctgtacatgtggatatggacttgaggcccacctctgtgtccaagtggattgagcatatatgcctaggaggagatagactgttaatcgttggattttgattttttttttttatgcctgcaaataatcaaaagtaaaactggagtagcctaattttctgggagcaggtggagaactttccctcctacacagtgaggacagtcccagtctgctgggataagtgagaaagcccagggtgtaggaaggccctttttacatactcttttctcatgagagctcactattttaacaataaacaataaacgttgtttctaatttttgc

SEQ ID NO: 4230 - protein, 228 aa, Homo sapiens
MADQPKPISPLKNLLAGGFGGVCLVFVGHPLDTVKVRLQTQPPSLPGQPPMYSGTFDCFRKTLFREIQASSGESKYTGTLDCAKKLYQEFGIRGIYKGTVLTLMRDVPASGMYFMTYEWLKNIFTPEGKRVSELSAPRILVAGGIAGIFNWAVAIPPDVLKSRFQTAPPGKYPNGFRDVLRELIRDEGVTSLYKGFNAVMIRAFPANAACFLGFEVAMKFLNWATPNL

SEQ ID NO: 4231 - DNA, 1867 bp, Homo sapiens
gcagccccgggcggaagccctaccgtgccaactgggccctcctcccgacctgccccgggctcgtgccccgcccacccaaaagtgggtgaaaggtcggcggcgccggcactgcagctggggctgagaagccaggacggcccgagaactgacagacggagtgacagacggactgaccatggccgaccagccaaaacccatcagcccgctcaagaacctgctggccggcggctttggcggcgtgtgcctggtgttcgtcggtcaccctctggacacggtcaaggtccgactgcagacacagccaccgagtttgcctggacaacctcccatgtactctgggacctttgactgtttccggaagactctttttagagagggcatcacggggctatatcggggaatggctgcccctatcatcggggtcactcccatgtttgccgtgtgcttctttgggtttggtttggggaagaaactacaacagaaacacccagaagatgtgctcagctatccccagctttttgcagctgggatgttatctggcgtattcaccacaggaatcatgactcctggagaacggatcaagtgcttattacagattcaggcttcttcaggagaaagcaagtacactggtaccttggactgtgcaaagaagctgtaccaggagtttgggatccgaggcatctacaaagggactgtgcttacccttatgcgagatgtcccagctagtggaatgtatttcatgacatatgaatggctgaaaaatatcttcactccggagggaaagagggtcagtgagctcagtgcccctcggatcttggtggctgggggcattgcagggatcttcaactgggctgtggcaatccccccagatgtgctcaagtctcgattccagactgcacctcctgggaaatatcctaatggtttcagagatgtgctgagggagctgatccgggatgaaggagtcacatccttgtacaaagggttcaatgcagtgatgatccgagccttcccagccaatgcggcctgtttccttggctttgaagttgccatgaagttccttaattgggccacccccaacttgtgaggctgaaggctgctcaagttcacttctggatgctggaagctgtcgttgaggagaaggagtagtaagcagaactaagcagtcttggagggcaaggggaggggaatggtgagatccgagccctgtgcatggacttggtgagactgttgccttaatgacatcctgcaccgtgtataacttagtgtgtcattttgaaacttgaattcattcttatcaatttaagggatcttaaaaggatttggaaatggaacaagtagcttccagaccagatactacctgtggcaagaatgctgcctaccagttaactgctggtcctaccacagtcaaagtattcctcattaaagagagaatctcaggttctcactggaggcactgtgcatattttcaaccagatcaccaggagctgagatcttcttcagtccctagccaggaatacccatttgatttccagggtgccatctaatcctgggctgtacatgtggatatggacttgaggcccacctctgtgtccaagtggattgagcatatatgcctaggaggagatagactgttaatcgttggattttgattttttttttttatgcctgcaaataatcaaaagtaaaactggagtagcctaattttctgggagcaggtggagaactttccctcctacacagtgaggacagtcccagtctgctgggataagtgagaaagcccagggtgtaggaaggccctttttacatactcttttctcatgagagctcactattttaacaataaacaataaacgttgtttctaatttttgc

SEQ ID NO: 4232 - protein, 301 aa, Homo sapiens; identical to SEQ ID NO: 401

SEQ ID NO: 4233 - DNA, 1626 bp, Homo sapiens
gagcccgcgagctggggataccctccacaggcgggcgttaaaccgcgcgggcagcgctgcgagagctcccaaagatgactcgagtggtgagccccgaggcggcgcgtttccccgccgcgccagacagggagagagggcctagatgtgccggcgccggttggtcagaggcggtggcctctgacctttccgagagctgagaaggcggcgggaggaaaaaaggcagacacacgctgggcgcccggccgctgacggcgggtaatgctcggacaacgtgccggcgacggggagcgcccgggcctcccgggcgacggcgaaggcggagtcccggcccggccagggaggcgcgcggagaggcccccccagcggccagccaaggtaaacaaggccgtgacgtgcgccgcgcacttaccgggagctgcggcctcgcggccgctgagcccgaacaagccagaccgggtcaggccgggccagagggaccggattggggcgaagcggcagcggaggcggcgggccgacgccggtcaagcccgcgctgcttcctccagaagagtcgtccccacagctccggaagtgcttggcgccgttgcgtcacttccggatcggggtcgacccacggtcgctcgggtcgcgacaggctcccggctagagggcctgtttagcgccgcctccttgaaacttagcgctctgacccagagtctgaccagggtacggcaggcgccgaccgcgtctggagccactattcgcctaccagcgtctcccgtcgagatgtttttaaccagcgcgtttctcaccggcttctcatttcactgtttgtactccgggatcgggcacggagaagacatcctggcgtcagtggagcagataaccattgtttctcggccgctatctggtcagaggggagctgggccgggaaattctgcctacaccccgaggcggtcgcagggtggccccagagccgcaaccacaccaggctttcgcttcccctgccgaggcctcgttcgccgcgcagttctccgacttacggtcaccgtgcaagattgcatcttaactgccttgcttgcagtttcttttcacagtataggagttgtcatcatgacttccagttaccttctgggaccggttgtcaaatgatgtggctagagacggaggctcactcagattgttgctgcaccacaatggaaatgccagtatgaagccgctgatgttaggaaggctccaggttgtgcaattccatagacaacaaatcaaatcatttccaaccatactggagtcgcgtatatacatattcaagacacctgtgcaggccgggcgcggtggctcaagcctgtaatcccagcactttgggaggccgaggcgagtggatcacgaggtcaggagatcgagaccatcctggctaacacggtgaaaccccgtctgtactaaaagtacaaaaaaattagccggacgtggtggcgggcgcctgtagtcccagctactcgggaggctgaggcaggagaatggcgtgaacccgggaggcggagcttgcagtgagtcgagatggcgccactgcactccagcctgggcgacagagcgagactctgtctcaaaataaaataaaataaaataaaaaataaaacaaataaagac

SEQ ID NO: 4234 - protein, 290 aa, Homo sapiens; identical to SEQ ID NO: 403

SEQ ID NO: 4235 - DNA, 1186 bp, Homo sapiens
ctgcgcggcgaacgaggcctcggcaggggaagcgaaagcctggtgtggttgcggctctggggccaccctgcgaccgcctcggggtgtaggcagaatttcccggcccagctcccctctgaccagatagcggccgagaaacaatggttatctgctccactgacgccaggatgtcttctccgtgcccgatcccggagtacaaacagtgaaatgagaagccggtgagaaacgcgctggttaaaaacatctcgacgggagacgctggtaggcgaatagtggctccagacgcggtcggcgcctgccgtaccctggtcagactctgggtcagagcgctaagtttcaaggaggcggcgctaaacaggccctctagccgggagcctgtcgcgacccgagcgaccgtgggtcgaccccgatccggaagtgacgcaacggcgccaagcacttccggagctgtggggacgactcttctggaggaagcagcgcgggcttgaccggcgtcggcccgccgcctccgctgccgcttcgccccaatccggtccctctggcccggcctgacccggtctggcttgttcgggctcagcggccgcgaggccgcagctcccgatggaaatcatattatgtagaatacttgggtgacatctgcctgagagatctccaagaattacagattgagtctcgctctgttgcccaggctggagtgcagtggtgcaatctctgctcactgcaacctccgtctcccgagttcaagcagttctcctgcctcagcctcctgagtagctgggattacaggtgcatgccatcatgcctagctaatttttgtattgttagtagagatggggtttcacgtgttagccaggatggtctggatctcctgacctcgtgatctgcctgcctcggcctcccaaagtgctgggattacaggtgtgagccactgcgcccagcctaatttttgtatttttagtagagatgggattttgccatgttggctaggctggcctcaatctcctggcctcaggtgatctggccaccttggtctcccaaagtgccgggattttttttctttttttctttttttttttttgagacggagtctcgctctgtcgcccagcctggagtgcagtggcgcgatctcggctcactgcaagctccgcctcccgggttcacaccattctcctgcctcagcctcccc

SEQ ID NO: 4236 - protein, 69 aa, Homo sapiens
MLARLASISWPQVIWPPWSPKVPGFFFFFSFFFFETESRSVAQPGVQWRDLGSLQAPPPGFTPFSCLSL

SEQ ID NO: 4237 - DNA, 1997 bp, Homo sapiens
ctgcgcggcgaacgaggcctcggcaggggaagcgaaagcctggtgtggttgcggctctggggccaccctgcgaccgcctcggggtgtaggcagaatttcccggcccagctcccctctgaccagatagcggccgagaaacaatggttatctgctccactgacgccaggatgtcttctccgtgcccgatcccggagtacaaacagtgaaatgagaagccggtgagaaacgcgctggttaaaaacatctcgacgggagacgctggtaggcgaatagtggctccagacgcggtcggcgcctgccgtaccctggtcagactctgggtcagagcgctaagtttcaaggaggcggcgctaaacaggccctctagccgggagcctgtcgcgacccgagcgaccgtgggtcgaccccgatccggaagtgacgcaacggcgccaagcacttccggagctgtggggacgactcttctggaggaagcagcgcgggcttgaccggcgtcggcccgccgcctccgctgccgcttcgccccaatccggtccctctggcccggcctgacccggtctggcttgttcgggctcagcggccgcgaggccgcagctcccgatggaaatcatattatgtagaatacttgggtgacatctgcctgagagatctccaagaattacagattgagtctcgctctgttgcccaggctggagtgcagtggtgcaatctctgctcactgcaacctccgtctcccgagttcaagcagttctcctgcctcagcctcctgagtagctgggattacagaagacaaaaatactaatgcatttgagaaagcggtagttttggggggagggggaaaaagcaactgctttcctgatctgcaacttggctggatgctaagatgtcagtggacatgaatagccaggggtctgacagcaatgaagaggactatgacccaaattgtgaggaagaggaagaagaagaagaagacgaccctggggacatagaggactattacgtgggagtagccagcgatgtggagcagcagggggctgatgcctttgatcccgaggagtaccagttcacttgcttgacctacaaggaatctgagggtgccctcaatgagcacatgaccagcttagcttctgtcctaaaggtgagcagtgttgtaaactccagtgtaatcccccccagttaaatctaaggatgagctgttgttaattaatgtctcctccagactaattgaatggccttgtagcttgaaaccaaatttaagtgtatgtcaacatcatttggacattttgttacatttactttgttttctaatatatgcatgtctaaggtcctcagattcccaaattagtaagaattagaaagtaggggtgggacagattcaagaaagatgtaccataccagaaatgtgtagtagcagaattgcacaactttgcacgtttcaggaagtgagttttcagaattttatgaggttgatacaataagcatcagaatcaccatcttctgtacgactgtgagtgactgataaatgtcttgagagtatacagatccctctggtttgccctgaatagtcattgcctttgggctaatgagctcatttgtttcatgtactgattttaataataattctttcttatgcttgtatttcattgatttagggggtgttagtatggaaattgtaaagaatgaacaaagttgattaccccatcagcaagcattttatttaacacataagctaaaacatacctttggatgtcttgtaccttaggccagttattatcctatttacattttttatgatcattttgacagtttcccaacaagcatgtttccttctctaacactggccattatgggaaattggaaatatttctctttagtgttttcactaatcttttttcatgaattgttacttggattttgtttctgattaaattggaggtcaaaagggcaccttggcatgatgtcaaccaaataaattttattggaacttaaacagaaat

SEQ ID NO: 4238 - protein, 98 aa, Homo sapiens
MSVDMNSQGSDSNEEDYDPNCEEEEEEEEDDPGDIEDYYVGVASDVEQQGADAFDPEEYQFTCLTYKESEGALNEHMTSLASVLKVSSVVNSSVIPPS

SEQ ID NO: 4239 - DNA, 1875 bp, Homo sapiens
ctgcgcggcgaacgaggcctcggcaggggaagcgaaagcctggtgtggttgcggctctggggccaccctgcgaccgcctcggggtgtaggcagaatttcccggcccagctcccctctgaccagatagcggccgagaaacaatggttatctgctccactgacgccaggatgtcttctccgtgcccgatcccggagtacaaacagtgaaatgagaagccggtgagaaacgcgctggttaaaaacatctcgacgggagacgctggtaggcgaatagtggctccagacgcggtcggcgcctgccgtaccctggtcagactctgggtcagagcgctaagtttcaaggaggcggcgctaaacaggccctctagccgggagcctgtcgcgacccgagcgaccgtgggtcgaccccgatccggaagtgacgcaacggcgccaagcacttccggagctgtggggacgactcttctggaggaagcagcgcgggcttgaccggcgtcggcccgccgcctccgctgccgcttcgccccaatccggtccctctggcccggcctgacccggtctggcttgttcgggctcagcggccgcgaggccgcagctcccgatggaaatcatattatgtagaatacttgggtgacatctgcctgagagatctccaagaattacagaagacaaaaatactaatgcatttgagaaagcggtagttttggggggagggggaaaaagcaactgctttcctgatctgcaacttggctggatgctaagatgtcagtggacatgaatagccaggggtctgacagcaatgaagaggactatgacccaaattgtgaggaagaggaagaagaagaagaagacgaccctggggacatagaggactattacgtgggagtagccagcgatgtggagcagcagggggctgatgcctttgatcccgaggagtaccagttcacttgcttgacctacaaggaatctgagggtgccctcaatgagcacatgaccagcttagcttctgtcctaaaggtgagcagtgttgtaaactccagtgtaatcccccccagttaaatctaaggatgagctgttgttaattaatgtctcctccagactaattgaatggccttgtagcttgaaaccaaatttaagtgtatgtcaacatcatttggacattttgttacatttactttgttttctaatatatgcatgtctaaggtcctcagattcccaaattagtaagaattagaaagtaggggtgggacagattcaagaaagatgtaccataccagaaatgtgtagtagcagaattgcacaactttgcacgtttcaggaagtgagttttcagaattttatgaggttgatacaataagcatcagaatcaccatcttctgtacgactgtgagtgactgataaatgtcttgagagtatacagatccctctggtttgccctgaatagtcattgcctttgggctaatgagctcatttgtttcatgtactgattttaataataattctttcttatgcttgtatttcattgatttagggggtgttagtatggaaattgtaaagaatgaacaaagttgattaccccatcagcaagcattttatttaacacataagctaaaacatacctttggatgtcttgtaccttaggccagttattatcctatttacattttttatgatcattttgacagtttcccaacaagcatgtttccttctctaacactggccattatgggaaattggaaatatttctctttagtgttttcactaatcttttttcatgaattgttacttggattttgtttctgattaaattggaggtcaaaagggcaccttggcatgatgtcaaccaaataaattttattggaacttaaacagaaat

SEQ ID NO: 4240 - protein, 98 aa, Homo sapiens; identical to SEQ ID NO: 4238

SEQ ID NO: 4241 - DNA, 2071 bp, Homo sapiens
ctgcgcggcgaacgaggcctcggcaggggaagcgaaagcctggtgtggttgcggctctggggccaccctgcgaccgcctcggggtgtaggcagaatttcccggcccagctcccctctgaccagatagcggccgagaaacaatggttatctgctccactgacgccaggatgtcttctccgtgcccgatcccggagtacaaacagtgaaatgagaagccggtgagaaacgcgctggttaaaaacatctcgacgggagacgctggtaggcgaatagtggctccagacgcggtcggcgcctgccgtaccctggtcagactctgggtcagagcgctaagtttcaaggaggcggcgctaaacaggccctctagccgggagcctgtcgcgacccgagcgaccgtgggtcgaccccgatccggaagtgacgcaacggcgccaagcacttccggagctgtggggacgactcttctggaggaagcagcgcgggcttgaccggcgtcggcccgccgcctccgctgccgcttcgccccaatccggtccctctggcccggcctgacccggtctggcttgttcgggctcagcggccgcgaggccgcagctcccgatggaaatcatattatgtagaatacttgggtgacatctgcctgagagatctccaagaattacagattgagtctcgctctgttgcccaggctggagtgcagtggtgcaatctctgctcactgcaacctccgtctcccgagttcaagcagttctcctgcctcagcctcctgagtagctgggattacagaagacaaaaatactaatgcatttgagaaagcggtagttttggggggagggggaaaaagcaactgctttcctgatctgcaacttggctggatgctaagatgtcagtggacatgaatagccaggggtctgacagcaatgaagaggactatgacccaaattgtgaggaagaggaagaagaagaagaagacgaccctggggacatagaggactattacgtgggagtagccagcgatgtggagcagcagggggctgatgcctttgatcccgaggagtaccagttcacttgcttgacctacaaggaatctgagggtgccctcaatgagcacatgaccagcttagcttctgtcctaaaggtgagcagtgttgtaaactccagtgtaatcccccccagttaaatctaaggatgagctgttgttaattaatgtctcctccagactaattgaatggccttgtagcttgaaaccaaatttaagtgtatgtcaacatcatttggacattttgttacatttactttgttttctaatatatgcatgtctaaggtcctcagattcccaaattagtaagaattagaaagtaggggtgggacagattcaagaaagatgtaccataccagaaatgtgtagtagcagaattgcacaactttgcacgtttcaggaagtgagttttcagaattttatgaggttgatacaataagcatcagaatcaccatcttctgtacgactgtgagtgactgataaatgtcttgagagtatacagatccctctggtttgccctgaatagtcattgcctttgggctaatgagctcatttgtttcatgtactgattttaataataattctttcttatgcttgtatttcattgatttagggggtgttagtatggaaattgtaaagaatgaacaaagttgattaccccatcagcaagcattttatttaacacataagctaaaacatacctttggatgtcttgtaccttaggccagttattatcctatttacattttttatgatcattttgacagtttcccaacaagcatgtttccttctctaacactggccattatgggaaattggaaatatttctctttagtgttttcactaatcttttttcatgaattgttacttggattttgtttctgattaaattggaggtcaaaagggcaccttggcatgatgtcaaccaaataaattttattggaacttaaacagaaataactaaggtgtgccttgtatgatttctataaaatttgctttatctactagtttagggatttttttttttttccc

SEQ ID NO: 4242 - protein, 98 aa, Homo sapiens; identical to SEQ ID NO: 4238

SEQ ID NO: 4243 - DNA, 1949 bp, Homo sapiens
ctgcgcggcgaacgaggcctcggcaggggaagcgaaagcctggtgtggttgcggctctggggccaccctgcgaccgcctcggggtgtaggcagaatttcccggcccagctcccctctgaccagatagcggccgagaaacaatggttatctgctccactgacgccaggatgtcttctccgtgcccgatcccggagtacaaacagtgaaatgagaagccggtgagaaacgcgctggttaaaaacatctcgacgggagacgctggtaggcgaatagtggctccagacgcggtcggcgcctgccgtaccctggtcagactctgggtcagagcgctaagtttcaaggaggcggcgctaaacaggccctctagccgggagcctgtcgcgacccgagcgaccgtgggtcgaccccgatccggaagtgacgcaacggcgccaagcacttccggagctgtggggacgactcttctggaggaagcagcgcgggcttgaccggcgtcggcccgccgcctccgctgccgcttcgccccaatccggtccctctggcccggcctgacccggtctggcttgttcgggctcagcggccgcgaggccgcagctcccgatggaaatcatattatgtagaatacttgggtgacatctgcctgagagatctccaagaattacagaagacaaaaatactaatgcatttgagaaagcggtagttttggggggagggggaaaaagcaactgctttcctgatctgcaacttggctggatgctaagatgtcagtggacatgaatagccaggggtctgacagcaatgaagaggactatgacccaaattgtgaggaagaggaagaagaagaagaagacgaccctggggacatagaggactattacgtgggagtagccagcgatgtggagcagcagggggctgatgcctttgatcccgaggagtaccagttcacttgcttgacctacaaggaatctgagggtgccctcaatgagcacatgaccagcttagcttctgtcctaaaggtgagcagtgttgtaaactccagtgtaatcccccccagttaaatctaaggatgagctgttgttaattaatgtctcctccagactaattgaatggccttgtagcttgaaaccaaatttaagtgtatgtcaacatcatttggacattttgttacatttactttgttttctaatatatgcatgtctaaggtcctcagattcccaaattagtaagaattagaaagtaggggtgggacagattcaagaaagatgtaccataccagaaatgtgtagtagcagaattgcacaactttgcacgtttcaggaagtgagttttcagaattttatgaggttgatacaataagcatcagaatcaccatcttctgtacgactgtgagtgactgataaatgtcttgagagtatacagatccctctggtttgccctgaatagtcattgcctttgggctaatgagctcatttgtttcatgtactgattttaataataattctttcttatgcttgtatttcattgatttagggggtgttagtatggaaattgtaaagaatgaacaaagttgattaccccatcagcaagcattttatttaacacataagctaaaacatacctttggatgtcttgtaccttaggccagttattatcctatttacattttttatgatcattttgacagtttcccaacaagcatgtttccttctctaacactggccattatgggaaattggaaatatttctctttagtgttttcactaatcttttttcatgaattgttacttggattttgtttctgattaaattggaggtcaaaagggcaccttggcatgatgtcaaccaaataaattttattggaacttaaacagaaataactaaggtgtgccttgtatgatttctataaaatttgctttatctactagtttagggatttttttttttttccc

SEQ ID NO: 4244 - protein, 98 aa, Homo sapiens; identical to SEQ ID NO: 4238

SEQ ID NO: 4245 - DNA, 1697 bp, Homo sapiens
ctgcgcggcgaacgaggcctcggcaggggaagcgaaagcctggtgtggttgcggctctggggccaccctgcgaccgcctcggggtgtaggcagaatttcccggcccagctcccctctgaccagatagcggccgagaaacaatggttatctgctccactgacgccaggatgtcttctccgtgcccgatcccggagtacaaacagtgaaatgagaagccggtgagaaacgcgctggttaaaaacatctcgacgggagacgctggtaggcgaatagtggctccagacgcggtcggcgcctgccgtaccctggtcagactctgggtcagagcgctaagtttcaaggaggcggcgctaaacaggccctctagccgggagcctgtcgcgacccgagcgaccgtgggtcgaccccgatccggaagtgacgcaacggcgccaagcacttccggagctgtggggacgactcttctggaggaagcagcgcgggcttgaccggcgtcggcccgccgcctccgctgccgcttcgccccaatccggtccctctggcccggcctgacccggtctggcttgttcgggctcagcggccgcgaggccgcagctcccgatggaaatcatattatgtagaatacttgggtgacatctgcctgagagatctccaagaattacagaagacaaaaatactaatgcatttgagaaagcggtagttttggggggagggggaaaaagcaactgctttcctgatctgcaacttggctggatgctaagatgtcagtggacatgaatagccaggggtctgacagcaatgaagaggactatgacccaaattgtgaggaagaggaagaagaagaagaagacgaccctggggacatagaggactattacgtgggagtagccagcgatgtggagcagcagggggctgatgcctttgatcccgaggagtaccagttcacttgcttgacctacaaggaatctgagggtgccctcaatgagcacatgaccagcttagcttctgtcctaaaggcaccactgcactccagcctgggcaacacagcgagactccgtctcaaaaaaaaaaacatgaatgatttcacagtgatgaccatgttattgatcataaatagagaaaaatacaggcaggatgagcaaggggtttgtttggagattttaaaaggaaaacagagctgttcttataattgtgaacaaaatgtggtctatatctggaaaagttattctctttgactagcagtttcttttcctggtaagctaacagtctcttcaattctgtcaccatcctttccaggagtctgtagataaccttgcctctttttacaagaaatctttctaatgccatcaagcttggtttcctggattctctatcttaattgttggtaccaccatccaccaacccggaaatagaggattgaccctctaccccttgtttacatgaatccctccctgatccccagacagagtctgtcactcttgcctctgtaccactgtgcttcttcttggtgtgtgcttacagtgtttgccaattagttgtaaactaggatataaactctttgagatagaggtccatattttttctttacctaacagcacctggcagaaatgtctggttatgttatgttctcagtaagtgttgctttttaatatgtctaagcccaggccaataaatgcacagttgaaaatttgactcca

SEQ ID NO: 4246 - protein, 157 aa, Homo sapiens
MSVDMNSQGSDSNEEDYDPNCEEEEEEEEDDPGDIEDYYVGVASDVEQQGADAFDPEEYQFTCLTYKESEGALNEHMTSLASVLKAPLHSSLGNTARLRLKKKNMNDFTVMTMLLIINREKYRQDEQGVCLEILKGKQSCSYNCEQNVVYIWKSYSL

SEQ ID NO: 4247 - DNA, 2601 bp, Homo sapiens
ctgcgcggcgaacgaggcctcggcaggggaagcgaaagcctggtgtggttgcggctctggggccaccctgcgaccgcctcggggtgtaggcagaatttcccggcccagctcccctctgaccagatagcggccgagaaacaatggttatctgctccactgacgccaggatgtcttctccgtgcccgatcccggagtacaaacagtgaaatgagaagccggtgagaaacgcgctggttaaaaacatctcgacgggagacgctggtaggcgaatagtggctccagacgcggtcggcgcctgccgtaccctggtcagactctgggtcagagcgctaagtttcaaggaggcggcgctaaacaggccctctagccgggagcctgtcgcgacccgagcgaccgtgggtcgaccccgatccggaagtgacgcaacggcgccaagcacttccggagctgtggggacgactcttctggaggaagcagcgcgggcttgaccggcgtcggcccgccgcctccgctgccgcttcgccccaatccggtccctctggcccggcctgacccggtctggcttgttcgggctcagcggccgcgaggccgcagctcccgatggaaatcatattatgtagaatacttgggtgacatctgcctgagagatctccaagaattacagaagacaaaaatactaatgcatttgagaaagcggtagttttggggggagggggaaaaagcaactgctttcctgatctgcaacttggctggatgctaagatgtcagtggacatgaatagccaggggtctgacagcaatgaagaggactatgacccaaattgtgaggaagaggaagaagaagaagaagacgaccctggggacatagaggactattacgtgggagtagccagcgatgtggagcagcagggggctgatgcctttgatcccgaggagtaccagttcacttgcttgacctacaaggaatctgagggtgccctcaatgagcacatgaccagcttagcttctgtcctaaaggtatctcattcagttgctaaacttatattagttaatttccactggcaagtttcagagatattggacagatacaagtccaattctgctcaactgcttgttgaggctcgagttcagcctaatccatcaaaacatgttcccacatcccatccccctcaccactgtgcagtgtgtatgcagtttgtgcgaaaggaaaacctactctctctggcctgtcagcaccagttttgccgcagctgctgggagcagcactgctcagttctcgtcaaggacggcgtgggcgtgggagtctcttgcatggctcaggactgtccactccgtacaccagaggactttgtgtttccattgcttcccaatgaagaattgagagagaaatacaggcgctacctcttcagggactatgtggagagtcattaccagctccagctgtgccctggtgcagactgccccatggttattcgggtacaggagcctagagctcgccgagtacagtgcaatcggtgcaacgaggtcttctgtttcaagtgtcgtcagatgtatcacgcacccacagactgtgccacaatccggaaatggctcacgaagtgtgcagacgactctgaaacagccaactacattagtgctcacactaaagactgtcccaagtgcaacatctgcattgagaagaatggaggctgcaatcacatgcaatgctccaaatgtaaacacgacttctgctggatgtgtctaggagattggaagactcatggcagtgaatactatgagtgcagtcgttacaaggagaatcctgacatcgtgaaccagagccaacaagcccaggcgagggaagccctcaagaagtacttattctactttgagaggtgggaaaaccacaataaaagcttgcagctagaggcacagacataccagcggattcacgagaagattcaggagagggtcatgaacaatctggggacatggatcgactggcagtacctacagaatgctgccaagctcttggccaagtgtcgatacaccctgcaatacacctacccatatgcatattacatggagtccggacccaggaagaagctgtttgaataccagcaggctcagctggaggctgagatcgaaaacctctcatggaaagtggagcgtgcagacagctatgacagaggggacttggagaaccagatgcatatagcggagcagcggaggagaaccctgctgaaagatttccatgacacctaagttgggatgtggatgtgccggggtgaggaagatgtggctgcaaggtctcccggctgccatactgcatgctgcaggctctgcctttcatgaccccaggcaacagccagggccccactcctgagagacactggcaacacctcttagttgatttctgttttcttctcttttcactttttgtttctaccagggtagaggccatgttgaactggcctcttttcaggacttttatttccccctggatggttgttgggagggagggaaagtgttttctgaatggctattaatagtattagatcattacaacttatgtaactttcaaaggttgtacaattatacaaaaaaaaaaaaaaggcaaact

SEQ ID NO: 4248 - protein, 493 aa, Homo sapiens; identical to SEQ ID NO: 405

SEQ ID NO: 4249 - DNA, 2652 bp, Homo sapiens
ctgcgcggcgaacgaggcctcggcaggggaagcgaaagcctggtgtggttgcggctctggggccaccctgcgaccgcctcggggtgtaggcagaatttcccggcccagctcccctctgaccagatagcggccgagaaacaatggttatctgctccactgacgccaggatgtcttctccgtgcccgatcccggagtacaaacagtgaaatgagaagccggtgagaaacgcgctggttaaaaacatctcgacgggagacgctggtaggcgaatagtggctccagacgcggtcggcgcctgccgtaccctggtcagactctgggtcagagcgctaagtttcaaggaggcggcgctaaacaggccctctagccgggagcctgtcgcgacccgagcgaccgtgggtcgaccccgatccggaagtgacgcaacggcgccaagcacttccggagctgtggggacgactcttctggaggaagcagcgcgggcttgaccggcgtcggcccgccgcctccgctgccgcttcgccccaatccggtccctctggcccggcctgacccggtctggcttgttcgggctcagcggccgcgaggccgcagctcccgatggaaatcatattatgtagaatacttgggtgacatctgcctgagagatctccaagaattacagaagacaaaaatactaatgcatttgagaaagcggtagttttggggggagggggaaaaagcaactgctttcctgatctgcaacttggctggatgctaagatgtcagtggacatgaatagccaggggtctgacagcaatgaagaggactatgacccaaattgtgaggaagaggaagaagaagaagaagacgaccctggggacatagaggactattacgtgggagtagccagcgatgtggagcagcagggggctgatgcctttgatcccgaggagtaccagttcacttgcttgacctacaaggaatctgagggtgccctcaatgagcacatgaccagcttagcttctgtcctaaaggtatctcattcagttgctaaacttatattagttaatttccactggcaagtttcagagatattggacagatacaagtccaattctgctcaactgcttgttgaggctcgagttcagcctaatccatcaaaacatgttcccacatcccatccccctcaccactgtgcagtgtgtatgcagtttgtgcgaaaggaaaacctactctctctggcctgtcagcaccagttttgccgcagctgctgggagcagcactgctcagttctcgtcaaggacggcgtgggcgtgggagtctcttgcatggctcaggactgtccactccgtacaccagaggactttgtgtttccattgcttcccaatgaagaattgagagagaaatacaggcgctacctcttcagggactatgtggagagtcattaccagctccagctgtgccctggtgcagactgccccatggttattcgggtacaggagcctagagctcgccgagtacagtgcaatcggtgcaacgaggtcttctgtttcaagtgtcgtcagatgtatcacgcacccacagactgtgccacaatccggaaatggctcacgaagtgtgcagacgactctgaaacagccaactacattagtgctcacactaaagactgtcccaagtgcaacatctgcattgagaagaatggaggctgcaatcacatgcaatgctccaaatgtaaacacgacttctgctggatgtgtctaggagattggaagactcatggcagtgaatactatgagtgcagtcgttacaaggagaatcctgacatcgtgaaccagagccaacaagcccaggcgagggaagccctcaagaagtacttattctactttgagaggtgggaaaaccacaataaaagcttgcagctagaggcacagacataccagcggattcacgagaagattcaggagagggtcatgaacaatctggggacatggatcgactggcagtacctacagaatgctgccaagctcttggccaagtgtcgatacaccctgcaatacacctacccatatgcatattacatggagtccggacccaggaagaagctgtttgaataccagcaggctcagctggaggctgagatcgaaaacctctcatggaaagtggagcgtgcagacagctatgacagaggggacttggagaaccagatgcatatagcggagcagcggaggagaaccctgctgaaagatttccatgacacctaagttgggatgtggatgtgccggggtgaggaagatgtggctgcaaggtctcccggctgccatactgcatgctgcaggctctgcctttcatgaccccaggcaacagccagggccccactcctgagagacactggcaacacctcttagttgatttctgttttcttctcttttcactttttgtttctaccagggtagaggccatgttgaactggcctcttttcaggacttttatttccccctggatggttgttgggagggagggaaagtgttttctgaatggctattaatagtattagatcattacaacttatgtaactttcaaaggttgtacaattatacaaaaaaaaaaaaaaggcaaactataggataacacagagccctttttgaaaataaattggcattggagtgtttt

SEQ ID NO: 4250 - protein, 493 aa, Homo sapiens; identical to SEQ ID NO: 405

SEQ ID NO: 4251 - DNA, 3150 bp, Homo sapiens
ctgcgcggcgaacgaggcctcggcaggggaagcgaaagcctggtgtggttgcggctctggggccaccctgcgaccgcctcggggtgtaggcagaatttcccggcccagctcccctctgaccagatagcggccgagaaacaatggttatctgctccactgacgccaggatgtcttctccgtgcccgatcccggagtacaaacagtgaaatgagaagccggtgagaaacgcgctggttaaaaacatctcgacgggagacgctggtaggcgaatagtggctccagacgcggtcggcgcctgccgtaccctggtcagactctgggtcagagcgctaagtttcaaggaggcggcgctaaacaggccctctagccgggagcctgtcgcgacccgagcgaccgtgggtcgaccccgatccggaagtgacgcaacggcgccaagcacttccggagctgtggggacgactcttctggaggaagcagcgcgggcttgaccggcgtcggcccgccgcctccgctgccgcttcgccccaatccggtccctctggcccggcctgacccggtctggcttgttcgggctcagcggccgcgaggccgcagctcccgatggaaatcatattatgtagaatacttgggtgacatctgcctgagagatctccaagaattacagaagacaaaaatactaatgcatttgagaaagcggtagttttggggggagggggaaaaagcaactgctttcctgatctgcaacttggctggatgctaagatgtcagtggacatgaatagccaggggtctgacagcaatgaagaggactatgacccaaattgtgaggaagaggaagaagaagaagaagacgaccctggggacatagaggactattacgtgggagtagccagcgatgtggagcagcagggggctgatgcctttgatcccgaggagtaccagttcacttgcttgacctacaaggaatctgagggtgccctcaatgagcacatgaccagcttagcttctgtcctaaaggtatctcattcagttgctaaacttatattagttaatttccactggcaagtttcagagatattggacagatacaagtccaattctgctcaactgcttgttgaggctcgagttcagcctaatccatcaaaacatgttcccacatcccatccccctcaccactgtgcagtgtgtatgcagtttgtgcgaaaggaaaacctactctctctggcctgtcagcaccagttttgccgcagctgctgggagcagcactgctcagttctcgtcaaggacggcgtgggcgtgggagtctcttgcatggctcaggactgtccactccgtacaccagaggactttgtgtttccattgcttcccaatgaagaattgagagagaaatacaggcgctacctcttcagggactatgtggagagtcattaccagctccagctgtgccctggtgcagactgccccatggttattcgggtacaggagcctagagctcgccgagtacagtgcaatcggtgcaacgaggtcttctgtttcaagtgtcgtcagatgtatcacgcacccacagactgtgccacaatccggaaatggctcacgaagtgtgcagacgactctgaaacagccaactacattagtgctcacactaaagactgtcccaagtgcaacatctgcattgagaagaatggaggctgcaatcacatgcaatgctccaaatgtaaacacgacttctgctggatgtgtctaggagattggaagactcatggcagtgaatactatgagtgcagtcgttacaaggagaatcctgacatcgtgaaccagagccaacaagcccaggcgagggaagccctcaagaagtacttattctactttgagaggtgggaaaaccacaataaaagcttgcagctagaggcacagacataccagcggattcacgagaagattcaggagagggtcatgaacaatctggggacatggatcgactggcagtacctacagaatgctgccaagctcttggccaagtgtcgatacaccctgcaatacacctacccatatgcatattacatggagtccggacccaggaagaagctgtttgaataccagcaggctcagctggaggctgagatcgaaaacctctcatggaaagtggagcgtgcagacagctatgacagaggggacttggagaaccagatgcatatagcggagcagcggaggagaaccctgctgaaagatttccatgacacctaagttgggatgtggatgtgccggggtgaggaagatgtggctgcaaggtctcccggctgccatactgcatgctgcaggctctgcctttcatgaccccaggcaacagccagggccccactcctgagagacactggcaacacctcttagttgatttctgttttcttctcttttcactttttgtttctaccagggtagaggccatgttgaactggcctcttttcaggacttttatttccccctggatggttgttgggagggagggaaagtgttttctgaatggctattaatagtattagatcattacaacttatgtaactttcaaaggttgtacaattatacaaaaaaaaaaaaaaggcaaactataggataacacagagccctttttgaaaataaattggcattggagtgttttaccctctagctgttttacttagaatgtaacatatgctgcctacccacctcaaaatgtctgtactgcaagagggccctgggcctctgctttccatattcacgtttggccagagttgtagtcccaaagaagagcatgggtggcagatggtagggaattgaactggcctgtgcaatgggcatggagcacaaggggtcacagcatgcctcctgccttaccgtggcagtacggagacagtccagaacatggtcttcttgccacggggtgttgttgtctctggtggtgctgcatgtctgtggctcacctttattcttgaaactgaggtttacctggatctggctactgaggctagagcccacagcagaatggggttgggcctgtggccccccaaactagggggtgtgggttcatcacagtgttgccttttgtctcctaaagatagggatctacttttgaagggaattgttcctcccaaataaatttgctttaccttggtccttt

SEQ ID NO: 4252 - protein, 493 aa, Homo sapiens; identical to SEQ ID NO: 405

SEQ ID NO: 4253 - DNA, 4634 bp, Homo sapiens
ctgcgcggcgaacgaggcctcggcaggggaagcgaaagcctggtgtggttgcggctctggggccaccctgcgaccgcctcggggtgtaggcagaatttcccggcccagctcccctctgaccagatagcggccgagaaacaatggttatctgctccactgacgccaggatgtcttctccgtgcccgatcccggagtacaaacagtgaaatgagaagccggtgagaaacgcgctggttaaaaacatctcgacgggagacgctggtaggcgaatagtggctccagacgcggtcggcgcctgccgtaccctggtcagactctgggtcagagcgctaagtttcaaggaggcggcgctaaacaggccctctagccgggagcctgtcgcgacccgagcgaccgtgggtcgaccccgatccggaagtgacgcaacggcgccaagcacttccggagctgtggggacgactcttctggaggaagcagcgcgggcttgaccggcgtcggcccgccgcctccgctgccgcttcgccccaatccggtccctctggcccggcctgacccggtctggcttgttcgggctcagcggccgcgaggccgcagctcccggctcaagtgcagtggcgcgatctcacctcactgcaacctctgcctccctggttggagtgattctcctgcctcagccttccgagtagctgggattacaggtgctcgaactcctgacctcagatggaaatcatattatgtagaatacttgggtgacatctgcctgagagatctccaagaattacagaagacaaaaatactaatgcatttgagaaagcggtagttttggggggagggggaaaaagcaactgctttcctgatctgcaacttggctggatgctaagatgtcagtggacatgaatagccaggggtctgacagcaatgaagaggactatgacccaaattgtgaggaagaggaagaagaagaagaagacgaccctggggacatagaggactattacgtgggagtagccagcgatgtggagcagcagggggctgatgcctttgatcccgaggagtaccagttcacttgcttgacctacaaggaatctgagggtgccctcaatgagcacatgaccagcttagcttctgtcctaaaggtatctcattcagttgctaaacttatattagttaatttccactggcaagtttcagagatattggacagatacaagtccaattctgctcaactgcttgttgaggctcgagttcagcctaatccatcaaaacatgttcccacatcccatccccctcaccactgtgcagtgtgtatgcagtttgtgcgaaaggaaaacctactctctctggcctgtcagcaccagttttgccgcagctgctgggagcagcactgctcagttctcgtcaaggacggcgtgggcgtgggagtctcttgcatggctcaggactgtccactccgtacaccagaggactttgtgtttccattgcttcccaatgaagaattgagagagaaatacaggcgctacctcttcagggactatgtggagagtcattaccagctccagctgtgccctggtgcagactgccccatggttattcgggtacaggagcctagagctcgccgagtacagtgcaatcggtgcaacgaggtcttctgtttcaagtgtcgtcagatgtatcacgcacccacagactgtgccacaatccggaaatggctcacgaagtgtgcagacgactctgaaacagccaactacattagtgctcacactaaagactgtcccaagtgcaacatctgcattgagaagaatggaggctgcaatcacatgcaatgctccaaatgtaaacacgacttctgctggatgtgtctaggagattggaagactcatggcagtgaatactatgagtgcagtcgttacaaggagaatcctgacatcgtgaaccagagccaacaagcccaggcgagggaagccctcaagaagtacttattctactttgagaggtgggaaaaccacaataaaagcttgcagctagaggcacagacataccagcggattcacgagaagattcaggagagggtcatgaacaatctggggacatggatcgactggcagtacctacagaatgctgccaagctcttggccaagtgtcgatacaccctgcaatacacctacccatatgcatattacatggagtccggacccaggaagaagctgtttgaataccagcaggctcagctggaggctgagatcgaaaacctctcatggaaagtggagcgtgcagacagctatgacagaggggacttggagaaccagatgcatatagcggagcagcggaggagaaccctgctgaaagatttccatgacacctaagttgggatgtggatgtgccggggtgaggaagatgtggctgcaaggtctcccggctgccatactgcatgctgcaggctctgcctttcatgaccccaggcaacagccagggccccactcctgagagacactggcaacacctcttagttgatttctgttttcttctcttttcactttttgtttctaccagggtagaggccatgttgaactggcctcttttcaggacttttatttccccctggatggttgttgggagggagggaaagtgttttctgaatggctattaatagtattagatcattacaacttatgtaactttcaaaggttgtacaattatacaaaaaaaaaaaaaaggcaaactataggataacacagagccctttttgaaaataaattggcattggagtgttttaccctctagctgttttacttagaatgtaacatatgctgcctacccacctcaaaatgtctgtactgcaagagggccctgggcctctgctttccatattcacgtttggccagagttgtagtcccaaagaagagcatgggtggcagatggtagggaattgaactggcctgtgcaatgggcatggagcacaaggggtcacagcatgcctcctgccttaccgtggcagtacggagacagtccagaacatggtcttcttgccacggggtgttgttgtctctggtggtgctgcatgtctgtggctcacctttattcttgaaactgaggtttacctggatctggctactgaggctagagcccacagcagaatggggttgggcctgtggccccccaaactagggggtgtgggttcatcacagtgttgccttttgtctcctaaagatagggatctacttttgaagggaattgttcctcccaaataaatttgctttaccttggtcctttcttttgtgccagtattcaagtggtatagctctgagcagggtcacatttggccaaacctgacactgtcttgctgcattctcctttggcaaacatcagggtcagaattcaggatagcccttcctagggcactggactttctggcatgggggctgtgtttgcacaagttattttcatgttacctggagagtgtccagaggctgctctgaggctgaggtgtgttcccccttgcctggttccagctgtcagagggataccatcctagggtctgggaatccaaggccacgagactccttggtttgtggtccgagatcctgtactaaggagggtctggccagaggaacagaccagcttttgcacaatgaagcgcaagggaacaagtggtttgcctggtgtcctacctgtcctgaacctggtcctgtgggccattgaaaagttagatctgtgatctctggggtttttgtggctttgttcaatgcttccactctagggcaggcagagcagtctatactctcccaagcctgcttgacctccaagtagagctgatacagagatctgtgaatattgtgatagaaattctttggtattcatacatttcagctgcaagtcagcaatttcccaggtaccatgtaagctataaaacagtcattcttaaagacagaggatagctgtgactcatgggatcatgaggtccatggctggttgcaggttccctttttccttcctcaggttttgtctcttcctgtgttgtccccagcaagggagagactgtggggtggattgggagaacagattaggagtatagcaaatgaacccagaatggaacagtggggagctaactgtgaatgaggagagtacctgctgcaggacctggaggtcaggtgtgaatgctgtattggcacagggaataaatatcctggcgtctggagccttcacctctccgtcaagtccttcctgtgatactgccatggcacaggatctgagttgcagctctgcaccctaaatcacaccctgggcattgtctgggctgcagggctgccaggttctgtacttgtgtccagctgtggccctggatgctggagctggagggttttctgtgctcagactgtagcctgtagctcttggcctgtgtagagccccctcctgtgccctcagtggctgtcgtttgttaacatcatcaggaagatgggaaaggtcaggcagaatttttctgccctacaaagggtggaagagaaaggacacagtattttcatgaatttaccatatatctttgtttttcttcaacgaaaaagttaattgaggcaatgtcatctgctcaaagttgagtggtttattcacaataaactgtaagtttctgattataaaaa

SEQ ID NO: 4254 - protein, 493 aa, Homo sapiens; identical to SEQ ID NO: 405

SEQ ID NO: 4255 - DNA, 4514 bp, Homo sapiens
ctgcgcggcgaacgaggcctcggcaggggaagcgaaagcctggtgtggttgcggctctggggccaccctgcgaccgcctcggggtgtaggcagaatttcccggcccagctcccctctgaccagatagcggccgagaaacaatggttatctgctccactgacgccaggatgtcttctccgtgcccgatcccggagtacaaacagtgaaatgagaagccggtgagaaacgcgctggttaaaaacatctcgacgggagacgctggtaggcgaatagtggctccagacgcggtcggcgcctgccgtaccctggtcagactctgggtcagagcgctaagtttcaaggaggcggcgctaaacaggccctctagccgggagcctgtcgcgacccgagcgaccgtgggtcgaccccgatccggaagtgacgcaacggcgccaagcacttccggagctgtggggacgactcttctggaggaagcagcgcgggcttgaccggcgtcggcccgccgcctccgctgccgcttcgccccaatccggtccctctggcccggcctgacccggtctggcttgttcgggctcagcggccgcgaggccgcagctcccgatggaaatcatattatgtagaatacttgggtgacatctgcctgagagatctccaagaattacagaagacaaaaatactaatgcatttgagaaagcggtagttttggggggagggggaaaaagcaactgctttcctgatctgcaacttggctggatgctaagatgtcagtggacatgaatagccaggggtctgacagcaatgaagaggactatgacccaaattgtgaggaagaggaagaagaagaagaagacgaccctggggacatagaggactattacgtgggagtagccagcgatgtggagcagcagggggctgatgcctttgatcccgaggagtaccagttcacttgcttgacctacaaggaatctgagggtgccctcaatgagcacatgaccagcttagcttctgtcctaaaggtatctcattcagttgctaaacttatattagttaatttccactggcaagtttcagagatattggacagatacaagtccaattctgctcaactgcttgttgaggctcgagttcagcctaatccatcaaaacatgttcccacatcccatccccctcaccactgtgcagtgtgtatgcagtttgtgcgaaaggaaaacctactctctctggcctgtcagcaccagttttgccgcagctgctgggagcagcactgctcagttctcgtcaaggacggcgtgggcgtgggagtctcttgcatggctcaggactgtccactccgtacaccagaggactttgtgtttccattgcttcccaatgaagaattgagagagaaatacaggcgctacctcttcagggactatgtggagagtcattaccagctccagctgtgccctggtgcagactgccccatggttattcgggtacaggagcctagagctcgccgagtacagtgcaatcggtgcaacgaggtcttctgtttcaagtgtcgtcagatgtatcacgcacccacagactgtgccacaatccggaaatggctcacgaagtgtgcagacgactctgaaacagccaactacattagtgctcacactaaagactgtcccaagtgcaacatctgcattgagaagaatggaggctgcaatcacatgcaatgctccaaatgtaaacacgacttctgctggatgtgtctaggagattggaagactcatggcagtgaatactatgagtgcagtcgttacaaggagaatcctgacatcgtgaaccagagccaacaagcccaggcgagggaagccctcaagaagtacttattctactttgagaggtgggaaaaccacaataaaagcttgcagctagaggcacagacataccagcggattcacgagaagattcaggagagggtcatgaacaatctggggacatggatcgactggcagtacctacagaatgctgccaagctcttggccaagtgtcgatacaccctgcaatacacctacccatatgcatattacatggagtccggacccaggaagaagctgtttgaataccagcaggctcagctggaggctgagatcgaaaacctctcatggaaagtggagcgtgcagacagctatgacagaggggacttggagaaccagatgcatatagcggagcagcggaggagaaccctgctgaaagatttccatgacacctaagttgggatgtggatgtgccggggtgaggaagatgtggctgcaaggtctcccggctgccatactgcatgctgcaggctctgcctttcatgaccccaggcaacagccagggccccactcctgagagacactggcaacacctcttagttgatttctgttttcttctcttttcactttttgtttctaccagggtagaggccatgttgaactggcctcttttcaggacttttatttccccctggatggttgttgggagggagggaaagtgttttctgaatggctattaatagtattagatcattacaacttatgtaactttcaaaggttgtacaattatacaaaaaaaaaaaaaaggcaaactataggataacacagagccctttttgaaaataaattggcattggagtgttttaccctctagctgttttacttagaatgtaacatatgctgcctacccacctcaaaatgtctgtactgcaagagggccctgggcctctgctttccatattcacgtttggccagagttgtagtcccaaagaagagcatgggtggcagatggtagggaattgaactggcctgtgcaatgggcatggagcacaaggggtcacagcatgcctcctgccttaccgtggcagtacggagacagtccagaacatggtcttcttgccacggggtgttgttgtctctggtggtgctgcatgtctgtggctcacctttattcttgaaactgaggtttacctggatctggctactgaggctagagcccacagcagaatggggttgggcctgtggccccccaaactagggggtgtgggttcatcacagtgttgccttttgtctcctaaagatagggatctacttttgaagggaattgttcctcccaaataaatttgctttaccttggtcctttcttttgtgccagtattcaagtggtatagctctgagcagggtcacatttggccaaacctgacactgtcttgctgcattctcctttggcaaacatcagggtcagaattcaggatagcccttcctagggcactggactttctggcatgggggctgtgtttgcacaagttattttcatgttacctggagagtgtccagaggctgctctgaggctgaggtgtgttcccccttgcctggttccagctgtcagagggataccatcctagggtctgggaatccaaggccacgagactccttggtttgtggtccgagatcctgtactaaggagggtctggccagaggaacagaccagcttttgcacaatgaagcgcaagggaacaagtggtttgcctggtgtcctacctgtcctgaacctggtcctgtgggccattgaaaagttagatctgtgatctctggggtttttgtggctttgttcaatgcttccactctagggcaggcagagcagtctatactctcccaagcctgcttgacctccaagtagagctgatacagagatctgtgaatattgtgatagaaattctttggtattcatacatttcagctgcaagtcagcaatttcccaggtaccatgtaagctataaaacagtcattcttaaagacagaggatagctgtgactcatgggatcatgaggtccatggctggttgcaggttccctttttccttcctcaggttttgtctcttcctgtgttgtccccagcaagggagagactgtggggtggattgggagaacagattaggagtatagcaaatgaacccagaatggaacagtggggagctaactgtgaatgaggagagtacctgctgcaggacctggaggtcaggtgtgaatgctgtattggcacagggaataaatatcctggcgtctggagccttcacctctccgtcaagtccttcctgtgatactgccatggcacaggatctgagttgcagctctgcaccctaaatcacaccctgggcattgtctgggctgcagggctgccaggttctgtacttgtgtccagctgtggccctggatgctggagctggagggttttctgtgctcagactgtagcctgtagctcttggcctgtgtagagccccctcctgtgccctcagtggctgtcgtttgttaacatcatcaggaagatgggaaaggtcaggcagaatttttctgccctacaaagggtggaagagaaaggacacagtattttcatgaatttaccatatatctttgtttttcttcaacgaaaaagttaattgaggcaatgtcatctgctcaaagttgagtggtttattcacaataaactgtaagtttctgattataaaaa

SEQ ID NO: 4256 - protein, 493 aa, Homo sapiens; identical to SEQ ID NO: 405

SEQ ID NO: 4257 - DNA, 1558 bp, Homo sapiens
gcctccctggccgggccgggactccgccttcgccgtcgcccgggaggcccgggcgctccccgtcgccggcacgttgtccgagcattacccgccgtcagcggccgggcgcccagcgtgtgtctgccttttttcctcccgccgccttctcagctctcggaaagatggaaatcatattatgtagaatacttgggtgacatctgcctgagagatctccaagaattacagattgagtctcgctctgttgcccaggctggagtgcagtggtgcaatctctgctcactgcaacctccgtctcccgagttcaagcagttctcctgcctcagcctcctgagtagctgggattacagaagacaaaaatactaatgcatttgagaaagcggtagttttggggggagggggaaaaagcaactgctttcctgatctgcaacttggctggatgctaagatgtcagtggacatgaatagccaggggtctgacagcaatgaagaggactatgacccaaattgtgaggaagaggaagaagaagaagaagacgaccctggggacatagaggactattacgtgggagtagccagcgatgtggagcagcagggggctgatgcctttgatcccgaggagtaccagttcacttgcttgacctacaaggaatctgagggtgccctcaatgagcacatgaccagcttagcttctgtcctaaaggtgagcagtgttgtaaactccagtgtaatcccccccagttaaatctaaggatgagctgttgttaattaatgtctcctccagactaattgaatggccttgtagcttgaaaccaaatttaagtgtatgtcaacatcatttggacattttgttacatttactttgttttctaatatatgcatgtctaaggtcctcagattcccaaattagtaagaattagaaagtaggggtgggacagattcaagaaagatgtaccataccagaaatgtgtagtagcagaattgcacaactttgcacgtttcaggaagtgagttttcagaattttatgaggttgatacaataagcatcagaatcaccatcttctgtacgactgtgagtgactgataaatgtcttgagagtatacagatccctctggtttgccctgaatagtcattgcctttgggctaatgagctcatttgtttcatgtactgattttaataataattctttcttatgcttgtatttcattgatttagggggtgttagtatggaaattgtaaagaatgaacaaagttgattaccccatcagcaagcattttatttaacacataagctaaaacatacctttggatgtcttgtaccttaggccagttattatcctatttacattttttatgatcattttgacagtttcccaacaagcatgtttccttctctaacactggccattatgggaaattggaaatatttctctttagtgttttcactaatcttttttcatgaattgttacttggattttgtttctgattaaattggaggtcaaaagggcaccttggcatgatgtcaaccaaataaattttattggaacttaaacagaaat

SEQ ID NO: 4258 - protein, 98 aa, Homo sapiens; identical to SEQ ID NO: 4238

SEQ ID NO: 4259 - DNA, 1632 bp, Homo sapiens
gcctccctggccgggccgggactccgccttcgccgtcgcccgggaggcccgggcgctccccgtcgccggcacgttgtccgagcattacccgccgtcagcggccgggcgcccagcgtgtgtctgccttttttcctcccgccgccttctcagctctcggaaagatggaaatcatattatgtagaatacttgggtgacatctgcctgagagatctccaagaattacagattgagtctcgctctgttgcccaggctggagtgcagtggtgcaatctctgctcactgcaacctccgtctcccgagttcaagcagttctcctgcctcagcctcctgagtagctgggattacagaagacaaaaatactaatgcatttgagaaagcggtagttttggggggagggggaaaaagcaactgctttcctgatctgcaacttggctggatgctaagatgtcagtggacatgaatagccaggggtctgacagcaatgaagaggactatgacccaaattgtgaggaagaggaagaagaagaagaagacgaccctggggacatagaggactattacgtgggagtagccagcgatgtggagcagcagggggctgatgcctttgatcccgaggagtaccagttcacttgcttgacctacaaggaatctgagggtgccctcaatgagcacatgaccagcttagcttctgtcctaaaggtgagcagtgttgtaaactccagtgtaatcccccccagttaaatctaaggatgagctgttgttaattaatgtctcctccagactaattgaatggccttgtagcttgaaaccaaatttaagtgtatgtcaacatcatttggacattttgttacatttactttgttttctaatatatgcatgtctaaggtcctcagattcccaaattagtaagaattagaaagtaggggtgggacagattcaagaaagatgtaccataccagaaatgtgtagtagcagaattgcacaactttgcacgtttcaggaagtgagttttcagaattttatgaggttgatacaataagcatcagaatcaccatcttctgtacgactgtgagtgactgataaatgtcttgagagtatacagatccctctggtttgccctgaatagtcattgcctttgggctaatgagctcatttgtttcatgtactgattttaataataattctttcttatgcttgtatttcattgatttagggggtgttagtatggaaattgtaaagaatgaacaaagttgattaccccatcagcaagcattttatttaacacataagctaaaacatacctttggatgtcttgtaccttaggccagttattatcctatttacattttttatgatcattttgacagtttcccaacaagcatgtttccttctctaacactggccattatgggaaattggaaatatttctctttagtgttttcactaatcttttttcatgaattgttacttggattttgtttctgattaaattggaggtcaaaagggcaccttggcatgatgtcaaccaaataaattttattggaacttaaacagaaataactaaggtgtgccttgtatgatttctataaaatttgctttatctactagtttagggatttttttttttttccc

SEQ ID NO: 4260 - protein, 98 aa, Homo sapiens; identical to SEQ ID NO: 4238

SEQ ID NO: 4261 - DNA, 517 bp, Homo sapiens
acaccatcgttaagtttagttgtgattatgtggctctaccatacagaagagtttgttaaaagtcaaacttgctgggattacaggtgtgagccaccgcgcctcgccaatatttttattatataaaaatgtgactgtaggctgggcacagtggctcttgcctataatcccagcgttttgtaaggccaacgcaggaggatcgcttgaggccaggagtttgaaaccagcctgagcaacatagtaaaaccctgtttatacaaaaaataaaattaggtatgggggtggcatatgcctgtagtcccagttactcaggaggctgaggcaggaggatctgttgagctcaggagttggaagctgcagtgggccatgatcatgtttttatatctcagactgggtgacagagtgatactatgtctcagtactccatagtcttttagactggttacaaattctttttccttttggtagacgtgagtgtcactatgttacccaggctggtttggaactcctggttttgaat

SEQ ID NO: 4262 - protein, 31 aa, Homo sapiens
MWLYHTEEFVKSQTCWDYRCEPPRLANIFII

SEQ ID NO: 4263 - DNA, 2574 bp, Homo sapiens
ttcaagtgattctcctgcctcagccacctgagtagctggggattacacgcacgcaccaccacgtatagctaatttttgtatttttagtagagatggggtttcaccacgttggccaggatgctcttgatctcctgacctcgtgatccacccgccttggcttcccaaagtgctgggattacaggcgtgagccaccgcacctggcctagttttagatttaaatcgctagttgatattgttcctttcagctcatcagttgaaatggtagttgtgtagaaaagttaatgggtgtttgccacaatcttctgtgagttgaagttagggtttgtgactgtttcactttctcaactagtattctcttttcgtttatatgtaattaagtaacatttcgctgtttgcgggcttttcttttttgagatggagtttccctcgtgtgtgtgtgtgtgtgtgtgtgtatgtgtgtacgtgtgtgtgtgacggagtttcgtcttgtcatccaggctagagtgcagtggcgcaatcttggctcactgtaaactctgcctcccgggttaaagtgattctcctgcctcagcgtcccgagtagctgggattacaggtgcatatcaccacacctggctaattttgtatttttagtagagatggggtttcgccatgttggccagtctggtcttgaactcctgacctcaagtgatccacccaccttagcctcccacagtgctgggattacaggcatgagtcaccacacccggccagtagaactctttaaacctgaaaaatcagtcaactttgcagactagaggaggatgttgaacacctatgtgtgttttttttttctttaccaactatgcacctatttttcagacacctaaaagtaatgtctgtgaaacagtggttttctttttctacatattacagcaggaagtgttcctatttatgtactgtctgtatcaatactaacggggcatgataagcaaaattttaaactttggtagttaaacctttatgttgcctcccctctgggctgccagctgtggggatgtgcttctcccttaaggactttggcaagaataacaagttcattggaatttgactttctgacatagagcagacagccttgccctgtcatgccaggcctttcatgtgaagttaccatttattagctgcttctgtctctccagggaaggatttcccttttataagcctgggccagggggatgatagtaagattccccatgtgataccagagttggaataggctgtagtgagattagggccaggactgtcccattttgattcttgaatggtttctgttacaacttgtcatggggaaaaagtaacacttattttttttttcctcccttagaagacaaaaatactaatgcatttgagaaagcggtagttttggggggagggggaaaaagcaactgctttcctgatctgcaacttggctggatgctaagatgtcagtggacatgaatagccaggggtctgacagcaatgaagaggactatgacccaaattgtgaggaagaggaagaagaagaagaagacgaccctggggacatagaggactattacgtgggagtagccagcgatgtggagcagcagggggctgatgcctttgatcccgaggagtaccagttcacttgcttgacctacaaggaatctgagggtgccctcaatgagcacatgaccagcttagcttctgtcctaaaggtgagcagtgttgtaaactccagtgtaatcccccccagttaaatctaaggatgagctgttgttaattaatgtctcctccagactaattgaatggccttgtagcttgaaaccaaatttaagtgtatgtcaacatcatttggacattttgttacatttactttgttttctaatatatgcatgtctaaggtcctcagattcccaaattagtaagaattagaaagtaggggtgggacagattcaagaaagatgtaccataccagaaatgtgtagtagcagaattgcacaactttgcacgtttcaggaagtgagttttcagaattttatgaggttgatacaataagcatcagaatcaccatcttctgtacgactgtgagtgactgataaatgtcttgagagtatacagatccctctggtttgccctgaatagtcattgcctttgggctaatgagctcatttgtttcatgtactgattttaataataattctttcttatgcttgtatttcattgatttagggggtgttagtatggaaattgtaaagaatgaacaaagttgattaccccatcagcaagcattttatttaacacataagctaaaacatacctttggatgtcttgtaccttaggccagttattatcctatttacattttttatgatcattttgacagtttcccaacaagcatgtttccttctctaacactggccattatgggaaattggaaatatttctctttagtgttttcactaatcttttttcatgaattgttacttggattttgtttctgattaaattggaggtcaaaagggcaccttggcatgatgtcaaccaaataaattttattggaacttaaacagaaat

SEQ ID NO: 4264 - protein, 98 aa, Homo sapiens; identical to SEQ ID NO: 4238

SEQ ID NO: 4265 - DNA, 2648 bp, Homo sapiens
ttcaagtgattctcctgcctcagccacctgagtagctggggattacacgcacgcaccaccacgtatagctaatttttgtatttttagtagagatggggtttcaccacgttggccaggatgctcttgatctcctgacctcgtgatccacccgccttggcttcccaaagtgctgggattacaggcgtgagccaccgcacctggcctagttttagatttaaatcgctagttgatattgttcctttcagctcatcagttgaaatggtagttgtgtagaaaagttaatgggtgtttgccacaatcttctgtgagttgaagttagggtttgtgactgtttcactttctcaactagtattctcttttcgtttatatgtaattaagtaacatttcgctgtttgcgggcttttcttttttgagatggagtttccctcgtgtgtgtgtgtgtgtgtgtgtgtatgtgtgtacgtgtgtgtgtgacggagtttcgtcttgtcatccaggctagagtgcagtggcgcaatcttggctcactgtaaactctgcctcccgggttaaagtgattctcctgcctcagcgtcccgagtagctgggattacaggtgcatatcaccacacctggctaattttgtatttttagtagagatggggtttcgccatgttggccagtctggtcttgaactcctgacctcaagtgatccacccaccttagcctcccacagtgctgggattacaggcatgagtcaccacacccggccagtagaactctttaaacctgaaaaatcagtcaactttgcagactagaggaggatgttgaacacctatgtgtgttttttttttctttaccaactatgcacctatttttcagacacctaaaagtaatgtctgtgaaacagtggttttctttttctacatattacagcaggaagtgttcctatttatgtactgtctgtatcaatactaacggggcatgataagcaaaattttaaactttggtagttaaacctttatgttgcctcccctctgggctgccagctgtggggatgtgcttctcccttaaggactttggcaagaataacaagttcattggaatttgactttctgacatagagcagacagccttgccctgtcatgccaggcctttcatgtgaagttaccatttattagctgcttctgtctctccagggaaggatttcccttttataagcctgggccagggggatgatagtaagattccccatgtgataccagagttggaataggctgtagtgagattagggccaggactgtcccattttgattcttgaatggtttctgttacaacttgtcatggggaaaaagtaacacttattttttttttcctcccttagaagacaaaaatactaatgcatttgagaaagcggtagttttggggggagggggaaaaagcaactgctttcctgatctgcaacttggctggatgctaagatgtcagtggacatgaatagccaggggtctgacagcaatgaagaggactatgacccaaattgtgaggaagaggaagaagaagaagaagacgaccctggggacatagaggactattacgtgggagtagccagcgatgtggagcagcagggggctgatgcctttgatcccgaggagtaccagttcacttgcttgacctacaaggaatctgagggtgccctcaatgagcacatgaccagcttagcttctgtcctaaaggtgagcagtgttgtaaactccagtgtaatcccccccagttaaatctaaggatgagctgttgttaattaatgtctcctccagactaattgaatggccttgtagcttgaaaccaaatttaagtgtatgtcaacatcatttggacattttgttacatttactttgttttctaatatatgcatgtctaaggtcctcagattcccaaattagtaagaattagaaagtaggggtgggacagattcaagaaagatgtaccataccagaaatgtgtagtagcagaattgcacaactttgcacgtttcaggaagtgagttttcagaattttatgaggttgatacaataagcatcagaatcaccatcttctgtacgactgtgagtgactgataaatgtcttgagagtatacagatccctctggtttgccctgaatagtcattgcctttgggctaatgagctcatttgtttcatgtactgattttaataataattctttcttatgcttgtatttcattgatttagggggtgttagtatggaaattgtaaagaatgaacaaagttgattaccccatcagcaagcattttatttaacacataagctaaaacatacctttggatgtcttgtaccttaggccagttattatcctatttacattttttatgatcattttgacagtttcccaacaagcatgtttccttctctaacactggccattatgggaaattggaaatatttctctttagtgttttcactaatcttttttcatgaattgttacttggattttgtttctgattaaattggaggtcaaaagggcaccttggcatgatgtcaaccaaataaattttattggaacttaaacagaaataactaaggtgtgccttgtatgatttctataaaatttgctttatctactagtttagggatttttttttttttccc

SEQ ID NO: 4266 - protein, 98 aa, Homo sapiens; identical to SEQ ID NO: 4238

SEQ ID NO: 4267 - DNA, 3441 bp, Homo sapiens
ttcagctcatcagttgaaatggtagttgtgtagaaaagttaatgggtgtttgccacaatcttctgtgagttgaagttagggtttgtgactgtttcactttctcaactagtattctcttttcgtttatatgtaattaagtaacatttcgctgtttgcgggcttttcttttttgagatggagtttccctcgtgtgtgtgtgtgtgtgtgtgtgtatgtgtgtacgtgtgtgtgtgacggagtttcgcttttattgcccaggctggagtgcagtggcgcaatctcagctcactataacctccgcctcctgggttcaagcgtttctcctgtcttagcctcccaagtagctgggattacaggtgcctgtcaccacgcctgcttaatttttttgtatttttagtagagacagggtttcaccatattagccaggctggtctcgaactcctgacctcaggtgacccacccatctcagcctctcaaaattctgggattacaggcgtgagccaccgcacccggccaatggagtttcactcttgtcatccaggctagagtgcagtggcgcaatcttggctcactgtaaactctgcctcccgggttaaagtgattctcctgcctcagcgtcccgagtagctgggattacaggtgcatatcaccacacctggctaattttgtatttttagtagagatggggtttcgccatgttggccagtctggtcttgaactcctgacctcaagtgatccacccaccttagcctcccacagtgctgggattacaggcatgagtcaccacacccggccagtagaactctttaaacctgaaaaatcagtcaactttgcagactagaggaggatgttgaacacctatgtgtgttttttttttctttaccaactatgcacctatttttcagacacctaaaagtaatgtctgtgaaacagtggttttctttttctacatattacagcaggaagtgttcctatttatgtactgtctgtatcaatactaacggggcatgataagcaaaattttaaactttggtagttaaacctttatgttgcctcccctctgggctgccagctgtggggatgtgcttctcccttaaggactttggcaagaataacaagttcattggaatttgactttctgacatagagcagacagccttgccctgtcatgccaggcctttcatgtgaagttaccatttattagctgcttctgtctctccagggaaggatttcccttttataagcctgggccagggggatgatagtaagattccccatgtgataccagagttggaataggctgtagtgagattagggccaggactgtcccattttgattcttgaatggtttctgttacaacttgtcatggggaaaaagtaacacttattttttttttcctcccttagaagacaaaaatactaatgcatttgagaaagcggtagttttggggggagggggaaaaagcaactgctttcctgatctgcaacttggctggatgctaagatgtcagtggacatgaatagccaggggtctgacagcaatgaagaggactatgacccaaattgtgaggaagaggaagaagaagaagaagacgaccctggggacatagaggactattacgtgggagtagccagcgatgtggagcagcagggggctgatgcctttgatcccgaggagtaccagttcacttgcttgacctacaaggaatctgagggtgccctcaatgagcacatgaccagcttagcttctgtcctaaaggccgttgatgctcactgccatcagctgcatcctccctatggcactggtatctcattcagttgctaaacttatattagttaatttccactggcaagtttcagagatattggacagatacaagtccaattctgctcaactgcttgttgaggctcgagttcagcctaatccatcaaaacatgttcccacatcccatccccctcaccactgtgcagtgtgtatgcagtttgtgcgaaaggaaaacctactctctctggcctgtcagcaccagttttgccgcagctgctgggagcagcactgctcagttctcgtcaaggacggcgtgggcgtgggagtctcttgcatggctcaggactgtccactccgtacaccagaggactttgtgtttccattgcttcccaatgaagaattgagagagaaatacaggcgctacctcttcagggactatgtggagagtcattaccagctccagctgtgccctggtgcagactgccccatggttattcgggtacaggagcctagagctcgccgagtacagtgcaatcggtgcaacgaggtcttctgtttcaagtgtcgtcagatgtatcacgcacccacagactgtgccacaatccggaaatggctcacgaagtgtgcagacgactctgaaacagccaactacattagtgctcacactaaagactgtcccaagtgcaacatctgcattgagaagaatggaggctgcaatcacatgcaatgctccaaatgtaaacacgacttctgctggatgtgtctaggagattggaagactcatggcagtgaatactatgagtgcagtcgttacaaggagaatcctgacatcgtgaaccagagccaacaagcccaggcgagggaagccctcaagaagtacttattctactttgagaggtgggaaaaccacaataaaagcttgcagctagaggcacagacataccagcggattcacgagaagattcaggagagggtcatgaacaatctggggacatggatcgactggcagtacctacagaatgctgccaagctcttggccaagtgtcgatacaccctgcaatacacctacccatatgcatattacatggagtccggacccaggaagaagctgtttgaataccagcaggctcagctggaggctgagatcgaaaacctctcatggaaagtggagcgtgcagacagctatgacagaggggacttggagaaccagatgcatatagcggagcagcggaggagaaccctgctgaaagatttccatgacacctaagttgggatgtggatgtgccggggtgaggaagatgtggctgcaaggtctcccggctgccatactgcatgctgcaggctctgcctttcatgaccccaggcaacagccagggccccactcctgagagacactggcaacacctcttagttgatttctgttttcttctcttttcactttttgtttctaccagggtagaggccatgttgaactggcctcttttcaggacttttatttccccctggatggttgttgggagggagggaaagtgttttctgaatggctattaatagtattagatcattacaacttatgtaactttcaaaggttgtacaattatacaaaaaaaaaaaaaaggcaaactataggataacacagagccctttttgaaaataaattggcattggagtgtttt

SEQ ID NO: 4268 - protein, 421 aa, Homo sapiens
MLTAISCILPMALVSHSVAKLILVNFHWQVSEILDRYKSNSAQLLVEARVQPNPSKHVPTSHPPHHCAVCMQFVRKENLLSLACQHQFCRSCWEQHCSVLVKDGVGVGVSCMAQDCPLRTPEDFVFPLLPNEELREKYRRYLFRDYVESHYQLQLCPGADCPMVIRVQEPRARRVQCNRCNEVFCFKCRQMYHAPTDCATIRKWLTKCADDSETANYISAHTKDCPKCNICIEKNGGCNHMQCSKCKHDFCWMCLGDWKTHGSEYYECSRYKENPDIVNQSQQAQAREALKKYLFYFERWENHNKSLQLEAQTYQRIHEKIQERVMNNLGTWIDWQYLQNAAKLLAKCRYTLQYTYPYAYYMESGPRKKLFEYQQAQLEAEIENLSWKVERADSYDRGDLENQMHIAEQRRRTLLKDFHDT

SEQ ID NO: 4269 - DNA, 3939 bp, Homo sapiens
ttcagctcatcagttgaaatggtagttgtgtagaaaagttaatgggtgtttgccacaatcttctgtgagttgaagttagggtttgtgactgtttcactttctcaactagtattctcttttcgtttatatgtaattaagtaacatttcgctgtttgcgggcttttcttttttgagatggagtttccctcgtgtgtgtgtgtgtgtgtgtgtgtatgtgtgtacgtgtgtgtgtgacggagtttcgcttttattgcccaggctggagtgcagtggcgcaatctcagctcactataacctccgcctcctgggttcaagcgtttctcctgtcttagcctcccaagtagctgggattacaggtgcctgtcaccacgcctgcttaatttttttgtatttttagtagagacagggtttcaccatattagccaggctggtctcgaactcctgacctcaggtgacccacccatctcagcctctcaaaattctgggattacaggcgtgagccaccgcacccggccaatggagtttcactcttgtcatccaggctagagtgcagtggcgcaatcttggctcactgtaaactctgcctcccgggttaaagtgattctcctgcctcagcgtcccgagtagctgggattacaggtgcatatcaccacacctggctaattttgtatttttagtagagatggggtttcgccatgttggccagtctggtcttgaactcctgacctcaagtgatccacccaccttagcctcccacagtgctgggattacaggcatgagtcaccacacccggccagtagaactctttaaacctgaaaaatcagtcaactttgcagactagaggaggatgttgaacacctatgtgtgttttttttttctttaccaactatgcacctatttttcagacacctaaaagtaatgtctgtgaaacagtggttttctttttctacatattacagcaggaagtgttcctatttatgtactgtctgtatcaatactaacggggcatgataagcaaaattttaaactttggtagttaaacctttatgttgcctcccctctgggctgccagctgtggggatgtgcttctcccttaaggactttggcaagaataacaagttcattggaatttgactttctgacatagagcagacagccttgccctgtcatgccaggcctttcatgtgaagttaccatttattagctgcttctgtctctccagggaaggatttcccttttataagcctgggccagggggatgatagtaagattccccatgtgataccagagttggaataggctgtagtgagattagggccaggactgtcccattttgattcttgaatggtttctgttacaacttgtcatggggaaaaagtaacacttattttttttttcctcccttagaagacaaaaatactaatgcatttgagaaagcggtagttttggggggagggggaaaaagcaactgctttcctgatctgcaacttggctggatgctaagatgtcagtggacatgaatagccaggggtctgacagcaatgaagaggactatgacccaaattgtgaggaagaggaagaagaagaagaagacgaccctggggacatagaggactattacgtgggagtagccagcgatgtggagcagcagggggctgatgcctttgatcccgaggagtaccagttcacttgcttgacctacaaggaatctgagggtgccctcaatgagcacatgaccagcttagcttctgtcctaaaggccgttgatgctcactgccatcagctgcatcctccctatggcactggtatctcattcagttgctaaacttatattagttaatttccactggcaagtttcagagatattggacagatacaagtccaattctgctcaactgcttgttgaggctcgagttcagcctaatccatcaaaacatgttcccacatcccatccccctcaccactgtgcagtgtgtatgcagtttgtgcgaaaggaaaacctactctctctggcctgtcagcaccagttttgccgcagctgctgggagcagcactgctcagttctcgtcaaggacggcgtgggcgtgggagtctcttgcatggctcaggactgtccactccgtacaccagaggactttgtgtttccattgcttcccaatgaagaattgagagagaaatacaggcgctacctcttcagggactatgtggagagtcattaccagctccagctgtgccctggtgcagactgccccatggttattcgggtacaggagcctagagctcgccgagtacagtgcaatcggtgcaacgaggtcttctgtttcaagtgtcgtcagatgtatcacgcacccacagactgtgccacaatccggaaatggctcacgaagtgtgcagacgactctgaaacagccaactacattagtgctcacactaaagactgtcccaagtgcaacatctgcattgagaagaatggaggctgcaatcacatgcaatgctccaaatgtaaacacgacttctgctggatgtgtctaggagattggaagactcatggcagtgaatactatgagtgcagtcgttacaaggagaatcctgacatcgtgaaccagagccaacaagcccaggcgagggaagccctcaagaagtacttattctactttgagaggtgggaaaaccacaataaaagcttgcagctagaggcacagacataccagcggattcacgagaagattcaggagagggtcatgaacaatctggggacatggatcgactggcagtacctacagaatgctgccaagctcttggccaagtgtcgatacaccctgcaatacacctacccatatgcatattacatggagtccggacccaggaagaagctgtttgaataccagcaggctcagctggaggctgagatcgaaaacctctcatggaaagtggagcgtgcagacagctatgacagaggggacttggagaaccagatgcatatagcggagcagcggaggagaaccctgctgaaagatttccatgacacctaagttgggatgtggatgtgccggggtgaggaagatgtggctgcaaggtctcccggctgccatactgcatgctgcaggctctgcctttcatgaccccaggcaacagccagggccccactcctgagagacactggcaacacctcttagttgatttctgttttcttctcttttcactttttgtttctaccagggtagaggccatgttgaactggcctcttttcaggacttttatttccccctggatggttgttgggagggagggaaagtgttttctgaatggctattaatagtattagatcattacaacttatgtaactttcaaaggttgtacaattatacaaaaaaaaaaaaaaggcaaactataggataacacagagccctttttgaaaataaattggcattggagtgttttaccctctagctgttttacttagaatgtaacatatgctgcctacccacctcaaaatgtctgtactgcaagagggccctgggcctctgctttccatattcacgtttggccagagttgtagtcccaaagaagagcatgggtggcagatggtagggaattgaactggcctgtgcaatgggcatggagcacaaggggtcacagcatgcctcctgccttaccgtggcagtacggagacagtccagaacatggtcttcttgccacggggtgttgttgtctctggtggtgctgcatgtctgtggctcacctttattcttgaaactgaggtttacctggatctggctactgaggctagagcccacagcagaatggggttgggcctgtggccccccaaactagggggtgtgggttcatcacagtgttgccttttgtctcctaaagatagggatctacttttgaagggaattgttcctcccaaataaatttgctttaccttggtccttt

SEQ ID NO: 4270 - protein, 421 aa, Homo sapiens; identical to SEQ ID NO: 4268

SEQ ID NO: 4271 - DNA, 5303 bp, Homo sapiens
ttcagctcatcagttgaaatggtagttgtgtagaaaagttaatgggtgtttgccacaatcttctgtgagttgaagttagggtttgtgactgtttcactttctcaactagtattctcttttcgtttatatgtaattaagtaacatttcgctgtttgcgggcttttcttttttgagatggagtttccctcgtgtgtgtgtgtgtgtgtgtgtgtatgtgtgtacgtgtgtgtgtgacggagtttcgcttttattgcccaggctggagtgcagtggcgcaatctcagctcactataacctccgcctcctgggttcaagcgtttctcctgtcttagcctcccaagtagctgggattacaggtgcctgtcaccacgcctgcttaatttttttgtatttttagtagagacagggtttcaccatattagccaggctggtctcgaactcctgacctcaggtgacccacccatctcagcctctcaaaattctgggattacaggcgtgagccaccgcacccggccaatggagtttcactcttgtcatccaggctagagtgcagtggcgcaatcttggctcactgtaaactctgcctcccgggttaaagtgattctcctgcctcagcgtcccgagtagctgggattacaggtgcatatcaccacacctggctaattttgtatttttagtagagatggggtttcgccatgttggccagtctggtcttgaactcctgacctcaagtgatccacccaccttagcctcccacagtgctgggattacaggcatgagtcaccacacccggccagtagaactctttaaacctgaaaaatcagtcaactttgcagactagaggaggatgttgaacacctatgtgtgttttttttttctttaccaactatgcacctatttttcagacacctaaaagtaatgtctgtgaaacagtggttttctttttctacatattacagcaggaagtgttcctatttatgtactgtctgtatcaatactaacggggcatgataagcaaaattttaaactttggtagttaaacctttatgttgcctcccctctgggctgccagctgtggggatgtgcttctcccttaaggactttggcaagaataacaagttcattggaatttgactttctgacatagagcagacagccttgccctgtcatgccaggcctttcatgtgaagttaccatttattagctgcttctgtctctccagggaaggatttcccttttataagcctgggccagggggatgatagtaagattccccatgtgataccagagttggaataggctgtagtgagattagggccaggactgtcccattttgattcttgaatggtttctgttacaacttgtcatggggaaaaagtaacacttattttttttttcctcccttagaagacaaaaatactaatgcatttgagaaagcggtagttttggggggagggggaaaaagcaactgctttcctgatctgcaacttggctggatgctaagatgtcagtggacatgaatagccaggggtctgacagcaatgaagaggactatgacccaaattgtgaggaagaggaagaagaagaagaagacgaccctggggacatagaggactattacgtgggagtagccagcgatgtggagcagcagggggctgatgcctttgatcccgaggagtaccagttcacttgcttgacctacaaggaatctgagggtgccctcaatgagcacatgaccagcttagcttctgtcctaaaggccgttgatgctcactgccatcagctgcatcctccctatggcactggtatctcattcagttgctaaacttatattagttaatttccactggcaagtttcagagatattggacagatacaagtccaattctgctcaactgcttgttgaggctcgagttcagcctaatccatcaaaacatgttcccacatcccatccccctcaccactgtgcagtgtgtatgcagtttgtgcgaaaggaaaacctactctctctggcctgtcagcaccagttttgccgcagctgctgggagcagcactgctcagttctcgtcaaggacggcgtgggcgtgggagtctcttgcatggctcaggactgtccactccgtacaccagaggactttgtgtttccattgcttcccaatgaagaattgagagagaaatacaggcgctacctcttcagggactatgtggagagtcattaccagctccagctgtgccctggtgcagactgccccatggttattcgggtacaggagcctagagctcgccgagtacagtgcaatcggtgcaacgaggtcttctgtttcaagtgtcgtcagatgtatcacgcacccacagactgtgccacaatccggaaatggctcacgaagtgtgcagacgactctgaaacagccaactacattagtgctcacactaaagactgtcccaagtgcaacatctgcattgagaagaatggaggctgcaatcacatgcaatgctccaaatgtaaacacgacttctgctggatgtgtctaggagattggaagactcatggcagtgaatactatgagtgcagtcgttacaaggagaatcctgacatcgtgaaccagagccaacaagcccaggcgagggaagccctcaagaagtacttattctactttgagaggtgggaaaaccacaataaaagcttgcagctagaggcacagacataccagcggattcacgagaagattcaggagagggtcatgaacaatctggggacatggatcgactggcagtacctacagaatgctgccaagctcttggccaagtgtcgatacaccctgcaatacacctacccatatgcatattacatggagtccggacccaggaagaagctgtttgaataccagcaggctcagctggaggctgagatcgaaaacctctcatggaaagtggagcgtgcagacagctatgacagaggggacttggagaaccagatgcatatagcggagcagcggaggagaaccctgctgaaagatttccatgacacctaagttgggatgtggatgtgccggggtgaggaagatgtggctgcaaggtctcccggctgccatactgcatgctgcaggctctgcctttcatgaccccaggcaacagccagggccccactcctgagagacactggcaacacctcttagttgatttctgttttcttctcttttcactttttgtttctaccagggtagaggccatgttgaactggcctcttttcaggacttttatttccccctggatggttgttgggagggagggaaagtgttttctgaatggctattaatagtattagatcattacaacttatgtaactttcaaaggttgtacaattatacaaaaaaaaaaaaaaggcaaactataggataacacagagccctttttgaaaataaattggcattggagtgttttaccctctagctgttttacttagaatgtaacatatgctgcctacccacctcaaaatgtctgtactgcaagagggccctgggcctctgctttccatattcacgtttggccagagttgtagtcccaaagaagagcatgggtggcagatggtagggaattgaactggcctgtgcaatgggcatggagcacaaggggtcacagcatgcctcctgccttaccgtggcagtacggagacagtccagaacatggtcttcttgccacggggtgttgttgtctctggtggtgctgcatgtctgtggctcacctttattcttgaaactgaggtttacctggatctggctactgaggctagagcccacagcagaatggggttgggcctgtggccccccaaactagggggtgtgggttcatcacagtgttgccttttgtctcctaaagatagggatctacttttgaagggaattgttcctcccaaataaatttgctttaccttggtcctttcttttgtgccagtattcaagtggtatagctctgagcagggtcacatttggccaaacctgacactgtcttgctgcattctcctttggcaaacatcagggtcagaattcaggatagcccttcctagggcactggactttctggcatgggggctgtgtttgcacaagttattttcatgttacctggagagtgtccagaggctgctctgaggctgaggtgtgttcccccttgcctggttccagctgtcagagggataccatcctagggtctgggaatccaaggccacgagactccttggtttgtggtccgagatcctgtactaaggagggtctggccagaggaacagaccagcttttgcacaatgaagcgcaagggaacaagtggtttgcctggtgtcctacctgtcctgaacctggtcctgtgggccattgaaaagttagatctgtgatctctggggtttttgtggctttgttcaatgcttccactctagggcaggcagagcagtctatactctcccaagcctgcttgacctccaagtagagctgatacagagatctgtgaatattgtgatagaaattctttggtattcatacatttcagctgcaagtcagcaatttcccaggtaccatgtaagctataaaacagtcattcttaaagacagaggatagctgtgactcatgggatcatgaggtccatggctggttgcaggttccctttttccttcctcaggttttgtctcttcctgtgttgtccccagcaagggagagactgtggggtggattgggagaacagattaggagtatagcaaatgaacccagaatggaacagtggggagctaactgtgaatgaggagagtacctgctgcaggacctggaggtcaggtgtgaatgctgtattggcacagggaataaatatcctggcgtctggagccttcacctctccgtcaagtccttcctgtgatactgccatggcacaggatctgagttgcagctctgcaccctaaatcacaccctgggcattgtctgggctgcagggctgccaggttctgtacttgtgtccagctgtggccctggatgctggagctggagggttttctgtgctcagactgtagcctgtagctcttggcctgtgtagagccccctcctgtgccctcagtggctgtcgtttgttaacatcatcaggaagatgggaaaggtcaggcagaatttttctgccctacaaagggtggaagagaaaggacacagtattttcatgaatttaccatatatctttgtttttcttcaacgaaaaagttaattgaggcaatgtcatctgctcaaagttgagtggtttattcacaataaactgtaagtttctgattataaaaa

SEQ ID NO: 4272 - protein, 421 aa, Homo sapiens; identical to SEQ ID NO: 4268

SEQ ID NO: 4273 - DNA, 2323 bp, Homo sapiens
aatatcattcatgttttcattaacctaaaataagttttcttgcttgcttatcatccttcagctcttgtccatattcatacatagcattattgttcagtatttcattcaaccaatattgggtatttattgagaacctactacgcctcctgttatgttcctgtgccaggcacataacaggaaaaataactgtaaacaaaacagacaaaaatctctgccctggtagacattgcattataataatcagtagatatatgtattttatgcattctgcttttttcatgtatatttcaaacatttccccatttttactttgtcctcataaatactttaaatggctgtgtagcatgccatcttgtttttgaactgtaatttgcttaagctttctgcattgggcatttaagtgagtacctatgtattacagttgttgggggactggttacattgttgtgaatgtctttatggatatgacttttatgtctgttgggccttgtccagagtctgggctagtggtcagatgattgggttccagtcccattttttccatttaatataatatgacctcagataagtctgtcagcatctctatgcttgagtttcctcatctgtaaaataatgataacacctccttcacaacattaaatgtgatgataatgcagataaagtgcctggaacatgaatgttcaaatcgattttgcttggtcatggtagaagcggggcaaaagtggaaggatgggagtgttatttgtcttggttccttaaaacacattctcagggttgtgtgtcttgaatcatagggtaggagcctacacattgaggatggttctgggcaatgtattgctgactggtgcgtctgagtgtgcgtatgatattgggtcatatactttggattattttaccttcccctagagcctctggttctcttctcctgggacccaccaaaagaaaagtaaaaacaacacaaaatgaactttgaattggagccgggaaaaagatacagggaaataatagcttgtttgtacctgtatttgtggttgactgcaatgtttggtcttatgcctatgttaatagcactacttagtgtttacttgttttgggggttcttgttattgagacacctccgtactttaattttgccttgctccaatctaattatctttttttttttctttgcccttgctgctctaggaaaaatttgaaggattagatttgtcttccccaaagagggaagaattgtaggaaagatttgaaaaaggtgcagaatgaggagtattttgctcctcctgaaatgtatctgccctctaactttatttcttaaactgacatgaactgtcaaacatgaagttccttttctatctaaactttaaacttttataaagtttaaatctttataaacatgaatgatttccaccaggcacagtggctcatgcctgtattcccagtactttgggaggccaaggcaggcggatcacctgaggtcaggagttcaagaccagctagctaacatggtgaaaccctgtctctactaaatatacaaaaattagctgggcatggtggtgcatgcctgtagttccagctacttgggaggctgaggcacgagaatcgcttgaacctgggaagcggaggttgcagtgagccaagattgcaccactgcactccagccttggcaacagagcgagactctgtctcaaaaaaacaaaaaatgaatgatttcacagtgatgaccatgttattgatcataaatagagaaaaatacaggcaggatgagcaaggggtttgtttggagattttaaaaggaaaacagagctgttcttataattgtgaacaaaatgtggtctatatctggaaaagttattctctttgactagcagtttcttttcctggtaagctaacagtctcttcaattctgtcaccatcctttccaggagtctgtagataaccttgcctctttttacaagaaatctttctaatgccatcaagcttggtttcctggattctctatcttaattgttggtaccaccatccaccaacccggaaatagaggattgaccctctaccccttgtttacatgaatccctccctgatccccagacagagtctgtcactcttgcctctgtaccactgtgcttcttcttggtgtgtgcttacagtgtttgccaattagttgtaaactaggatataaactctttgagatagaggtccatattttttctttacctaacagcacctggcagaaatgtctggttatgttatgttctcagtaagtgttgctttttaatatgtctaagcccaggccaataaatgcacagttgaaaatttgactcca

SEQ ID NO: 4274 - protein, 53 aa, Homo sapiens [sequence omitted]

SEQ ID NO: 4275 - DNA, 407 bp, Homo sapiens
ttgttggcttggataaaaggaaaattttgaacatgggaccctgacttaatgaatatttgaatgtttttcttttccaattttaagtttcaagtgtcgtcagatgtatcacgcacccacagactgtgccacaatccggaaatggctcacgaagtgtgcagacgactctgaaacagccaactacattagtgctcacactaaagactgtcccaagtgcaacatctgcattgagaagaatggaggctgcaatcacatgcaatgctccaaatgtaaacacggtgagttccaagcttggtgtgtaaggcccagtggcactttcttgtggttgggtctccgttactatttaagtgagtacttctgccatgaaatgacaaaacatagaagaacctcagtcacttaacagtcacagt

SEQ ID NO: 4276 - protein, 98 aa, Homo sapiens
MYHAPTDCATIRKWLTKCADDSETANYISAHTKDCPKCNICIEKNGGCNHMQCSKCKHGEFQAWCVRPSGTFLWLGLRYYLSEYFCHEMTKHRRTSVT

SEQ ID NO: 4277 - DNA, 875 bp, Homo sapiens
aggagacaaaaggcaacactgtgatgaacccacaccccctagtttggggggccacaggcccaaccccattctgctgtgggctctagcctcagtagccagatccaggtaaacctcagtttcaagaataaaggtgagccacagacatgcagcaccaccagagacaacaacaccccgtggcaagaagaccatgttctggactgtctccgtactgccacggtaaggcaggaggcatgctgtgaccccttgtgctccatgcccattgcacaggccagttcaattccctaccatctgccacccatgctcttctttgggactacaactctggccaaacgtgaatatggaaagcagaggcccagggccctcttgcagtacagacattttgagggcacagaagaagaagaaaaccacaggagtcccatgaaggtgcagaggtctacacaggagttcaggatagacaccttgctggcaggacatggccacagactcctctaacttattccccaaagtgcaagagcaggtcttcttcagtccatccttctaacctgtccagagcagctgtatgcttactgccagatcgctctacccttctggggcaacaggactcgagccctgaggactctgcaaagctaggcccctgatggtctactatgcttagagaccattatgcatggggctctttgggcttctaaagggctccctgggagaaactgccttccaaatctgactactaagatgatactatgggaacagattgtgaggacagaaagaaaaaaataaataaaaattaaaaacgtagaaaaaagaaaaaaaaaaaaagatggtactagatggaaaagactgtctgatggcccttcattgtccttcaatccatcatt

SEQ ID NO: 4278 - protein, 79 aa, Homo sapiens
MPIAQASSIPYHLPPMLFFGTTTLAKREYGKQRPRALLQYRHFEGTEEEENHRSPMKVQRSTQEFRIDTLLAGHGHRLL

SEQ ID NO: 4279 - DNA, 880 bp, Homo sapiens
aattctgaccctgatgtttgccaaaggagaatgcagcaagacagtgtcaggtttggccaaatgtgaccctgctcagagctataccacttgaatactggcacaaaagaaaggaccaaggtaaagcaaatttatttgggaggaacaattcccttcaaaagtagatccctatctttaggagacaaaaggcaacactgtgatgaacccacaccccctagtttggggggccacaggcccaaccccattctgctgtgggctctagcctcagtagccagatccaggtaaacctcagtttcaagaataaaggtgagccacagacatgcagcaccaccagagacaacaacaccccgtggcaagaagaccatgttctggactgtctccgtactgccacgggcacagaagaagaagaaaaccacaggagtcccatgaaggtgcagaggtctacacaggagttcaggatagacaccttgctggcaggacatggccacagactcctctaacttattccccaaagtgcaagagcaggtcttcttcagtccatccttctaacctgtccagagcagctgtatgcttactgccagatcgctctacccttctggggcaacaggactcgagccctgaggactctgcaaagctaggcccctgatggtctactatgcttagagaccattatgcatggggctctttgggcttctaaagggctccctgggagaaactgccttccaaatctgactactaagatgatactatgggaacagattgtgaggacagaaagaaaaaaataaataaaaattaaaaacgtagaaaaaagaaaaaaaaaaaaagatggtactagatggaaaagactgtctgatggcccttcattgtccttcaatccatcatt

SEQ ID NO: 4280 - protein, 108 aa, Homo sapiens
MQHHQRQQHPVARRPCSGLSPYCHGHRRRRKPQESHEGAEVYTGVQDRHLAGRTWPQTPLTYSPKCKSRSSSVHPSNLSRAAVCLLPDRSTLLGQQDSSPEDSAKLGP

SEQ ID NO: 4281 - DNA, 849 bp, Homo sapiens
aagcatacagctgctctggacaggttagaaggatggactgaagaagacctgctcttgcactttggggaataagttagaggagtctgtggccatgtcctgccagcaaggtgtctatcctgaactcctgtgtagacctctgcaccttcatgggactcctgtggttttcttcttcttctgtgccctgtagtgggaaaaccacaataaaagcttgcagctagaggcacagacataccagcggattcacgagaagattcaggagagggtcatgaacaatctggggacatggatcgactggcagtacctacagaatgctgccaagctcttggccaagtgtcgatacaccctgcaatacacctacccatatgcatattacatggagtccggacccaggaagaagctgtttgaataccagcaggctcagctggaggctgacttggagaaccagatgcatatagcggagcagcggaggagaaccctgctgaaagatttccatgacacctaagttgggatgtggatgtgccggggtgaggaagatgtggctgcaaggtctcccggctgccatactgcatgctgcaggctctgcctttcatgaccccaggcaacagccagggccccactcctgagagacactggcaacacctcttagttgatttctgttttcttctcttttcactttttgtttctaccagggtagaggccatgttgaactggcctcttttcaggacttttatttccccctggatggttgttgggagggagggaaagtgttttctgaatggctattaatagtattagatcattacaacttatgtaactttcaaaggttgtacaattatacaaaaaaaaaaa

SEQ ID NO: 4282 - protein, 78 aa, Homo sapiens
MNNLGTWIDWQYLQNAAKLLAKCRYTLQYTYPYAYYMESGPRKKLFEYQQAQLEADLENQMHIAEQRRRTLLKDFHDT

SEQ ID NO: 4283 - DNA, 911 bp, Homo sapiens
aagcatacagctgctctggacaggttagaaggatggactgaagaagacctgctcttgcactttggggaataagttagaggagtctgtggccatgtcctgccagcaaggtgtctatcctgaactcctgtgtagacctctgcaccttcatgggactcctgtggttttcttcttcttctgtgccctgtagtgggaaaaccacaataaaagcttgcagctagaggcacagacataccagcggattcacgagaagattcaggagagggtcatgaacaatctggggacatggatcgactggcagtacctacagaatgctgccaagctcttggccaagtgtcgatacaccctgcaatacacctacccatatgcatattacatggagtccggacccaggaagaagctgtttgaataccagcaggctcagctggaggctgacttggagaaccagatgcatatagcggagcagcggaggagaaccctgctgaaagatttccatgacacctaagttgggatgtggatgtgccggggtgaggaagatgtggctgcaaggtctcccggctgccatactgcatgctgcaggctctgcctttcatgaccccaggcaacagccagggccccactcctgagagacactggcaacacctcttagttgatttctgttttcttctcttttcactttttgtttctaccagggtagaggccatgttgaactggcctcttttcaggacttttatttccccctggatggttgttgggagggagggaaagtgttttctgaatggctattaatagtattagatcattacaacttatgtaactttcaaaggttgtacaattatacaaaaaaaaaaaaaaggcaaactataggataacacagagccctttttgaaaataaattggcattggagtgtttt

SEQ ID NO: 4284 - protein, 78 aa, Homo sapiens; identical to SEQ ID NO: 4282

SEQ ID NO: 4285 - DNA, 1409 bp, Homo sapiens
aagcatacagctgctctggacaggttagaaggatggactgaagaagacctgctcttgcactttggggaataagttagaggagtctgtggccatgtcctgccagcaaggtgtctatcctgaactcctgtgtagacctctgcaccttcatgggactcctgtggttttcttcttcttctgtgccctgtagtgggaaaaccacaataaaagcttgcagctagaggcacagacataccagcggattcacgagaagattcaggagagggtcatgaacaatctggggacatggatcgactggcagtacctacagaatgctgccaagctcttggccaagtgtcgatacaccctgcaatacacctacccatatgcatattacatggagtccggacccaggaagaagctgtttgaataccagcaggctcagctggaggctgacttggagaaccagatgcatatagcggagcagcggaggagaaccctgctgaaagatttccatgacacctaagttgggatgtggatgtgccggggtgaggaagatgtggctgcaaggtctcccggctgccatactgcatgctgcaggctctgcctttcatgaccccaggcaacagccagggccccactcctgagagacactggcaacacctcttagttgatttctgttttcttctcttttcactttttgtttctaccagggtagaggccatgttgaactggcctcttttcaggacttttatttccccctggatggttgttgggagggagggaaagtgttttctgaatggctattaatagtattagatcattacaacttatgtaactttcaaaggttgtacaattatacaaaaaaaaaaaaaaggcaaactataggataacacagagccctttttgaaaataaattggcattggagtgttttaccctctagctgttttacttagaatgtaacatatgctgcctacccacctcaaaatgtctgtactgcaagagggccctgggcctctgctttccatattcacgtttggccagagttgtagtcccaaagaagagcatgggtggcagatggtagggaattgaactggcctgtgcaatgggcatggagcacaaggggtcacagcatgcctcctgccttaccgtggcagtacggagacagtccagaacatggtcttcttgccacggggtgttgttgtctctggtggtgctgcatgtctgtggctcacctttattcttgaaactgaggtttacctggatctggctactgaggctagagcccacagcagaatggggttgggcctgtggccccccaaactagggggtgtgggttcatcacagtgttgccttttgtctcctaaagatagggatctacttttgaagggaattgttcctcccaaataaatttgctttaccttggtccttt

SEQ ID NO: 4286 - protein, 78 aa, Homo sapiens; identical to SEQ ID NO: 4282

SEQ ID NO: 4287 - DNA, 2773 bp, Homo sapiens
aagcatacagctgctctggacaggttagaaggatggactgaagaagacctgctcttgcactttggggaataagttagaggagtctgtggccatgtcctgccagcaaggtgtctatcctgaactcctgtgtagacctctgcaccttcatgggactcctgtggttttcttcttcttctgtgccctgtagtgggaaaaccacaataaaagcttgcagctagaggcacagacataccagcggattcacgagaagattcaggagagggtcatgaacaatctggggacatggatcgactggcagtacctacagaatgctgccaagctcttggccaagtgtcgatacaccctgcaatacacctacccatatgcatattacatggagtccggacccaggaagaagctgtttgaataccagcaggctcagctggaggctgacttggagaaccagatgcatatagcggagcagcggaggagaaccctgctgaaagatttccatgacacctaagttgggatgtggatgtgccggggtgaggaagatgtggctgcaaggtctcccggctgccatactgcatgctgcaggctctgcctttcatgaccccaggcaacagccagggccccactcctgagagacactggcaacacctcttagttgatttctgttttcttctcttttcactttttgtttctaccagggtagaggccatgttgaactggcctcttttcaggacttttatttccccctggatggttgttgggagggagggaaagtgttttctgaatggctattaatagtattagatcattacaacttatgtaactttcaaaggttgtacaattatacaaaaaaaaaaaaaaggcaaactataggataacacagagccctttttgaaaataaattggcattggagtgttttaccctctagctgttttacttagaatgtaacatatgctgcctacccacctcaaaatgtctgtactgcaagagggccctgggcctctgctttccatattcacgtttggccagagttgtagtcccaaagaagagcatgggtggcagatggtagggaattgaactggcctgtgcaatgggcatggagcacaaggggtcacagcatgcctcctgccttaccgtggcagtacggagacagtccagaacatggtcttcttgccacggggtgttgttgtctctggtggtgctgcatgtctgtggctcacctttattcttgaaactgaggtttacctggatctggctactgaggctagagcccacagcagaatggggttgggcctgtggccccccaaactagggggtgtgggttcatcacagtgttgccttttgtctcctaaagatagggatctacttttgaagggaattgttcctcccaaataaatttgctttaccttggtcctttcttttgtgccagtattcaagtggtatagctctgagcagggtcacatttggccaaacctgacactgtcttgctgcattctcctttggcaaacatcagggtcagaattcaggatagcccttcctagggcactggactttctggcatgggggctgtgtttgcacaagttattttcatgttacctggagagtgtccagaggctgctctgaggctgaggtgtgttcccccttgcctggttccagctgtcagagggataccatcctagggtctgggaatccaaggccacgagactccttggtttgtggtccgagatcctgtactaaggagggtctggccagaggaacagaccagcttttgcacaatgaagcgcaagggaacaagtggtttgcctggtgtcctacctgtcctgaacctggtcctgtgggccattgaaaagttagatctgtgatctctggggtttttgtggctttgttcaatgcttccactctagggcaggcagagcagtctatactctcccaagcctgcttgacctccaagtagagctgatacagagatctgtgaatattgtgatagaaattctttggtattcatacatttcagctgcaagtcagcaatttcccaggtaccatgtaagctataaaacagtcattcttaaagacagaggatagctgtgactcatgggatcatgaggtccatggctggttgcaggttccctttttccttcctcaggttttgtctcttcctgtgttgtccccagcaagggagagactgtggggtggattgggagaacagattaggagtatagcaaatgaacccagaatggaacagtggggagctaactgtgaatgaggagagtacctgctgcaggacctggaggtcaggtgtgaatgctgtattggcacagggaataaatatcctggcgtctggagccttcacctctccgtcaagtccttcctgtgatactgccatggcacaggatctgagttgcagctctgcaccctaaatcacaccctgggcattgtctgggctgcagggctgccaggttctgtacttgtgtccagctgtggccctggatgctggagctggagggttttctgtgctcagactgtagcctgtagctcttggcctgtgtagagccccctcctgtgccctcagtggctgtcgtttgttaacatcatcaggaagatgggaaaggtcaggcagaatttttctgccctacaaagggtggaagagaaaggacacagtattttcatgaatttaccatatatctttgtttttcttcaacgaaaaagttaattgaggcaatgtcatctgctcaaagttgagtggtttattcacaataaactgtaagtttctgattataaaaa

SEQ ID NO: 4288 - protein, 78 aa, Homo sapiens; identical to SEQ ID NO: 4282

SEQ ID NO: 4289 - DNA, 464 bp, Homo sapiens
aacctctcatggaaagtggagcgtgcagacagctatgacagaggggacttggagaaccagatgcatatagcggagcagcggaggagaaccctgctgaaagatttccatgacacctaagttgggatgtggatgtgccggggtgaggaagatgtggctgcaaggtctcccggctgccatactgcatgctgcaggctctgcctttcatgaccccaggcaacagccagggccccactcctgagagacactggcaacacctcttagttgatttctgttttcttctcttttcactttttgtttctaccagggtagaggccatgttgaactggcctcttttcaggacttttatttccccctggatggttgttgggagggagggaaagtgttttctgaatggctattaatagtattagatcattacaacttatgtaactttcaaaggttgtacaattatacaaaaaaaaaaa

SEQ ID NO: 4290 - protein, 72 aa, Homo sapiens
MLQALPFMTPGNSQGPTPERHWQHLLVDFCFLLFSLFVSTRVEAMLNWPLFRTFISPWMVVGREGKCFLNGY

SEQ ID NO: 4291 - DNA, 526 bp, Homo sapiens
aacctctcatggaaagtggagcgtgcagacagctatgacagaggggacttggagaaccagatgcatatagcggagcagcggaggagaaccctgctgaaagatttccatgacacctaagttgggatgtggatgtgccggggtgaggaagatgtggctgcaaggtctcccggctgccatactgcatgctgcaggctctgcctttcatgaccccaggcaacagccagggccccactcctgagagacactggcaacacctcttagttgatttctgttttcttctcttttcactttttgtttctaccagggtagaggccatgttgaactggcctcttttcaggacttttatttccccctggatggttgttgggagggagggaaagtgttttctgaatggctattaatagtattagatcattacaacttatgtaactttcaaaggttgtacaattatacaaaaaaaaaaaaaaggcaaactataggataacacagagccctttttgaaaataaattggcattggagtgtttt

SEQ ID NO: 4292 - protein, 72 aa, Homo sapiens; identical to SEQ ID NO: 4290

SEQ ID NO: 4293 - DNA, 1929 bp, Homo sapiens
agcggagcagcggaggagaaccctgctgaaagatttccatgacacctaagttgggatgtggatgtgccggggtgaggaagatgtggctgcaaggtctcccggctgccatactgcatgctgcaggctctgcctttcatgaccccaggcaacagccagggccccactcctgagagacactggcaacacctcttagttgatttctgttttcttctcttttcactttttgtttctaccagggtagaggccatgttgaactggcctcttttcaggacttttatttccccctggatggttgttgggagggagggaaagtgttttctgaatggctattaatagtattagatcattacaacttatgtaactttcaaaggttgtacaattatacaaaaaaaaaaaaaaggcaaactataggataacacagagccctttttgaaaataaattggcattggagtgttttaccctctagctgttttacttagaatgtaacatatgctgcctacccacctcaaaatgtctgtactgcaagagggccctgggcctctgctttccatattcacgtttggccagagttgtagtcccaaagaagagcatgggtggcagatggtagggaattgaactggcctgtgcaatgggcatggagcacaaggggtcacagcatgcctcctgccttaccgtggcagtacggagacagtccagaacatggtcttcttgccacggggtgttgttgtctctggtggtgctgcatgtctgtggctcacctttattcttgaaactgaggtgtgttcccccttgcctggttccagctgtcagagggataccatcctagggtctgggaatccaaggccacgagactccttggtttgtggtccgagatcctgtactaaggagggtctggccagaggaacagaccagcttttgcacaatgaagcgcaagggaacaagtggtttgcctggtgtcctacctgtcctgaacctggtcctgtgggccattgaaaagttagatctgtgatctctggggtttttgtggctttgttcaatgcttccactctagggcaggcagagcagtctatactctcccaagcctgcttgacctccaagtagagctgatacagagatctgtgaatattgtgatagaaattctttggtattcatacatttcagctgcaagtcagcaatttcccaggtaccatgtaagctataaaacagtcattcttaaagacagaggatagctgtgactcatgggatcatgaggtccatggctggttgcaggttccctttttccttcctcaggttttgtctcttcctgtgttgtccccagcaagggagagactgtggggtggattgggagaacagattaggagtatagcaaatgaacccagaatggaacagtggggagctaactgtgaatgaggagagtacctgctgcaggacctggaggtcaggtgtgaatgctgtattggcacagggaataaatatcctggcgtctggagccttcacctctccgtcaagtccttcctgtgatactgccatggcacaggatctgagttgcagctctgcaccctaaatcacaccctgggcattgtctgggctgcagggctgccaggttctgtacttgtgtccagctgtggccctggatgctggagctggagggttttctgtgctcagactgtagcctgtagctcttggcctgtgtagagccccctcctgtgccctcagtggctgtcgtttgttaacatcatcaggaagatgggaaaggtcaggcagaatttttctgccctacaaagggtggaagagaaaggacacagtattttcatgaatttaccatatatctttgtttttcttcaacgaaaaagttaattgaggcaatgtcatctgctcaaagttgagtggtttattcacaataaactgtaagtttctgattataaaaa

SEQ ID NO: 4294 - protein, 97 aa, Homo sapiens
MVFLPRGVVVSGGAACLWLTFILETEVCSPLPGSSCQRDTILGSGNPRPRDSLVCGPRSCTKEGLARGTDQLLHNEAQGNKWFAWCPTCPEPGPVGH

SEQ ID NO: 4295 - DNA, 1108 bp, Homo sapiens
gtctcctaaagatagggatctacttttgaagggaattgttcctcccaaataaatttgctttaccttggtcctttcttttgtgccagtattcaagtggtatagctctgagcagggtcacatttggccaaacctgacactgtcttgctgcattctcctttggcaaacatcagggtcagaattcaggatagcccttcctagggcactggactttctggcatgggggctgtgtttgcacaagttattttcatgttacctggagagtgtccagaggctgctctgaggctgaggtgtgttcccccttgcctggttccagctgtcagagggataccatcctagggtctgggaatccaaggccacgagactccttggtttgtggtccgagatcctgtactaaggagggtctggccagaggaacagaccagcttttgcacaatgaagcgcaagggaacaagtggtttgcctggtgtcctacctgtcctgaacctggtcctgtgggccattgaaaagttagatctgtgatctctggggtttttgtggctttgttcaatgcttccactctagggcaggcagagcagtctatactctcccaagcctgcttgacctccaagtagagctgatacagagatctgtgaatattgtgatagaaattctttggtattcatacatttcagctgcaagtcagcaatttcccaggtaccatgtaagctataaaacagtcattcttaaagacagaggatagctgtgactcatgggatcatgaggtccatggctggttgcaggttccctttttccttcctcaggttttgtctcttcctgtgttgtccccagcaagggagagactgtggggtggattgggagaacagattaggagtatagcaaatgaacccagaatggaacatggctgtcgtttgttaacatcatcaggaagatgggaaaggtcaggcagaatttttctgccctacaaagggtggaagagaaaggacacagtattttcatgaatttaccatatatctttgtttttcttcaacgaaaaagttaattgaggcaatgtcatctgctcaaagttgagtggtttattcacaataaactgtaagtttctgattataaa

SEQ ID NO: 4296 - protein, 35 aa, Homo sapiens
MEHGCRLLTSSGRWERSGRIFLPYKGWKRKDTVFS

SEQ ID NO: 4297 - DNA, 1132 bp, Homo sapiens
cacccccgctcctggagcaagaagatgcagacgatacttttcccggaggcaagagggcgtcttcacgcaggcaccgagaagctcccactagtgtatgccttaatggtgccgctcttgtccgcgtctacgcttgggaccttggcttctgacttggagagtgtacagctctgcccgacggcaacccagcttgggaagagaagccccagcgtgggctggggctcaaggcgcaggaaggccgagcccggcgcggacgcaggcggctccgggcgggctcagcacccccaggcaccgtctcctagtgaccgcggcgctcgcgggcctggcggccgttgtccgggcgactgcgcagcgcgggcacccccgcggcccctcccctgggcgcgcgcgcgacctgggtgccatggcggcagcggcggtgacaggccagcggcctgagaccgcggcggccgaggaggcctcgaggccgcagtgggcgccgccagaccactgccaggctcaggcggcggccgggctgggcgacggcgaggacgcaccggtgcgtccgctgtgcaagccccgcggcatctgctcgcgcgcctacttcctggtgctgatggtgttcgtgcacctgtacctgggtaacgtgctggcgctgctgctcttcgtgcactacagcaacggcgacgaaagcagcgatcccgggccccaacaccgtgcccagggccccgggcccgagcccaccttaggtcccctcacccggctggagggcatcaaggtggggcacgagcgtaaggtccagctggtcaccgacagggatcacttcatccgaaccctcagcctcaagccgctgctcttcgcatcaccagtgtcaccagcagccacagcccctgctccatcactgccttctgtgccttggccttaatgaactgaggttgagggttttatagggctgttcctgcacccagggagccaacagaggagatcctgcaggggtttgcacagctccgaggtgcccggacccacctggtgaggccccaacatgctgactgggctgtttgtttttgattagcacacagcaggggactgtagaggctggaggcacctccactgggcttgcagattactggcacctaataaactgaagaaacctggg

SEQ ID NO: 4298 - protein, 166 aa, Homo sapiens
MAAAAVTGQRPETAAAEEASRPQWAPPDHCQAQAAAGLGDGEDAPVRPLCKPRGICSRAYFLVLMVFVHLYLGNVLALLLFVHYSNGDESSDPGPQHRAQGPGPEPTLGPLTRLEGIKVGHERKVQLVTDRDHFIRTLSLKPLLFASPVSPAATAPAPSLPSVPWP

SEQ ID NO: 4299 - DNA, 1043 bp, Homo sapiens
cacccccgctcctggagcaagaagatgcagacgatacttttcccggaggcaagagggcgtcttcacgcaggcaccgagaagctcccactagtgtatgccttaatggtgccgctcttgtccgcgtctacgcttgggaccttggcttctgacttggagagtgtacagctctgcccgacggcaacccagcttgggaagagaagccccagcgtgggctggggctcaaggcgcaggaaggccgagcccggcgcggacgcaggcggctccgggcgggctcagcacccccaggcaccgtctcctagtgaccgcggcgctcgcgggcctggcggccgttgtccgggcgactgcgcagcgcgggcacccccgcggcccctcccctgggcgcgcgcgcgacctgggtgccatggcggcagcggcggtgacaggccagcggcctgagaccgcggcggccgaggaggcctcgaggccgcagtgggcgccgccagaccactgccaggctcaggcggcggccgggctgggcgacggcgaggacgcaccggtgcgtccgctgtgcaagccccgcggcatctgctcgcgcgcctacttcctggtgctgatggtgttcgtgcacctgtacctgggtaacgtgctggcgctgctgctcttcgtgcactacagcaacggcgacgaaagcagcgatcccgggccccaacaccgtgcccagggccccgggcccgagcccaccttaggtcccctcacccggctggagggcatcaagaaatccccggcttcctgactgatgaagagtgtcggctcatcatccatctggcgcagatgaaggggttacagcgcagccagatcctgcctactgaagagtatgaagaggcaatgagcactatgcaggtcagccagctggacctcttccggctgctggaccagaaccgtgatgggcaccttcagctccgtgaggttctggcccagactcgcctgggaaatggatggtggatgactccagagagcattcaggagatgtacgccgcgatcaaggctgaccctgatggtgacgg

SEQ ID NO: 4300 - protein, 123 aa, Homo sapiens
MAAAAVTGQRPETAAAEEASRPQWAPPDHCQAQAAAGLGDGEDAPVRPLCKPRGICSRAYFLVLMVFVHLYLGNVLALLLFVHYSNGDESSDPGPQHRAQGPGPEPTLGPLTRLEGIKKSPAS

SEQ ID NO: 4301 - DNA, 1127 bp, Homo sapiens
cacccccgctcctggagcaagaagatgcagacgatacttttcccggaggcaagagggcgtcttcacgcaggcaccgagaagctcccactagtgtatgccttaatggtgccgctcttgtccgcgtctacgcttgggaccttggcttctgacttggagagtgtacagctctgcccgacggcaacccagcttgggaagagaagccccagcgtgggctggggctcaaggcgcaggaaggccgagcccggcgcggacgcaggcggctccgggcgggctcagcacccccaggcaccgtctcctagtgaccgcggcgctcgcgggcctggcggccgttgtccgggcgactgcgcagcgcgggcacccccgcggcccctcccctgggcgcgcgcgcgacctgggtgccatggcggcagcggcggtgacaggccagcggcctgagaccgcggcggccgaggaggcctcgaggccgcagtgggcgccgccagaccactgccaggctcaggcggcggccgggctgggcgacggcgaggacgcaccggtgcgtccgctgtgcaagccccgcggcatctgctcgcgcgcctacttcctggtgctgatggtgttcgtgcacctgtacctgggtaacgtgctggcgctgctgctcttcgtgcactacagcaacggcgacgaaagcagcgatcccgggccccaacaccgtgcccagggccccgggcccgagcccaccttaggtcccctcacccggctggagggcatcaaggtggggcacgagcgtaaggtccagctggtcaccgacagggatcacttcatccgaaccctcagcctcaagccgctgctcttcgaaatccccggcttcctgactgatgaagagtgtcggctcatcatccatctggcgcagatgaaggggttacagcgcagccagatcctgcctactgaagagtatgaagaggcaatgagcactatgcaggtcagccagctggacctcttccggctgctggaccagaaccgtgatgggcaccttcagctccgtgaggttctggcccagactcgcctgggaaatggatggtggatgactccagagagcattcaggagatgtacgccgcgatcaaggctgaccctgatggtgacggtg

SEQ ID NO: 4302 - protein, 241 aa, Homo sapiens
MAAAAVTGQRPETAAAEEASRPQWAPPDHCQAQAAAGLGDGEDAPVRPLCKPRGICSRAYFLVLMVFVHLYLGNVLALLLFVHYSNGDESSDPGPQHRAQGPGPEPTLGPLTRLEGIKVGHERKVQLVTDRDHFIRTLSLKPLLFEIPGFLTDEECRLIIHLAQMKGLQRSQILPTEEYEEAMSTMQVSQLDLFRLLDQNRDGHLQLREVLAQTRLGNGWWMTPESIQEMYAAIKADPDGD

SEQ ID NO: 4303 - DNA, 1629 bp, Homo sapiens
cacccccgctcctggagcaagaagatgcagacgatacttttcccggaggcaagagggcgtcttcacgcaggcaccgagaagctcccactagtgtatgccttaatggtgccgctcttgtccgcgtctacgcttgggaccttggcttctgacttggagagtgtacagctctgcccgacggcaacccagcttgggaagagaagccccagcgtgggctggggctcaaggcgcaggaaggccgagcccggcgcggacgcaggcggctccgggcgggctcagcacccccaggcaccgtctcctagtgaccgcggcgctcgcgggcctggcggccgttgtccgggcgactgcgcagcgcgggcacccccgcggcccctcccctgggcgcgcgcgcgacctgggtgccatggcggcagcggcggtgacaggccagcggcctgagaccgcggcggccgaggaggcctcgaggccgcagtgggcgccgccagaccactgccaggctcaggcggcggccgggctgggcgacggcgaggacgcaccggtgcgtccgctgtgcaagccccgcggcatctgctcgcgcgcctacttcctggtgctgatggtgttcgtgcacctgtacctgggtaacgtgctggcgctgctgctcttcgtgcactacagcaacggcgacgaaagcagcgatcccgggccccaacaccgtgcccagggccccgggcccgagcccaccttaggtcccctcacccggctggagggcatcaaggtggggcacgagcgtaaggtccagctggtcaccgacagggatcacttcatccgaaccctcagcctcaagccgctgctcttcgaaatccccggcttcctgactgatgaagagtgtcggctcatcatccatctggcgcagatgaaggggttacagcgcagccagatcctgcctactgaagagtatgaagaggcaatgagcactatgcaggtcagccagctggacctcttccggctgctggaccagaaccgtgatgggcaccttcagctccgtgaggttctggcccagactcgcctgggaaatggatggtggatgactccagagagcattcaggagatgtacgccgcgatcaaggctgaccctgatggtgacggagtgctgagtctgcaggagttctccaacatggaccttcgggacttccacaagtacatgaggagccacaaggcagagtccagtgagctggtgcggaacagccaccatacctggctctaccagggtgagggtgcccaccacatcatgcgtgccatccgccagaggtgagcacctgaagctgttctcactggagcagggggagaagactgggcagggcctccacagaagtccttgtctggggccaagaggacagaatggattaacccatttgggattaagttccatttgttagaccaggattgggacccactgaaagacaggcaattaacaaaggcaaattagccctccttgcaggcacacaatgggcaactggggttagatagagattgagcacttctttctgattagataaatgacctcttatctttgaccccttatctgaccccgtcacagcaggaaaagggtttttaaataaacaactttcttccagggaggaggacctcagg

SEQ ID NO: 4304 - protein, 296 aa, Homo sapiens
MAAAAVTGQRPETAAAEEASRPQWAPPDHCQAQAAAGLGDGEDAPVRPLCKPRGICSRAYFLVLMVFVHLYLGNVLALLLFVHYSNGDESSDPGPQHRAQGPGPEPTLGPLTRLEGIKVGHERKVQLVTDRDHFIRTLSLKPLLFEIPGFLTDEECRLIIHLAQMKGLQRSQILPTEEYEEAMSTMQVSQLDLFRLLDQNRDGHLQLREVLAQTRLGNGWWMTPESIQEMYAAIKADPDGDGVLSLQEFSNMDLRDFHKYMRSHKAESSELVRNSHHTWLYQGEGAHHIMRAIRQR

SEQ ID NO: 4305 - DNA, 5397 bp, Homo sapiens
cacccccgctcctggagcaagaagatgcagacgatacttttcccggaggcaagagggcgtcttcacgcaggcaccgagaagctcccactagtgtatgccttaatggtgccgctcttgtccgcgtctacgcttgggaccttggcttctgacttggagagtgtacagctctgcccgacggcaacccagcttgggaagagaagccccagcgtgggctggggctcaaggcgcaggaaggccgagcccggcgcggacgcaggcggctccgggcgggctcagcacccccaggcaccgtctcctagtgaccgcggcgctcgcgggcctggcggccgttgtccgggcgactgcgcagcgcgggcacccccgcggcccctcccctgggcgcgcgcgcgacctgggtgccatggcggcagcggcggtgacaggccagcggcctgagaccgcggcggccgaggaggcctcgaggccgcagtgggcgccgccagaccactgccaggctcaggcggcggccgggctgggcgacggcgaggacgcaccggtgcgtccgctgtgcaagccccgcggcatctgctcgcgcgcctacttcctggtgctgatggtgttcgtgcacctgtacctgggtaacgtgctggcgctgctgctcttcgtgcactacagcaacggcgacgaaagcagcgatcccgggccccaacaccgtgcccagggccccgggcccgagcccaccttaggtcccctcacccggctggagggcatcaaggtgaggacctccctgccccgccgcgctccaggccctgcacggctgagcccgagaggaccggcgctcagcccgggtccccacgctgcccccggcgctgctctgcgtcggtcccgcgcgctcccactcactcgcctgctgtcgctctccgggccggggcgacttggcccttcttgggcagcgcggtctggcgccccagctgcccgctgtgcgccttttccttaggtggggcacgagcgtaaggtccagctggtcaccgacagggatcacttcatccgaaccctcagcctcaagccgctgctcttcgaaatccccggcttcctgactgatgaagagtgtcggctcatcatccatctggcgcagatgaaggggttacagcgcagccagatcctgcctactgaagagtatgaagaggcaatgagcactatgcaggtcagccagctggacctcttccggctgctggaccagaaccgtgatgggcaccttcagctccgtgaggttctggcccagactcgcctgggaaatggatggtggatgactccagagagcattcaggagatgtacgccgcgatcaaggctgaccctgatggtgacggtgagctcacacctctgcacagtcctatccccgtgagcctcctgcccactcccaggtgcacaattttgaaaacttgggcccttcccccacagccaggcagcctctctgcacccctttatagtggccagagatggggaggtgaagatccagccttgctttttacccctgggaagtaggcaggcagccaggccccccgttccccttggtgatggtctcgagggcagttcttggagacccttttgataacatcaggcagagttgagagcctggggacaggaagtagggctgctagttggcagagaacagagtgggtggagcaggagcaaggcgacagtgaggccagctagagcttggctgtttaccctgctccatccatctctccagccagacacgaggtccaccccagcagacagcttccctggtctaagtgagatctcccttgccttcctcttgtccacctggagtcatgccgaagcgcctaaaatggtagtgctgctacctgtgctaactgctggggaggggtgggcagggaagctgtcatgcaagtggtgccccctctggtaataactctcaggaggtttctgaggtgtggtcatcaccctcatgcccaaattctggaccaagagaggaagatacagcagttagaaaggacttggaacagtggctttgcggctggtgaaccagagtgaagaatctggccgtgacctgtggctggatggctgccacactgctataggccccagaacagaggtggtgacagtctcacagcccttgaatgtcccccaccctcagaggaatctgggccaaagagtggaaggtgatgtccttgggtcagccagaataacatggagcaaagataccaactactcttccagaaccccaagagggtagaacccctgcttaatggtttgagcagggacagtggagaatgttctcatgagagggggtggcctgactttcgttgctaaggtgggctggtaacgcagtaggcagggctggcgaagtaggttccacccaggatgaaacctggggtcatgaggaactccccgggggctggccctgcttgcaccctggcgtatgtatgtaaggccctggatgaggcccagcactgcctgctctctcctcaccctccacaggccggagagtggccaccactctatatagccaggctggaaggccagggtcctggccatatggctcaagcttcctttggagaaccttctctggccactctaatagggggtgggcctctttcttcttagggccaaattagggcttaaactgagaaaaggaactgctctgggtcttcctgtaaggcctgatgtgacagaaaccaggttcatctgacccaaaagtccaggtgggggacaagtgtacaaggcccctcagtgcctgaggtcaggggctgctgctgcctttggggtaggtagggaagtgcagcctgccactgttgcctcccaatatgggcttggtgggcattgatggtgggtgccctgtgcaggagtgctgagtctgcaggagttctccaacatggaccttcgggacttccacaagtacatgaggagccacaaggcagagtccagtgagctggtgcggaacagccaccatacctggctctaccagggtgagggtgcccaccacatcatgcgtgccatccgccagaggtgagcacctgaagctgttctcactggagcagggggagaagactgggcagggcctccacagaagtccttgtctggggccaagaggacagaatggattaacccatttgggattaagttccatttgttagaccaggattgggacccactgaaagacaggcaattaacaaaggcaaattagccctccttgcaggcacacaatgggcaactggggttagatagagattgagcacttctttctgattagataaatgacctcttatctttgaccccttatctgaccccgtcacagcaggaaaagggtttttaaataaacaactttcttccagggaggaggacctcaggactccccgccccctttatttagtggaaatgtcaacatttccacatagcaggtgtctctgtctttggcatctgagggagaaggatcatcatgagtaaccccctcctgctcttacagggccagtctgagatggcttaagggacttccaggggaggtgggtaggggcaaagcttgtggcaggcctagggtccaccttggccagctccttcagatcaccaccttgcctggggctgcccagccaaatgcctgctgcccaccagggtgctgcgcctcactcgcctgtcgcctgagatcgtggagctcagcgagccgctgcaggttgttcgatatggtgaggggggccactaccatgcccacgtggacagtgggcctgtgtacccagagaccatctgctcccataccaagctggtagccaacgagtctgtacccttcgagacctcctgccggcaagtatctcccaactgggggctgccttcaatcctcagaccaggaacacccatgacacaggcacagccctgcactgtgggcgtgccccttggcatggggccaggagatcactgggttatcccggttagtgatgccctcacctctccccacaagttgtttacccaatggctggaaaggggtggctactggtcatcgtgaccactggagtcaacacagactgatgtacccacagacaccaaaacttgccccctgagttctgaagcaaggggcaaggctgggcccctagcttgtcctgcccattcctccaggtgttgatcttgattccacttagagaagctgaagctgtgcctccctcccctgtcaagccagttctttcctcttcaggtggctgttctggcccagccccttcccatccccaaggagcccttcagcgcgccctgttgcttctgctagcctacctttccctgccaggcccttgctcagggccatggcatttaactaagtgcacctgtgatcttggccaaaaaaccattgcaactcacagtaagagactgggtttcggggaaggaggggctagggacattttggcactggcctgccctattgtctcccatcctagtctgtcctggtccctggcaacaggaacctgggcagcttatcctgcccacaggtaagcccctgggagcatccacaactggggacctgctcagtgccccccctgccttacagctacatgacagtgctgttttatttgaacaacgtcactggtgggggcgagactgttttccctgtagcagataacagaacctacgatgaaatggtaagggtcaactgggctattactcttgtgggctggcaggggcttagacaagtgaagtacacacctctccaggtctaaggatgtgggcccaaattattccttgggcatatctggttggtttccctttggtcacccttggctggcctggccatagagtggggacaggttgaacaccccaccaccctgctgcccacagagtctgattcaggatgacgtggacctccgtgacacacggaggcactgtgacaagggaaacctgcgtgtcaagccccaacagggcacagcagtcttctggtacaactacctgcctgatgggcaaggttgggtgggtgacgtagacgactactcgctgcacgggggctgcctggtcacgcgcggcaccaagtggattgccaacaactggattaatgtggaccccagccgagcgcggcaagcgctgttccaacaggagatggcccgccttgcccgagaagggggcaccgactcacagcccgagtgggctctggaccgggcctaccgcgatgcgcgcgtggaactctgagggaagagttagccccggttcccagccgcgggtcgccagttgcccaagatcaggggtccggctgtccttctgtcctgctgcagactaaaggtctggccaatgtcttgccccaccccgccagccgcgatacggcgcagttcctatattcatgttatttattgtgtactgactccatctgccccgtcaaataaaaaaccacaaggttcgagccgccgggcccgacaaactccgggtcggcg

SEQ ID NO: 4306 - protein, 135 aa, Homo sapiens
MKGLQRSQILPTEEYEEAMSTMQVSQLDLFRLLDQNRDGHLQLREVLAQTRLGNGWWMTPESIQEMYAAIKADPDGDGELTPLHSPIPVSLLPTPRCTILKTWALPPQPGSLSAPLYSGQRWGGEDPALLFTPGK

SEQ ID NO: 4307 - DNA, 2878 bp, Homo sapiens
cacccccgctcctggagcaagaagatgcagacgatacttttcccggaggcaagagggcgtcttcacgcaggcaccgagaagctcccactagtgtatgccttaatggtgccgctcttgtccgcgtctacgcttgggaccttggcttctgacttggagagtgtacagctctgcccgacggcaacccagcttgggaagagaagccccagcgtgggctggggctcaaggcgcaggaaggccgagcccggcgcggacgcaggcggctccgggcgggctcagcacccccaggcaccgtctcctagtgaccgcggcgctcgcgggcctggcggccgttgtccgggcgactgcgcagcgcgggcacccccgcggcccctcccctgggcgcgcgcgcgacctgggtgccatggcggcagcggcggtgacaggccagcggcctgagaccgcggcggccgaggaggcctcgaggccgcagtgggcgccgccagaccactgccaggctcaggcggcggccgggctgggcgacggcgaggacgcaccggtgcgtccgctgtgcaagccccgcggcatctgctcgcgcgcctacttcctggtgctgatggtgttcgtgcacctgtacctgggtaacgtgctggcgctgctgctcttcgtgcactacagcaacggcgacgaaagcagcgatcccgggccccaacaccgtgcccagggccccgggcccgagcccaccttaggtcccctcacccggctggagggcatcaaggtggggcacgagcgtaaggtccagctggtcaccgacagggatcacttcatccgaaccctcagcctcaagccgctgctcttcgaaatccccggcttcctgactgatgaagagtgtcggctcatcatccatctggcgcagatgaaggggttacagcgcagccagatcctgcctactgaagagtatgaagaggcaatgagcactatgcaggtcagccagctggacctcttccggctgctggaccagaaccgtgatgggcaccttcagctccgtgaggttctggcccagactcgcctgggaaatggatggtggatgactccagagagcattcaggagatgtacgccgcgatcaaggctgaccctgatggtgacggagtgctgagtctgcaggagttctccaacatggaccttcgggacttccacaagtacatgaggagccacaaggcagagtccagtgagctggtgcggaacagccaccatacctggctctaccagggtgagggtgcccaccacatcatgcgtgccatccgccagagggtgctgcgcctcactcgcctgtcgcctgagatcgtggagctcagcgagccgctgcaggttgttcgatatggtgaggggggccactaccatgcccacgtggacagtgggcctgtgtacccagagaccatctgctcccataccaagctggtagccaacgagtctgtacccttcgagacctcctgccggcaagtatctcccaactgggggctgccttcaatcctcagaccaggaacacccatgacacaggcacagccctgcactgtgggcgtgccccttggcatggggccaggagatcactgggttatcccggttagtgatgccctcacctctccccacaagttgtttacccaatggctggaaaggggtggctactggtcatcgtgaccactggagtcaacacagactgatgtacccacagacaccaaaacttgccccctgagttctgaagcaaggggcaaggctgggcccctagcttgtcctgcccattcctccaggtgttgatcttgattccacttagagaagctgaagctgtgcctccctcccctgtcaagccagttctttcctcttcaggtggctgttctggcccagccccttcccatccccaaggagcccttcagcgcgccctgttgcttctgctagcctacctttccctgccaggcccttgctcagggccatggcatttaactaagtgcacctgtgatcttggccaaaaaaccattgcaactcacagtaagagactgggtttcggggaaggaggggctagggacattttggcactggcctgccctattgtctcccatcctagtctgtcctggtccctggcaacaggaacctgggcagcttatcctgcccacaggtaagcccctgggagcatccacaactggggacctgctcagtgccccccctgccttacagctacatgacagtgctgttttatttgaacaacgtcactggtgggggcgagactgttttccctgtagcagataacagaacctacgatgaaatgagtctgattcaggatgacgtggacctccgtgacacacggaggcactgtgacaagggaaacctgcgtgtcaagccccaacagggcacagcagtcttctggtacaactacctgcctgatgggcaaggttgggtgggtgacgtagacgactactcgctgcacgggggctgcctggtcacgcgcggcaccaagtggattgccaacaactggattaatgtggaccccagccgagcgcggcaagcgctgttccaacaggagatggcccgccttgcccgagaagggggcaccgactcacagcccgagtgggctctggaccgggcctaccgcgatgcgcgcgtggaactctgagggaagagttagccccggttcccagccgcgggtcgccagttgcccaagatcaggggtccggctgtccttctgtcctgctgcagactaaaggtctggccaatgtcttgccccaccccgccagccgcgatacggcgcagttcctatattcatgttatttattgtgtactgactccatctgccccgtcaaataaaaaaccacaaggttcgagccgccgggcccgacaaactccgggtcggcg

SEQ ID NO: 4308 - protein, 423 aa, Homo sapiens; identical to SEQ ID NO: 407

SEQ ID NO: 4309 - DNA, 2331 bp, Homo sapiens
cacccccgctcctggagcaagaagatgcagacgatacttttcccggaggcaagagggcgtcttcacgcaggcaccgagaagctcccactagtgtatgccttaatggtgccgctcttgtccgcgtctacgcttgggaccttggcttctgacttggagagtgtacagctctgcccgacggcaacccagcttgggaagagaagccccagcgtgggctggggctcaaggcgcaggaaggccgagcccggcgcggacgcaggcggctccgggcgggctcagcacccccaggcaccgtctcctagtgaccgcggcgctcgcgggcctggcggccgttgtccgggcgactgcgcagcgcgggcacccccgcggcccctcccctgggcgcgcgcgcgacctgggtgccatggcggcagcggcggtgacaggccagcggcctgagaccgcggcggccgaggaggcctcgaggccgcagtgggcgccgccagaccactgccaggctcaggcggcggccgggctgggcgacggcgaggacgcaccggtgcgtccgctgtgcaagccccgcggcatctgctcgcgcgcctacttcctggtgctgatggtgttcgtgcacctgtacctgggtaacgtgctggcgctgctgctcttcgtgcactacagcaacggcgacgaaagcagcgatcccgggccccaacaccgtgcccagggccccgggcccgagcccaccttaggtcccctcacccggctggagggcatcaaggtggggcacgagcgtaaggtccagctggtcaccgacagggatcacttcatccgaaccctcagcctcaagccgctgctcttcgaaatccccggcttcctgactgatgaagagtgtcggctcatcatccatctggcgcagatgaaggggttacagcgcagccagatcctgcctactgaagagtatgaagaggcaatgagcactatgcaggtcagccagctggacctcttccggctgctggaccagaaccgtgatgggcaccttcagctccgtgaggttctggcccagactcgcctgggaaatggatggtggatgactccagagagcattcaggagatgtacgccgcgatcaaggctgaccctgatggtgacggagtgctgagtctgcaggagttctccaacatggaccttcgggacttccacaagtacatgaggagccacaaggcagagtccagtgagctggtgcggaacagccaccatacctggctctaccagggtgagggtgcccaccacatcatgcgtgccatccgccagagggtgctgcgcctcactcgcctgtcgcctgagatcgtggagctcagcgagccgctgcaggttgttcgatatggtgaggggggccactaccatgcccacgtggacagtgggcctgtgtacccagagaccatctgctcccataccaagctggtagccaacgagtctgtacccttcgagacctcctgccggcaagtatctcccaactgggggctgccttcaatcctcagaccaggaacacccatgacacaggcacagccctgcactgtgggcgtgccccttggcatggggccaggagatcactgggttatcccggtaagcccctgggagcatccacaactggggacctgctcagtgccccccctgccttacagctacatgacagtgctgttttatttgaacaacgtcactggtgggggcgagactgttttccctgtagcagataacagaacctacgatgaaatgagtctgattcaggatgacgtggacctccgtgacacacggaggcactgtgacaagggaaacctgcgtgtcaagccccaacagggcacagcagtcttctggtacaactacctgcctgatgggcaaggttgggtgggtgacgtagacgactactcgctgcacgggggctgcctggtcacgcgcggcaccaagtggattgccaacaactggattaatgtggaccccagccgagcgcggcaagcgctgttccaacaggagatggcccgccttgcccgagaagggggcaccgactcacagcccgagtgggctctggaccgggcctaccgcgatgcgcgcgtggaactctgagggaagagttagccccggttcccagccgcgggtcgccagttgcccaagatcaggggtccggctgtccttctgtcctgctgcagactaaaggtctggccaatgtcttgccccaccccgccagccgcgatacggcgcagttcctatattcatgttatttattgtgtactgactccatctgccccgtcaaataaaaaaccacaaggttcgagccgccgggcccgacaaactccgggtcggcg

SEQ ID NO: 4310 - protein, 563 aa, Homo sapiens; identical to SEQ ID NO: 409

SEQ ID NO: 4311 - DNA, 2156 bp, Homo sapiens
cacccccgctcctggagcaagaagatgcagacgatacttttcccggaggcaagagggcgtcttcacgcaggcaccgagaagctcccactagtgtatgccttaatggtgccgctcttgtccgcgtctacgcttgggaccttggcttctgacttggagagtgtacagctctgcccgacggcaacccagcttgggaagagaagccccagcgtgggctggggctcaaggcgcaggaaggccgagcccggcgcggacgcaggcggctccgggcgggctcagcacccccaggcaccgtctcctagtgaccgcggcgctcgcgggcctggcggccgttgtccgggcgactgcgcagcgcgggcacccccgcggcccctcccctgggcgcgcgcgcgacctgggtgccatggcggcagcggcggtgacaggccagcggcctgagaccgcggcggccgaggaggcctcgaggccgcagtgggcgccgccagaccactgccaggctcaggcggcggccgggctgggcgacggcgaggacgcaccggtgcgtccgctgtgcaagccccgcggcatctgctcgcgcgcctacttcctggtgctgatggtgttcgtgcacctgtacctgggtaacgtgctggcgctgctgctcttcgtgcactacagcaacggcgacgaaagcagcgatcccgggccccaacaccgtgcccagggccccgggcccgagcccaccttaggtcccctcacccggctggagggcatcaaggtggggcacgagcgtaaggtccagctggtcaccgacagggatcacttcatccgaaccctcagcctcaagccgctgctcttcgaaatccccggcttcctgactgatgaagagtgtcggctcatcatccatctggcgcagatgaaggggttacagcgcagccagatcctgcctactgaagagtatgaagaggcaatgagcactatgcaggtcagccagctggacctcttccggctgctggaccagaaccgtgatgggcaccttcagctccgtgaggttctggcccagactcgcctgggaaatggatggtggatgactccagagagcattcaggagatgtacgccgcgatcaaggctgaccctgatggtgacggagtgctgagtctgcaggagttctccaacatggaccttcgggacttccacaagtacatgaggagccacaaggcagagtccagtgagctggtgcggaacagccaccatacctggctctaccagggtgagggtgcccaccacatcatgcgtgccatccgccagagggtgctgcgcctcactcgcctgtcgcctgagatcgtggagctcagcgagccgctgcaggttgttcgatatggtgaggggggccactaccatgcccacgtggacagtgggcctgtgtacccagagaccatctgctcccataccaagctggtagccaacgagtctgtacccttcgagacctcctgccgctacatgacagtgctgttttatttgaacaacgtcactggtgggggcgagactgttttccctgtagcagataacagaacctacgatgaaatgagtctgattcaggatgacgtggacctccgtgacacacggaggcactgtgacaagggaaacctgcgtgtcaagccccaacagggcacagcagtcttctggtacaactacctgcctgatgggcaaggttgggtgggtgacgtagacgactactcgctgcacgggggctgcctggtcacgcgcggcaccaagtggattgccaacaactggattaatgtggaccccagccgagcgcggcaagcgctgttccaacaggagatggcccgccttgcccgagaagggggcaccgactcacagcccgagtgggctctggaccgggcctaccgcgatgcgcgcgtggaactctgagggaagagttagccccggttcccagccgcgggtcgccagttgcccaagatcaggggtccggctgtccttctgtcctgctgcagactaaaggtctggccaatgtcttgccccaccccgccagccgcgatacggcgcagttcctatattcatgttatttattgtgtactgactccatctgccccgtcaaataaaaaaccacaaggttcgagccgccgggcccgacaaactccgggtcggcgaaacagag

SEQ ID NO: 4312 - protein, 502 aa, Homo sapiens [sequence omitted]

SEQ ID NO: 4313 - DNA, 1330 bp, Homo sapiens
ggcagcggcggtgacaggccagcggcctgagaccgcggcggccgaggaggcctcgaggccgcagtgggcgccgccagaccactgccaggctcaggcggcggccgggctgggcgacggcgaggacgcaccggtgcgtccgctgtgcaagccccgcggcatctgctcgcgcgcctacttcctggtgctgatggtgttcgtgcacctgtacctgggtaacgtgctggcgctgctgctcttcgtgcactacagcaacggcgacgaaagcagcgatcccgggccccaacaccgtgcccagggccccgggcccgagcccaccttaggtcccctcacccggctggagggcatcaaggtgaggacctccctgccccgccgcgctccaggccctgcacggctgagcccgagaggaccggcgctcagcccgggtccccacgctgcccccggcgctgctctgcgtcggtcccgcgcgctcccactcactcgcctgctgtcgctctccgggccggggcgacttggcccttcttgggcagcgcggtctggcgccccagctgcccgctgtgcgccttttccttaggtggggcacgagcgtaaggtccagctggtcaccgacagggatcacttcatccgaaccctcagcctcaagccgctgctcttcggtaagtccgccagatactcctgggaagggccaggggctgcggtttggtggccaccttgaggctcgttgtgaccacgtgacctctattttgaaaatggctgcttcagagcagcccttccagaggattaccaaagtgaaggaccttccccgtcctcgaaatagggtaacactccctcttatcccaactccctgcagtccattcttccatcacagggctggcagggtgagcctgaggctggtgtctaaacgtttcattgcacctgtcttccgtgccacctggcctccgtgacaaacatatttgcaaacccagggccattcctgcctgccgggggatggaatgggttaggagctggggccaaagtagaacatctgagcacaagtcattacctccaaggcagagggtcctggttggggattatgcctagacctgtcagaatgatgtcatatgcatgctgtttgtagggaaatagattatgctgtcagtcctgttgtgggagaggcacccaaagctggttgttgttattattactattactattgagtaacgttgaagtctgtgccaggcactattttaggtgccaggaacacagcattgaactaaatataaacaatgaaacaaaaccctgaagctgacattcaaatgaagaggaaacagacaataaacaaacaaataaatat

SEQ ID NO: 4314 - protein, 64 aa, Homo sapiens
MAASEQPFQRITKVKDLPRPRNRVTLPLIPTPCSPFFHHRAGRVSLRLVSKRFIAPVFRATWPP

SEQ ID NO: 4315 - DNA, 2079 bp, Homo sapiens
gatgggcagcgcggcgcgctgggaaggctcgttctcgcgagagttcagctcccttcttagccgtggctgcctcagcacctcgaggatcgacatggacgctctcgaggactacgtttggccgcgggcaacctcggagcttatactcctcccagtgacgggtctggagtgcgtgggggaccggctgttggcgggtgagggtcccgatgtcctggtgtacagcttggactttggtgggcatctgcggatgataaagcgagtgcagaacctgcttggccactatcttatccatggcttccgggtacggccagagcctaatggagaccttgacttggaggccatggtggctgtgtttggaagcaagggactccgagttgtgaaaattagctggggacagggccacttctgggagctttggcgctctggcctgtggaacatatctcctcggtacgtgctgtggctgtgtggggcattggcaccccaggtggccctcaggatcctcagccaggcctgactgagcaccccaagccgcctcgcctgccatgtcatgcacctttcgtcccaccggctagatgagtattgggaccggcaacgcaatcggcatcggatggttaaggtagacccagagaccaggtacatgtcccttgctgtgtgtgaacttgaccagcccggccttggcccccttgtggctgcagcctgtagtgatggggccgtaaggctctttcttttgcaggattctgggcggattctgcagctccttgctgaaaccttccaccataagcgatgtgtcctcaaggtccactcctttacacacgaggcacccaaccagaggcggaggctcctcctgtgcagcgcagctactgatggcagcctggctttctgggatctcaccaccatgctagaccatgactccactgtcctggagcctccagtggatcctgggcttccctaccggcttggcaccccctccctgactctccaggcccacagctgtggtatcaacagcctgcacaccttgcccacccgtgagggccaccatctcgtggccagtggcagtgaagatggatccctccatgtcttcgtgcttgctgtggagatgctacagctagaagaggctgtgggagaggctgggctggtaccccagctgcgtgtgctagaggaatactctgtcccctgtgcacatgctgcccatgtgacaggcctcaagatcctaagcccaagcatcatggtctcagcctccattgatcaacggctgaccttctggcgtctggggcatggtgaacccaccttcatgaatagcactgtgttccatgtgcctgatgtggctgacatggactgctggcctgtgagccctgagtttggccaccgttgtgcccttgggggtcaggggcttgaggtttacaactggtatgactgaggtatcctgcggtggctggcgtgctgggcatggggcctgctcacagacagcatggagcagggatgggctgtctgtgcccatgctcagcatgccttgaggggaggaggtggtggccgtgggttcctgatgtcggtgcaggagctgaaggtgagtggagtgctgccaagaatatgcccgactccccatgacaagacagaactttgtaacaaacagtaccaatttattttggccgtgggtttttgctttttttccagttgatgactttgtgaacattcccaggtattggagcctctgtggccttaaatgtggctcagtggagggagacccagcatagccaggccagtatggagcacctcacgcacagctctcagaagctgcaggcggacgaacatctgaccaaagaggtgtggtcgaggctcctgaaagagaaagggcctgctggtctcatcctctgcttcctttgcctttaccctatacctctctgcacgtcccaccccattttgctgtgtgctcacccccaggatgtgtacccggttgtagtaggagctgaaatccatgctgagctgtaccaggaacttgcatatctagagacagagactgagtcactggcccatctctttgctcttgtgccccaggccagaataaagaatagagtgtagagtgtc

SEQ ID NO: 4316 - protein, 289 aa, Homo sapiens
MHLSSHRLDEYWDRQRNRHRMVKVDPETRYMSLAVCELDQPGLGPLVAAACSDGAVRLFLLQDSGRILQLLAETFHHKRCVLKVHSFTHEAPNQRRRLLLCSAATDGSLAFWDLTTMLDHDSTVLEPPVDPGLPYRLGTPSLTLQAHSCGINSLHTLPTREGHHLVASGSEDGSLHVFVLAVEMLQLEEAVGEAGLVPQLRVLEEYSVPCAHAAHVTGLKILSPSIMVSASIDQRLTFWRLGHGEPTFMNSTVFHVPDVADMDCWPVSPEFGHRCALGGQGLEVYNWYD

SEQ ID NO: 4317 - DNA, 2812 bp, Homo sapiens
gcgcggcgcgctgggaaggctcgttctcgcgagagttcagctcccttcttagccgtggctgcctcagcacctcgaggatcgacatggacgctctcgaggactacgtttggccgcgggcaacctcggagcttatactcctcccagtgacgggtctggagtgcgtgggggaccggctgttggcgggtgagggtcccgatgtcctggtgtacagcttggactttggtgggcatctgcggatgataaagcgagtgcagaacctgcttggccactatcttatccatggcttccgggtacggccagagcctaatggagaccttgacttggaggccatggtggctgtgtttggaagcaagggactccgagttgtgaaaattagctggggacagggccacttctgggagctttggcgctctggcctgtggaacatgtctgactggatttgggatgcacgctggcttgagggaaatatagccttggccctgggccacaactcagtggtgctatatgaccctgtagtagggtgcatcctgcaagaggtgccctgcacagacaggtgcaccctctcttcagcctgcctgattggagacgcctggaaggagctgaccatagtggcaggtgctgtttccaaccagctcttggtctggtacccagcaactgccttagcagacaacaaacctgtagcacctgaccgacgaatcagtgggcatgtgggcatcatcttcagcatgtcatacctggaaagcaagggattgctggctacagcttcagaagaccgaagcgttcgtatctggaaggtgggcgacctgcgagtgcctgggggtcgggtgcagaatattgggcactgctttgggcacagcgcccgtgtgtggcaggtcaagcttctagagaattaccttatcaatcctccaggcctttcggggacaccagggacgtgggatccgggccatagctgcccatgagaggcaggcctgggtgatcactgggggtgatgactcaggcattcggctgtggcacttggtagggcgtgggtaccggggattgggggtctcggctctctgcttcaagtcccgtagtaggccaggtacactcaaggctgtgactctggctggctcttggcgactgctggcagtgactgatacaggggccctgtatctctatgacgtcgaggtcaagtgctgggagcagctgctagaggataaacatttccagtcctactgcctgctggaggcagctcctggtcccgagggcttcggattgtgtgctatggccaatggggaaggtcgtgtcaaggttgtccccatcaacactccaactgctgctgtggaccagaccctgtttcctgggaaggtgcacagcttgagctgggccctgcgtggttatgaggagctcctgttgctggcatcgggccctggcggggtagtagcttgcctagagatctcagccgcaccctctggcaaggccatctttgtcaaggaacgttgtcggtacctgctgcccccaagcaagcagagatggcacacatgcagtgccttcctacccccaggtgacttcctggtgtgtggtgaccgccggggctctgtgctgctattcccctccagaccaggtctgctcaaggaccctggggtgggaggcaaggctcgggctggtgctggggcacctgtagtgggtagtggtagtagtgggggtgggaatgctttcactgggttgggcccagtgtctaccctgccctctctgcacgggaagcagggtgtgacctcagtcacatgccatggtggctatgtgtataccacagggcgtgatggagcctactaccagctgtttgtacgagacggccagctccagccagtcctaaggcagaagtcctgtcgaggcatgaactggctagctgggctccgtatagtgcccgatgggagcatggttatcctgggtttccatgccaatgagtttgtggtgtggaaccctcggtcacacgagaagctgcacatcgtcaactgtggtggagggcaccgttcgtgggcattctctgatactgaggcggccatggcctttgcttacctcaaggatggggatgtcatgctgtacagggctctgggtggctgcacccggccacacgtgattctccgggagggtctgcatggccgtgagatcacttgtgtaaagcgtgtgggcaccattaccctggggcctgaatatggagtgcccagcttcatgcagcctgatgacctggagcctggcagtgaggggcccgacttgactgacattgtgatcacatgtagtgaggacactactgtctgtgtcctagcactccctacaaccacaggctcagcccacgcactcacagctgtttgtaaccatatctcctcggtacgtgctgtggctgtgtggggcattggcaccccaggtggccctcaggatcctcagccaggcctgactgcccatgtggtgtctgcgggggggcgggctgagatgcactgcttcagcatcatggttactccggaccccagcaccccaagccgcctcgcctgccatgtcatgcacctttcgtcccaccggctagatgagtattgggaccggcaacgcaatcggcatcggatggttaaggtagacccagagaccaggtaatatatgctcctgggcagggtgtggtatgggtcatgcagatgctcccaggcttgcaggctccacctgacagctgcatgttgtctctgcaggtacatgtcccttgctgtgtgtgaacttgaccagcccggccttggcccccttgtggctgcagcctgtagtgatggggccgtaaggtgagagcatagggccc

SEQ ID NO: 4318 - protein, 291 aa, Homo sapiens
MDALEDYVWPRATSELILLPVTGLECVGDRLLAGEGPDVLVYSLDFGGHLRMIKRVQNLLGHYLIHGFRVRPEPNGDLDLEAMVAVFGSKGLRVVKISWGQGHFWELWRSGLWNMSDWIWDARWLEGNIALALGHNSVVLYDPVVGCILQEVPCTDRCTLSSACLIGDAWKELTIVAGAVSNQLLVWYPATALADNKPVAPDRRISGHVGIIFSMSYLESKGLLATASEDRSVRIWKVGDLRVPGGRVQNIGHCFGHSARVWQVKLLENYLINPPGLSGTPGTWDPGHSCP

SEQ ID NO: 4319 - DNA, 835 bp, Homo sapiens
tctcgcgagagttcagctcccttcttagccgtggctgcctcagcacctcgaggatcgacatggacgctctcgaggactacgtttggccgcgggcaacctcggagcttatactcctcccagtgacgggtctggagtgcgtgggggaccggctgttggcgggtgagggtcccgatgtcctggtgtacagcttggactttggtgggcatctgcggatgataaagcgagtgcagaacctgcttggccactatcttatccatggcttccgggtacggccagagcctaatggagaccttgacttggaggccatggtggctgtgtttggaagcaagggactccgagttgtgaaaattagctggggacagggccacttctgggagctttggcgctctggcctgtggaacatgtctgactggatttgggatgcacgctggcttgagggaaatatagccttggccctgggccacaactcagtggtgctatatgaccctgtagtagggtgcatcctgcaagaggtgccctgcacagacaggtgcaccctctcttcagcctgcctgattggagacgcctggaaggagctgaccatagtggcaggtgctgtttccaaccagctcttggtctggtacccagcaactgcctttaccctatacctctctgcacgtcccaccccattttgctgtgtgctcacccccaggatgtgtacccggttgtagtaggagctgaaatccatgctgagctgtaccaggaacttgcatatctagagacagagactgagtcactggcccatctctttgctcttgtgccccaggccagaataaagaatagagtgtagagtgtc

SEQ ID NO: 4320 - protein, 216 aa, Homo sapiens
MDALEDYVWPRATSELILLPVTGLECVGDRLLAGEGPDVLVYSLDFGGHLRMIKRVQNLLGHYLIHGFRVRPEPNGDLDLEAMVAVFGSKGLRVVKISWGQGHFWELWRSGLWNMSDWIWDARWLEGNIALALGHNSVVLYDPVVGCILQEVPCTDRCTLSSACLIGDAWKELTIVAGAVSNQLLVWYPATAFTLYLSARPTPFCCVLTPRMCTRL

SEQ ID NO: 4321 - DNA, 1948 bp, Homo sapiens
tctcgcgagagttcagctcccttcttagccgtggctgcctcagcacctcgaggatcgacatggacgctctcgaggactacgtttggccgcgggcaacctcggagcttatactcctcccagtgacgggtctggagtgcgtgggggaccggctgttggcgggtgagggtcccgatgtcctggtgtacagcttggactttggtgggcatctgcggatgataaagcgagtgcagaacctgcttggccactatcttatccatggcttccgggtacggccagagcctaatggagaccttgacttggaggccatggtggctgtgtttggaagcaagggactccgagttgtgaaaattagctggggacagggccacttctgggagctttggcgctctggcctgtggaacatgtctgactggatttgggatgcacgctggcttgagggaaatatagccttggccctgggccacaactcagtggtgctatatgaccctgtagtagggtgcatcctgcaagaggtgccctgcacagacaggtgcaccctctcttcagcctgcctgattggagacgcctggaaggagctgaccatagtggcaggtgctgtttccaaccagctcttggtctggtacccagcaactgcctttaccctatacctctctgcacgtcccaccccattttgctgtgtgctcacccccaggatgtgtacccggttgtagtaggagctgaaatccatgctgagctgtaccaggaacttgcatatctagagacagagactgagtcactggcccatctctttgctcttgtgccccaggccagaataaagaatagagtgtagagtgtcctggttgtctatgcctcaccatctctgtgcgtacagcaatgtggagccccggggctgtgcagtccagcactgctgtccggctcagcagatccggaaaggggaggatactgttgaagagcaacaaccactcaccctgttggggagaaaggtgctgggaggggaagtccaggcctccttgtgccagctaccaggagggacactcacctcatcatgtagcagtgagaagtccagactgctcacaggaggaaaagtggggtacagaccttgttccatactacacttgtaactctcaaagagtgtggcaagacgggcacaattatacatgacaaaggtgccactctttgtgcccttcgtggagatactgctgtcagccagagccaggaagagctggggaatagaagcacagctgcagagagagaaggcagccaccacaccctgtgccccaacactggccctgtcaggctcccaggctcacctgactctgtggggctgtgctcagcatctcaaacttgatggtggccacagagagaacaccaaagatctctgtccaggctgggtctgagggagtatagggttggtcagtcagtctgcaggcaagggcagggatgcaaaaaacctgcccctaacccagaacatagccagggtttcccaggcacaccttgtgccagatccccaccatgcttcagtgctgaggccttgcacacctgggtatgccggaacctgtgtttggaagagaggaaggccagtgggcagggtcctgggtaaagagtcccccctcattaccctggcttaggttggtgttcctcccagcctcactcactcgtagtactcaggggcagtcatcagagtgccaggtgcaccagctactttcacagggccacagatgaggtgcttctgtcagaaagatgtcaggggctcagcctagttggcgctactctccaggaagtcccttgaggagcccaaatctggtgcctctactcagcccagactccctcaaattggaactgccaggttgagtgcctccgtctacccagccactcaggctacgcatggttcatccttctcaacctggtcttcagtgttcttgggatgtgtctacagaccccccttccc

SEQ ID NO: 4322 - protein, 216 aa, Homo sapiens; identical to SEQ ID NO: 4320

SEQ ID NO: 4323 - DNA, 4070 bp, Homo sapiens
cttcttagccgtggctgcctcagcacctcgaggatcgacatggacgctctcgaggactacgtttggccgcgggcaacctcggagcttatactcctcccagtgacgggtctggagtgcgtgggggaccggctgttggcgggtgagggtcccgatgtcctggtgtacagcttggactttggtgggcatctgcggatgataaagcgagtgcagaacctgcttggccactatcttatccatggcttccgggtacggccagagcctaatggagaccttgacttggaggccatggtggctgtgtttggaagcaagggactccgagttgtgaaaattagctggggacagggccacttctgggagctttggcgctctggcctgtggaacatgtctgactggatttgggatgcacgctggcttgagggaaatatagccttggccctgggccacaactcagtggtgctatatgaccctgtagtagggtgcatcctgcaagaggtgccctgcacagacaggtgcaccctctcttcagcctgcctgattggagacgcctggaaggagctgaccatagtggcaggtgctgtttccaaccagctcttggtctggtacccagcaactgccttagcagacaacaaacctgtagcacctgaccgacgaatcagtgggcatgtgggcatcatcttcagcatgtcatacctggaaagcaagggattgctggctacagcttcagaagaccgaagcgttcgtatctggaaggtgggcgacctgcgagtgcctgggggtcgggtgcagaatattgggcactgctttgggcacagcgcccgtgtgtggcaggtcaagcttctagagaattaccttatcagtgcaggagaggattgtgtctgcttggtgtggagccatgaaggtgagatcctccaggcctttcggggacaccagggacgtgggatccgggccatagctgcccatgagaggcaggcctgggtgatcactgggggtgatgactcaggcattcggctgtggcacttggtagggcgtgggtaccggggattgggggtctcggctctctgcttcaagtcccgtagtaggccaggtacactcaaggctgtgactctggctggctcttggcgactgctggcagtgactgatacaggggccctgtatctctatgacgtcgaggtcaagtgctgggagcagctgctagaggataaacatttccagtcctactgcctgctggaggcagctcctggtcccgagggcttcggattgtgtgctatggccaatggggaaggtcgtgtcaaggttgtccccatcaacactccaactgctgctgtggaccagaccctgtttcctgggaaggtgcacagcttgagctgggccctgcgtggttatgaggagctcctgttgctggcatcgggccctggcggggtagtagcttgcctagagatctcagccgcaccctctggcaaggccatctttgtcaaggaacgttgtcggtacctgctgcccccaagcaagcagagatggcacacatgcagtgccttcctacccccaggtgacttcctggtgtgtggtgaccgccggggctctgtgctgctattcccctccagaccaggtctgctcaaggaccctggggtgggaggcaaggctcgggctggtgctggggcacctgtagtgggtagtggtagtagtgggggtgggaatgctttcactgggttgggcccagtgtctaccctgccctctctgcacgggaagcagggtgtgacctcagtcacatgccatggtggctatgtgtataccacagggcgtgatggagcctactaccagctgtttgtacgagacggccagctccagccagtcctaaggcagaagtcctgtcgaggcatgaactggctagctgggctccgtatagtgcccgatgggagcatggttatcctgggtttccatgccaatgagtttgtggtgtggaaccctcggtcacacgagaagctgcacatcgtcaactgtggtggagggcaccgttcgtgggcattctctgatactgaggcggccatggcctttgcttacctcaaggatggggatgtcatgctgtacagggctctgggtggctgcacccggccacacgtgattctccgggagggtctgcatggccgtgagatcacttgtgtaaagcgtgtgggcaccattaccctggggcctgaatatggagtgcccagcttcatgcagcctgatgacctggagcctggcagtgaggggcccgacttgactgacattgtgatcacatgtagtgaggacactactgtctgtgtcctagcactccctacaaccacaggctcagcccacgcactcacagctgtttgtaaccatatctcctcggtacgtgctgtggctgtgtggggcattggcaccccaggtggccctcaggatcctcagccaggcctgactgcccatgtggtgtctgcgggggggcgggctgagatgcactgcttcagcatcatggttactccggaccccagcaccccaagccgcctcgcctgccatgtcatgcacctttcgtcccaccggctagatgagtattgggaccggcaacgcaatcggcatcggatggttaaggtagacccagagaccaggtacatgtcccttgctgtgtgtgaacttgaccagcccggccttggcccccttgtggctgcagcctgtagtgatggggccgtaaggctctttcttttgcaggattctgggcggattctgcagctccttgctgaaaccttccaccataagcgatgtgtcctcaaggtccactcctttacacacgaggcacccaaccagaggcggaggctcctcctgtgcagcgcagctactgatggcagcctggctttctgggatctcaccaccatgctagaccatgactccactgtcctggagcctccagtggatcctgggcttccctaccggcttggcaccccctccctgactctccaggcccacagctgtggtatcaacagcctgcacaccttgcccacccgtgagggccaccatctcgtggccagtggcagtgaagatggatccctccatgtcttcgtgcttgctgtggagatgctacagctagaagaggctgtgggagaggctgggctggtaccccagctgcgtgtgctagaggaatactctgtcccctgtgcacatgctgcccatgtgacaggcctcaagatcctaagcccaagcatcatggtctcagcctccattgatcaacggctgaccttctggcgtctggggcatggtgaacccaccttcatgaatagcactgtgttccatgtgcctgatgtggctgacatggactgctggcctgtgagccctgagtttggccaccgttgtgcccttgggggtcaggggcttgaggtttacaactggtatgactgaggtatcctgcggtggctggcgtgctgggcatggggcctgctcacagacagcatggagcagggatgggctgtctgtgcccatgctcagcatgccttgaggggaggaggtggtggccgtgggttcctgatgtcggtgcaggagctgaaggtgagtggagtgctgccaagaatatgcccgactccccatgacaagacagaactttgtaacaaacagtaccaatttattttggccgtgggtttttgctttttttccagttgatgactttgtgaacattcccaggtattggagcctctgtggccttaaatgtggctcagtggagggagacccagcatagccaggccagtatggagcacctcacgcacagctctcagaagctgcaggcggacgaacatctgaccaaagaggtgtggtcgaggctcctgaaagagaaagggcctgctggtctcatcctctgcttcctttgcctttaccctatacctctctgcacgtcccaccccattttgctgtgtgctcacccccaggatgtgtacccggttgtagtaggagctgaaatccatgctgagctgtaccaggaacttgcatatctagagacagagactgagtcactggcccatctctttgctcttgtgccccaggccagaataaagaatagagtgtagagtgtc

SEQ ID NO: 4324 - protein, 1121 aa, Homo sapiens; identical to SEQ ID NO: 413

SEQ ID NO: 4325 - DNA, 5183 bp, Homo sapiens
cttcttagccgtggctgcctcagcacctcgaggatcgacatggacgctctcgaggactacgtttggccgcgggcaacctcggagcttatactcctcccagtgacgggtctggagtgcgtgggggaccggctgttggcgggtgagggtcccgatgtcctggtgtacagcttggactttggtgggcatctgcggatgataaagcgagtgcagaacctgcttggccactatcttatccatggcttccgggtacggccagagcctaatggagaccttgacttggaggccatggtggctgtgtttggaagcaagggactccgagttgtgaaaattagctggggacagggccacttctgggagctttggcgctctggcctgtggaacatgtctgactggatttgggatgcacgctggcttgagggaaatatagccttggccctgggccacaactcagtggtgctatatgaccctgtagtagggtgcatcctgcaagaggtgccctgcacagacaggtgcaccctctcttcagcctgcctgattggagacgcctggaaggagctgaccatagtggcaggtgctgtttccaaccagctcttggtctggtacccagcaactgccttagcagacaacaaacctgtagcacctgaccgacgaatcagtgggcatgtgggcatcatcttcagcatgtcatacctggaaagcaagggattgctggctacagcttcagaagaccgaagcgttcgtatctggaaggtgggcgacctgcgagtgcctgggggtcgggtgcagaatattgggcactgctttgggcacagcgcccgtgtgtggcaggtcaagcttctagagaattaccttatcagtgcaggagaggattgtgtctgcttggtgtggagccatgaaggtgagatcctccaggcctttcggggacaccagggacgtgggatccgggccatagctgcccatgagaggcaggcctgggtgatcactgggggtgatgactcaggcattcggctgtggcacttggtagggcgtgggtaccggggattgggggtctcggctctctgcttcaagtcccgtagtaggccaggtacactcaaggctgtgactctggctggctcttggcgactgctggcagtgactgatacaggggccctgtatctctatgacgtcgaggtcaagtgctgggagcagctgctagaggataaacatttccagtcctactgcctgctggaggcagctcctggtcccgagggcttcggattgtgtgctatggccaatggggaaggtcgtgtcaaggttgtccccatcaacactccaactgctgctgtggaccagaccctgtttcctgggaaggtgcacagcttgagctgggccctgcgtggttatgaggagctcctgttgctggcatcgggccctggcggggtagtagcttgcctagagatctcagccgcaccctctggcaaggccatctttgtcaaggaacgttgtcggtacctgctgcccccaagcaagcagagatggcacacatgcagtgccttcctacccccaggtgacttcctggtgtgtggtgaccgccggggctctgtgctgctattcccctccagaccaggtctgctcaaggaccctggggtgggaggcaaggctcgggctggtgctggggcacctgtagtgggtagtggtagtagtgggggtgggaatgctttcactgggttgggcccagtgtctaccctgccctctctgcacgggaagcagggtgtgacctcagtcacatgccatggtggctatgtgtataccacagggcgtgatggagcctactaccagctgtttgtacgagacggccagctccagccagtcctaaggcagaagtcctgtcgaggcatgaactggctagctgggctccgtatagtgcccgatgggagcatggttatcctgggtttccatgccaatgagtttgtggtgtggaaccctcggtcacacgagaagctgcacatcgtcaactgtggtggagggcaccgttcgtgggcattctctgatactgaggcggccatggcctttgcttacctcaaggatggggatgtcatgctgtacagggctctgggtggctgcacccggccacacgtgattctccgggagggtctgcatggccgtgagatcacttgtgtaaagcgtgtgggcaccattaccctggggcctgaatatggagtgcccagcttcatgcagcctgatgacctggagcctggcagtgaggggcccgacttgactgacattgtgatcacatgtagtgaggacactactgtctgtgtcctagcactccctacaaccacaggctcagcccacgcactcacagctgtttgtaaccatatctcctcggtacgtgctgtggctgtgtggggcattggcaccccaggtggccctcaggatcctcagccaggcctgactgcccatgtggtgtctgcgggggggcgggctgagatgcactgcttcagcatcatggttactccggaccccagcaccccaagccgcctcgcctgccatgtcatgcacctttcgtcccaccggctagatgagtattgggaccggcaacgcaatcggcatcggatggttaaggtagacccagagaccaggtacatgtcccttgctgtgtgtgaacttgaccagcccggccttggcccccttgtggctgcagcctgtagtgatggggccgtaaggctctttcttttgcaggattctgggcggattctgcagctccttgctgaaaccttccaccataagcgatgtgtcctcaaggtccactcctttacacacgaggcacccaaccagaggcggaggctcctcctgtgcagcgcagctactgatggcagcctggctttctgggatctcaccaccatgctagaccatgactccactgtcctggagcctccagtggatcctgggcttccctaccggcttggcaccccctccctgactctccaggcccacagctgtggtatcaacagcctgcacaccttgcccacccgtgagggccaccatctcgtggccagtggcagtgaagatggatccctccatgtcttcgtgcttgctgtggagatgctacagctagaagaggctgtgggagaggctgggctggtaccccagctgcgtgtgctagaggaatactctgtcccctgtgcacatgctgcccatgtgacaggcctcaagatcctaagcccaagcatcatggtctcagcctccattgatcaacggctgaccttctggcgtctggggcatggtgaacccaccttcatgaatagcactgtgttccatgtgcctgatgtggctgacatggactgctggcctgtgagccctgagtttggccaccgttgtgcccttgggggtcaggggcttgaggtttacaactggtatgactgaggtatcctgcggtggctggcgtgctgggcatggggcctgctcacagacagcatggagcagggatgggctgtctgtgcccatgctcagcatgccttgaggggaggaggtggtggccgtgggttcctgatgtcggtgcaggagctgaaggtgagtggagtgctgccaagaatatgcccgactccccatgacaagacagaactttgtaacaaacagtaccaatttattttggccgtgggtttttgctttttttccagttgatgactttgtgaacattcccaggtattggagcctctgtggccttaaatgtggctcagtggagggagacccagcatagccaggccagtatggagcacctcacgcacagctctcagaagctgcaggcggacgaacatctgaccaaagaggtgtggtcgaggctcctgaaagagaaagggcctgctggtctcatcctctgcttcctttgcctttaccctatacctctctgcacgtcccaccccattttgctgtgtgctcacccccaggatgtgtacccggttgtagtaggagctgaaatccatgctgagctgtaccaggaacttgcatatctagagacagagactgagtcactggcccatctctttgctcttgtgccccaggccagaataaagaatagagtgtagagtgtcctggttgtctatgcctcaccatctctgtgcgtacagcaatgtggagccccggggctgtgcagtccagcactgctgtccggctcagcagatccggaaaggggaggatactgttgaagagcaacaaccactcaccctgttggggagaaaggtgctgggaggggaagtccaggcctccttgtgccagctaccaggagggacactcacctcatcatgtagcagtgagaagtccagactgctcacaggaggaaaagtggggtacagaccttgttccatactacacttgtaactctcaaagagtgtggcaagacgggcacaattatacatgacaaaggtgccactctttgtgcccttcgtggagatactgctgtcagccagagccaggaagagctggggaatagaagcacagctgcagagagagaaggcagccaccacaccctgtgccccaacactggccctgtcaggctcccaggctcacctgactctgtggggctgtgctcagcatctcaaacttgatggtggccacagagagaacaccaaagatctctgtccaggctgggtctgagggagtatagggttggtcagtcagtctgcaggcaagggcagggatgcaaaaaacctgcccctaacccagaacatagccagggtttcccaggcacaccttgtgccagatccccaccatgcttcagtgctgaggccttgcacacctgggtatgccggaacctgtgtttggaagagaggaaggccagtgggcagggtcctgggtaaagagtcccccctcattaccctggcttaggttggtgttcctcccagcctcactcactcgtagtactcaggggcagtcatcagagtgccaggtgcaccagctactttcacagggccacagatgaggtgcttctgtcagaaagatgtcaggggctcagcctagttggcgctactctccaggaagtcccttgaggagcccaaatctggtgcctctactcagcccagactccctcaaattggaactgccaggttgagtgcctccgtctacccagccactcaggctacgcatggttcatccttctcaacctggtcttcagtgttcttgggatgtgtctacagaccccccttccc

SEQ ID NO: 4326 - protein, 1121 aa, Homo sapiens; identical to SEQ ID NO: 413

SEQ ID NO: 4327 - DNA, 1726 bp, Homo sapiens
ttcttagccgtggctgcctcagcacctcgaggatcgacatggacgctctcgaggactacgtttggccgcgggcaacctcggagcttatactcctcccagtgacgggtctggagtgcgtgggggaccggctgttggcgggtgagggtcccgatgtcctggtgtacagcttggactttggtgggcatctgcggatgataaagcgagtgcagaacctgcttggccactatcttatccatggcttccgggtacggccagagcctaatggagaccttgacttggaggccatggtggctgtgtgtgaacttgaccagcccggccttggcccccttgtggctgcagcctgtagtgatggggccgtaaggctctttcttttgcaggattctgggcggattctgcagctccttgctgaaaccttccaccataagcgatgtgtcctcaaggtccactcctttacacacgaggcacccaaccagaggcggaggctcctcctgtgcagcgcagctactgatggcagcctggctttctgggatctcaccaccatgctagaccatgactccactgtcctggagcctccagtggatcctgggcttccctaccggcttggcaccccctccctgactctccaggcccacagctgtggtatcaacagcctgcacaccttgcccacccgtgagggccaccatctcgtggccagtggcagtgaagatggatccctccatgtcttcgtgcttgctgtggagatgctacagctagaagaggctgtgggagaggctgggctggtaccccagctgcgtgtgctagaggaatactctgtcccctgtgcacatgctgcccatgtgacaggcctcaagatcctaagcccaagcatcatggtctcagcctccattgatcaacggctgaccttctggcgtctggggcatggtgaacccaccttcatgaatagcactgtgttccatgtgcctgatgtggctgacatggactgctggcctgtgagccctgagtttggccaccgttgtgcccttgggggtcaggggcttgaggtttacaactggtatgactgaggtatcctgcggtggctggcgtgctgggcatggggcctgctcacagacagcatggagcagggatgggctgtctgtgcccatgctcagcatgccttgaggggaggaggtggtggccgtgggttcctgatgtcggtgcaggagctgaaggtgagtggagtgctgccaagaatatgcccgactccccatgacaagacagaactttgtaacaaacagtaccaatttattttggccgtgggtttttgctttttttccagttgatgactttgtgaacattcccaggtattggagcctctgtggccttaaatgtggctcagtggagggagacccagcatagccaggccagtatggagcacctcacgcacagctctcagaagctgcaggcggacgaacatctgaccaaagaggtgtggtcgaggctcctgaaagagaaagggcctgctggtctcatcctctgcttcctttgcctttaccctatacctctctgcacgtcccaccccattttgctgtgtgctcacccccaggatgtgtacccggttgtagtaggagctgaaatccatgctgagctgtaccaggaacttgcatatctagagacagagactgagtcactggcccatctctttgctcttgtgccccaggccagaataaagaatagagtgtagagtgtc

SEQ ID NO: 4328 - protein, 340 aa, Homo sapiens
MDALEDYVWPRATSELILLPVTGLECVGDRLLAGEGPDVLVYSLDFGGHLRMIKRVQNLLGHYLIHGFRVRPEPNGDLDLEAMVAVCELDQPGLGPLVAAACSDGAVRLFLLQDSGRILQLLAETFHHKRCVLKVHSFTHEAPNQRRRLLLCSAATDGSLAFWDLTTMLDHDSTVLEPPVDPGLPYRLGTPSLTLQAHSCGINSLHTLPTREGHHLVASGSEDGSLHVFVLAVEMLQLEEAVGEAGLVPQLRVLEEYSVPCAHAAHVTGLKILSPSIMVSASIDQRLTFWRLGHGEPTFMNSTVFHVPDVADMDCWPVSPEFGHRCALGGQGLEVYNWYD

SEQ ID NO: 4329 - DNA, 2839 bp, Homo sapiens
ttcttagccgtggctgcctcagcacctcgaggatcgacatggacgctctcgaggactacgtttggccgcgggcaacctcggagcttatactcctcccagtgacgggtctggagtgcgtgggggaccggctgttggcgggtgagggtcccgatgtcctggtgtacagcttggactttggtgggcatctgcggatgataaagcgagtgcagaacctgcttggccactatcttatccatggcttccgggtacggccagagcctaatggagaccttgacttggaggccatggtggctgtgtgtgaacttgaccagcccggccttggcccccttgtggctgcagcctgtagtgatggggccgtaaggctctttcttttgcaggattctgggcggattctgcagctccttgctgaaaccttccaccataagcgatgtgtcctcaaggtccactcctttacacacgaggcacccaaccagaggcggaggctcctcctgtgcagcgcagctactgatggcagcctggctttctgggatctcaccaccatgctagaccatgactccactgtcctggagcctccagtggatcctgggcttccctaccggcttggcaccccctccctgactctccaggcccacagctgtggtatcaacagcctgcacaccttgcccacccgtgagggccaccatctcgtggccagtggcagtgaagatggatccctccatgtcttcgtgcttgctgtggagatgctacagctagaagaggctgtgggagaggctgggctggtaccccagctgcgtgtgctagaggaatactctgtcccctgtgcacatgctgcccatgtgacaggcctcaagatcctaagcccaagcatcatggtctcagcctccattgatcaacggctgaccttctggcgtctggggcatggtgaacccaccttcatgaatagcactgtgttccatgtgcctgatgtggctgacatggactgctggcctgtgagccctgagtttggccaccgttgtgcccttgggggtcaggggcttgaggtttacaactggtatgactgaggtatcctgcggtggctggcgtgctgggcatggggcctgctcacagacagcatggagcagggatgggctgtctgtgcccatgctcagcatgccttgaggggaggaggtggtggccgtgggttcctgatgtcggtgcaggagctgaaggtgagtggagtgctgccaagaatatgcccgactccccatgacaagacagaactttgtaacaaacagtaccaatttattttggccgtgggtttttgctttttttccagttgatgactttgtgaacattcccaggtattggagcctctgtggccttaaatgtggctcagtggagggagacccagcatagccaggccagtatggagcacctcacgcacagctctcagaagctgcaggcggacgaacatctgaccaaagaggtgtggtcgaggctcctgaaagagaaagggcctgctggtctcatcctctgcttcctttgcctttaccctatacctctctgcacgtcccaccccattttgctgtgtgctcacccccaggatgtgtacccggttgtagtaggagctgaaatccatgctgagctgtaccaggaacttgcatatctagagacagagactgagtcactggcccatctctttgctcttgtgccccaggccagaataaagaatagagtgtagagtgtcctggttgtctatgcctcaccatctctgtgcgtacagcaatgtggagccccggggctgtgcagtccagcactgctgtccggctcagcagatccggaaaggggaggatactgttgaagagcaacaaccactcaccctgttggggagaaaggtgctgggaggggaagtccaggcctccttgtgccagctaccaggagggacactcacctcatcatgtagcagtgagaagtccagactgctcacaggaggaaaagtggggtacagaccttgttccatactacacttgtaactctcaaagagtgtggcaagacgggcacaattatacatgacaaaggtgccactctttgtgcccttcgtggagatactgctgtcagccagagccaggaagagctggggaatagaagcacagctgcagagagagaaggcagccaccacaccctgtgccccaacactggccctgtcaggctcccaggctcacctgactctgtggggctgtgctcagcatctcaaacttgatggtggccacagagagaacaccaaagatctctgtccaggctgggtctgagggagtatagggttggtcagtcagtctgcaggcaagggcagggatgcaaaaaacctgcccctaacccagaacatagccagggtttcccaggcacaccttgtgccagatccccaccatgcttcagtgctgaggccttgcacacctgggtatgccggaacctgtgtttggaagagaggaaggccagtgggcagggtcctgggtaaagagtcccccctcattaccctggcttaggttggtgttcctcccagcctcactcactcgtagtactcaggggcagtcatcagagtgccaggtgcaccagctactttcacagggccacagatgaggtgcttctgtcagaaagatgtcaggggctcagcctagttggcgctactctccaggaagtcccttgaggagcccaaatctggtgcctctactcagcccagactccctcaaattggaactgccaggttgagtgcctccgtctacccagccactcaggctacgcatggttcatccttctcaacctggtcttcagtgttcttgggatgtgtctacagaccccccttccc

SEQ ID NO: 4330 - protein, 340 aa, Homo sapiens; identical to SEQ ID NO: 4328

SEQ ID NO: 4331 - DNA, 2421 bp, Homo sapiens
gccgtggctgcctcagcacctcgaggatcgacatggacgctctcgaggactacgtttggccgcgggcaacctcggagcttatactcctcccagtgacgggtctggagtgcgtgggggaccggctgttggcggcctgcctgattggagacgcctggaaggagctgaccatagtggcaggtgctgtttccaaccagctcttggtctggtacccagcaactgccttagcagacaacaaacctgtagcacctgaccgacgaatcagtgggcatgtgggcatcatcttcagcatgtcatacctggaaagcaagggattgctggctacagcttcagaagaccgaagcgttcgtatctggaaggtgggcgacctgcgagtgcctgggggtcgggtgcagaatattgggcactgctttgggcacagcgcccgtgtgtggcaggtcaagcttctagagaattaccttatcagtgcaggagaggattgtgtctgcttggtgtggagccatgaaggtgagatcctccaggcctttcggggacaccagggacgtgggatccgggccatagctgcccatgagaggcaggcctgggtgatcactgggggtgatgactcaggcattcggctgtggcacttggtagggcgtgggtaccggggattgggggtctcggctctctgcttcaagtcccgtagtaggccaggtacactcaaggctgtgactctggctggctcttggcgactgctggcagtgactgatacaggggccctgtatctctatgacgtcgaggtcaagtgctgggagcagctgctagaggataaacatttccagtcctactgcctgctggaggcagctcctggtcccgagggcttcggattgtgtgctatggccaatggggaaggtcgtgtcaaggttgtccccatcaacactccaactgctgctgtggaccagaccctgtttcctgggaaggtgcacagcttgagctgggccctgcgtggttatgaggagctcctgttgctggcatcgggccctggcggggtagtagcttgcctagagatctcagccgcaccctctggcaaggccatctttgtcaaggaacgttgtcggtacctgctgcccccaagcaagcagagatggcacacatgcagtgccttcctacccccaggtgacttcctggtgtgtggtgaccgccggggctctgtgctgctattcccctccagaccaggtctgctcaaggaccctggggtgggaggcaaggctcgggctggtgctggggcacctgtagtgggtagtggtagtagtgggggtgggaatgctttcactgggttgggcccagtgtctaccctgccctctctgcacgggaagcagggtgtgacctcagtcacatgccatggtggctatgtgtataccacagggcgtgatggagcctactaccagctgtttgtacgagacggccagctccagccagtcctaaggcagaagtcctgtcgaggcatgaactggctagctgggctccgtatagtgcccgatgggagcatggttatcctgggtttccatgccaatgagtttgtggtgtggaaccctcggtcacacgagaagctgcacatcgtcaactgtggtggagggcaccgttcgtgggcattctctgatactgaggcggccatggcctttgcttacctcaaggatggggatgtcatgctgtacagggctctgggtggctgcacccggccacacgtgattctccgggagggtctgcatggccgtgagatcacttgtgtaaagcgtgtgggcaccattaccctggggcctgaatatggagtgcccagcttcatgcagcctgatgacctggagcctggcagtgaggggcccgacttgactgacattgtgatcacatgtagtgaggacactactgtctgtgtcctagcactccctacaaccacaggctcagcccacgcactcacagctgtttgtaaccatatctcctcggtacgtgctgtggctgtgtggggcattggcaccccaggtggccctcaggatcctcagccaggcctgactgcccatgtggtgtctgcgggggggcgggctgagatgcactgcttcagcatcatggttactccggaccccagcaccccaagccgcctcgcctgccatgtcatgcacctttcgtcccaccggctagatgagtattgggaccggcaacgcaatcggcatcggatggttaaggtagacccagagaccaggtaatatatgctcctgggcagggtgtggtatgggtcatgcagatgctcccaggcttgcaggctccacctgacagctgcatgttgtctctgcaggtacatgtcccttgctgtgtgtgaacttgaccagcccggccttggcccccttgtggctgcagcctgtagtgatggggccgtaaggtgagagcatagggccc

SEQ ID NO: 4332 - protein, 732 aa, Homo sapiens
MDALEDYVWPRATSELILLPVTGLECVGDRLLAACLIGDAWKELTIVAGAVSNQLLVWYPATALADNKPVAPDRRISGHVGIIFSMSYLESKGLLATASEDRSVRIWKVGDLRVPGGRVQNIGHCFGHSARVWQVKLLENYLISAGEDCVCLVWSHEGEILQAFRGHQGRGIRAIAAHERQAWVITGGDDSGIRLWHLVGRGYRGLGVSALCFKSRSRPGTLKAVTLAGSWRLLAVTDTGALYLYDVEVKCWEQLLEDKHFQSYCLLEAAPGPEGFGLCAMANGEGRVKVVPINTPTAAVDQTLFPGKVHSLSWALRGYEELLLLASGPGGVVACLEISAAPSGKAIFVKERCRYLLPPSKQRWHTCSAFLPPGDFLVCGDRRGSVLLFPSRPGLLKDPGVGGKARAGAGAPVVGSGSSGGGNAFTGLGPVSTLPSLHGKQGVTSVTCHGGYVYTTGRDGAYYQLFVRDGQLQPVLRQKSCRGMNWLAGLRIVPDGSMVILGFHANEFVVWNPRSHEKLHIVNCGGGHRSWAFSDTEAAMAFAYLKDGDVMLYRALGGCTRPHVILREGLHGREITCVKRVGTITLGPEYGVPSFMQPDDLEPGSEGPDLTDIVITCSEDTTVCVLALPTTTGSAHALTAVCNHISSVRAVAVWGIGTPGGPQDPQPGLTAHVVSAGGRAEMHCFSIMVTPDPSTPSRLACHVMHLSSHRLDEYWDRQRNRHRMVKVDPETR

SEQ ID NO: 4333 - DNA, 3020 bp, Homo sapiens
cgtggctgcctcagcacctcgaggatcgacatggacgctctcgaggactacgtttggccgcgggcaacctcggagcttatactcctcccagtgacgggtctggagtgcgtgggggaccggctgttggcggagtctggctttggctttccaaagtgcccagattacaggcgtgagccaccgcacccggccgagaccaaggattttctaagattcaagctgcaggattgtgtgtcctgatgcattcataggctacatgccgagaagtttccctgatccccatctcttccctgtgggtcatcagagttaggtacctagctctgacatggctctttgcctctatctaggtgagggtcccgatgtcctggtgtacagcttggactttggtgggcatctgcggatgataaagcgagtgcagaacctgcttggccactatcttatccatggcttccgggtacggccagagcctaatggagaccttgacttggaggccatggtggctgtgtttggaagcaagggactccgagttgtgaaaattagctggggacagggccacttctgggagctttggcgctctggcctgtggaacatgtctgactggatttgggatgcacgctggcttgagggaaatatagccttggccctgggccacaactcagtggtgctatatgaccctgtagtagggtgcatcctgcaagaggtgccctgcacagacaggtgcaccctctcttcagcctgcctgattggagacgcctggaaggagctgaccatagtggcaggtgctgtttccaaccagctcttggtctggtacccagcaactgccttagcagacaacaaacctgtagcacctgaccgacgaatcagtgggcatgtgggcatcatcttcagcatgtcatacctggaaagcaagggattgctggctacagcttcagaagaccgaagcgttcgtatctggaaggtgggcgacctgcgagtgcctgggggtcgggtgcagaatattgggcactgctttgggcacagcgcccgtgtgtggcaggtcaagcttctagagaattaccttatcagtgcaggagaggattgtgtctgcttggtgtggagccatgaaggtgagatcctccaggcctttcggggacaccagggacgtgggatccgggccatagctgcccatgagaggcaggcctgggtgatcactgggggtgatgactcaggcattcggctgtggcacttggtagggcgtgggtaccggggattgggggtctcggctctctgcttcaagtcccgtagtaggccaggtacactcaaggctgtgactctggctggctcttggcgactgctggcagtgactgatacaggggccctgtatctctatgacgtcgaggtcaagtgctgggagcagctgctagaggataaacatttccagtcctactgcctgctggaggcagctcctggtcccgagggcttcggattgtgtgctatggccaatggggaaggtcgtgtcaaggttgtccccatcaacactccaactgctgctgtggaccagaccctgtttcctgggaaggtgcacagcttgagctgggccctgcgtggttatgaggagctcctgttgctggcatcgggccctggcggggtagtagcttgcctagagatctcagccgcaccctctggcaaggccatctttgtcaaggaacgttgtcggtacctgctgcccccaagcaagcagagatggcacacatgcagtgccttcctacccccaggtgacttcctggtgtgtggtgaccgccggggctctgtgctgctattcccctccagaccaggtctgctcaaggaccctggggtgggaggcaaggctcgggctggtgctggggcacctgtagtgggtagtggtagtagtgggggtgggaatgctttcactgggttgggcccagtgtctaccctgccctctctgcacgggaagcagggtgtgacctcagtcacatgccatggtggctatgtgtataccacagggcgtgatggagcctactaccagctgtttgtacgagacggccagctccagccagtcctaaggcagaagtcctgtcgaggcatgaactggctagctgggctccgtatagtgcccgatgggagcatggttatcctgggtttccatgccaatgagtttgtggtgtggaaccctcggtcacacgagaagctgcacatcgtcaactgtggtggagggcaccgttcgtgggcattctctgatactgaggcggccatggcctttgcttacctcaaggatggggatgtcatgctgtacagggctctgggtggctgcacccggccacacgtgattctccgggagggtctgcatggccgtgagatcacttgtgtaaagcgtgtgggcaccattaccctggggcctgaatatggagtgcccagcttcatgcagcctgatgacctggagcctggcagtgaggggcccgacttgactgacattgtgatcacatgtagtgaggacactactgtctgtgtcctagcactccctacaaccacaggctcagcccacgcactcacagctgtttgtaaccatatctcctcggtacgtgctgtggctgtgtggggcattggcaccccaggtggccctcaggatcctcagccaggcctgactgcccatgtggtgtctgcgggggggcgggctgagatgcactgcttcagcatcatggttactccggaccccagcaccccaagccgcctcgcctgccatgtcatgcacctttcgtcccaccggctagatgagtattgggaccggcaacgcaatcggcatcggatggttaaggtagacccagagaccaggtaatatatgctcctgggcagggtgtggtatgggtcatgcagatgctcccaggcttgcaggctccacctgacagctgcatgttgtctctgcaggtacatgtcccttgctgtgtgtgaacttgaccagcccggccttggcccccttgtggctgcagcctgtagtgatggggccgtaaggtgagagcatagggccc

SEQ ID NO: 4334 - protein, 68 aa, Homo sapiens
MDALEDYVWPRATSELILLPVTGLECVGDRLLAESGFGFPKCPDYRREPPHPAETKDFLRFKLQDCVS

SEQ ID NO: 4335 - DNA, 2756 bp, Homo sapiens
gctgcctcagcacctcgaggatcgacatggacgctctcgaggactacgtttggccgcgggcaacctcggagcttatactcctcccagtgacgggtctggagtgcgtgggggaccggctgttggcgggtgagggtcccgatgtcctggtgtacagcttggactttggtgggcatctgcggatgataaagcgagtgcagaacctgcttggccactatcttatccatggcttccgggtacggccagagcctaatggagaccttgacttggaggccatggtggctgtggccacttctgggagctttggcgctctggcctgtggaacatgtctgactggatttgggatgcacgctggcttgagggaaatatagccttggccctgggccacaactcagtggtgctatatgaccctgtagtagggtgcatcctgcaagaggtgccctgcacagacaggtgcaccctctcttcagcctgcctgattggagacgcctggaaggagctgaccatagtggcaggtgctgtttccaaccagctcttggtctggtacccagcaactgccttagcagacaacaaacctgtagcacctgaccgacgaatcagtgggcatgtgggcatcatcttcagcatgtcatacctggaaagcaagggattgctggctacagcttcagaagaccgaagcgttcgtatctggaaggtgggcgacctgcgagtgcctgggggtcgggtgcagaatattgggcactgctttgggcacagcgcccgtgtgtggcaggtcaagcttctagagaattaccttatcagtgcaggagaggattgtgtctgcttggtgtggagccatgaaggtgagatcctccaggcctttcggggacaccagggacgtgggatccgggccatagctgcccatgagaggcaggcctgggtgatcactgggggtgatgactcaggcattcggctgtggcacttggtagggcgtgggtaccggggattgggggtctcggctctctgcttcaagtcccgtagtaggccaggtacactcaaggctgtgactctggctggctcttggcgactgctggcagtgactgatacaggggccctgtatctctatgacgtcgaggtcaagtgctgggagcagctgctagaggataaacatttccagtcctactgcctgctggaggcagctcctggtcccgagggcttcggattgtgtgctatggccaatggggaaggtcgtgtcaaggttgtccccatcaacactccaactgctgctgtggaccagaccctgtttcctgggaaggtgcacagcttgagctgggccctgcgtggttatgaggagctcctgttgctggcatcgggccctggcggggtagtagcttgcctagagatctcagccgcaccctctggcaaggccatctttgtcaaggaacgttgtcggtacctgctgcccccaagcaagcagagatggcacacatgcagtgccttcctacccccaggtgacttcctggtgtgtggtgaccgccggggctctgtgctgctattcccctccagaccaggtctgctcaaggaccctggggtgggaggcaaggctcgggctggtgctggggcacctgtagtgggtagtggtagtagtgggggtgggaatgctttcactgggttgggcccagtgtctaccctgccctctctgcacgggaagcagggtgtgacctcagtcacatgccatggtggctatgtgtataccacagggcgtgatggagcctactaccagctgtttgtacgagacggccagctccagccagtcctaaggcagaagtcctgtcgaggcatgaactggctagctgggctccgtatagtgcccgatgggagcatggttatcctgggtttccatgccaatgagtttgtggtgtggaaccctcggtcacacgagaagctgcacatcgtcaactgtggtggagggcaccgttcgtgggcattctctgatactgaggcggccatggcctttgcttacctcaaggatggggatgtcatgctgtacagggctctgggtggctgcacccggccacacgtgattctccgggagggtctgcatggccgtgagatcacttgtgtaaagcgtgtgggcaccattaccctggggcctgaatatggagtgcccagcttcatgcagcctgatgacctggagcctggcagtgaggggcccgacttgactgacattgtgatcacatgtagtgaggacactactgtctgtgtcctagcactccctacaaccacaggctcagcccacgcactcacagctgtttgtaaccatatctcctcggtacgtgctgtggctgtgtggggcattggcaccccaggtggccctcaggatcctcagccaggcctgactgcccatgtggtgtctgcgggggggcgggctgagatgcactgcttcagcatcatggttactccggaccccagcaccccaagccgcctcgcctgccatgtcatgcacctttcgtcccaccggctagatgagtattgggaccggcaacgcaatcggcatcggatggttaaggtagacccagagaccaggtaatatatgctcctgggcagggtgtggtatgggtcatgcagatgctcccaggcttgcaggctccacctgacagctgcatgttgtctctgcaggtacatgtcccttgctgtgtgtgaacttgaccagcccggccttggcccccttgtggctgcagcctgtagtgatggggccgtaaggtgagagcatagggccc

SEQ ID NO: 4336 - protein, 113 aa, Homo sapiens
MDALEDYVWPRATSELILLPVTGLECVGDRLLAGEGPDVLVYSLDFGGHLRMIKRVQNLLGHYLIHGFRVRPEPNGDLDLEAMVAVATSGSFGALACGTCLTGFGMHAGLREI

SEQ ID NO: 4337 - DNA, 3009 bp, Homo sapiens
gggggtgaagatcctctgaggagggtggcgtcgcggaaaacggcggataagacctttccgagtagggggcggtgcccggggaagcaggggctgagaccccctcctgagatggttgaggtccaggaaatcaggtgtggaggtccctccaaggagaaccgggtcgcaaaggacaggcgaggcctgggacctgaggtgtcagagtccaggctggtctcgaacagtcattacatgaagccactaatgacccatgttggtgctgctgagttgtataagggtcctgaggcagggccttggcggtcaggccttgagtgagttgccaccagtcctaagagggtgagggtcccgatgtcctggtgtacagcttggactttggtgggcatctgcggatgataaagcgagtgcagaacctgcttggccactatcttatccatggcttccgggtacggccagagcctaatggagaccttgacttggaggccatggtggctgtgtttggaagcaagggactccgagttgtgaaaattagctggggacagggccacttctgggagctttggcgctctggcctgtggaacatgtctgactggatttgggatgcacgctggcttgagggaaatatagccttggccctgggccacaactcagtggtgctatatgaccctgtagtagggtgcatcctgcaagaggtgccctgcacagacaggtgcaccctctcttcagcctgcctgattggagacgcctggaaggagctgaccatagtggcaggtgctgtttccaaccagctcttggtctggtacccagcaactgccttagcagacaacaaacctgtagcacctgaccgacgaatcagtgggcatgtgggcatcatcttcagcatgtcatacctggaaagcaagggattgctggctacagcttcagaagaccgaagcgttcgtatctggaaggtgggcgacctgcgagtgcctgggggtcgggtgcagaatattgggcactgctttgggcacagcgcccgtgtgtggcaggtcaagcttctagagaattaccttatcagtgcaggagaggattgtgtctgcttggtgtggagccatgaaggtgagatcctccaggcctttcggggacaccagggacgtgggatccgggccatagctgcccatgagaggcaggcctgggtgatcactgggggtgatgactcaggcattcggctgtggcacttggtagggcgtgggtaccggggattgggggtctcggctctctgcttcaagtcccgtagtaggccaggtacactcaaggctgtgactctggctggctcttggcgactgctggcagtgactgatacaggggccctgtatctctatgacgtcgaggtcaagtgctgggagcagctgctagaggataaacatttccagtcctactgcctgctggaggcagctcctggtcccgagggcttcggattgtgtgctatggccaatggggaaggtcgtgtcaaggttgtccccatcaacactccaactgctgctgtggaccagaccctgtttcctgggaaggtgcacagcttgagctgggccctgcgtggttatgaggagctcctgttgctggcatcgggccctggcggggtagtagcttgcctagagatctcagccgcaccctctggcaaggccatctttgtcaaggaacgttgtcggtacctgctgcccccaagcaagcagagatggcacacatgcagtgccttcctacccccaggtgacttcctggtgtgtggtgaccgccggggctctgtgctgctattcccctccagaccaggtctgctcaaggaccctggggtgggaggcaaggctcgggctggtgctggggcacctgtagtgggtagtggtagtagtgggggtgggaatgctttcactgggttgggcccagtgtctaccctgccctctctgcacgggaagcagggtgtgacctcagtcacatgccatggtggctatgtgtataccacagggcgtgatggagcctactaccagctgtttgtacgagacggccagctccagccagtcctaaggcagaagtcctgtcgaggcatgaactggctagctgggctccgtatagtgcccgatgggagcatggttatcctgggtttccatgccaatgagtttgtggtgtggaaccctcggtcacacgagaagctgcacatcgtcaactgtggtggagggcaccgttcgtgggcattctctgatactgaggcggccatggcctttgcttacctcaaggatggggatgtcatgctgtacagggctctgggtggctgcacccggccacacgtgattctccgggagggtctgcatggccgtgagatcacttgtgtaaagcgtgtgggcaccattaccctggggcctgaatatggagtgcccagcttcatgcagcctgatgacctggagcctggcagtgaggggcccgacttgactgacattgtgatcacatgtagtgaggacactactgtctgtgtcctagcactccctacaaccacaggctcagcccacgcactcacagctgtttgtaaccatatctcctcggtacgtgctgtggctgtgtggggcattggcaccccaggtggccctcaggatcctcagccaggcctgactgcccatgtggtgtctgcgggggggcgggctgagatgcactgcttcagcatcatggttactccggaccccagcaccccaagccgcctcgcctgccatgtcatgcacctttcgtcccaccggctagatgagtattgggaccggcaacgcaatcggcatcggatggttaaggtagacccagagaccaggtaatatatgctcctgggcagggtgtggtatgggtcatgcagatgctcccaggcttgcaggctccacctgacagctgcatgttgtctctgcaggtacatgtcccttgctgtgtgtgaacttgaccagcccggccttggcccccttgtggctgcagcctgtagtgatggggccgtaaggtgagagcatagggccc

SEQ ID NO: 4338 - protein, 810 aa, Homo sapiens
MIKRVQNLLGHYLIHGFRVRPEPNGDLDLEAMVAVFGSKGLRVVKISWGQGHFWELWRSGLWNMSDWIWDARWLEGNIALALGHNSVVLYDPVVGCILQEVPCTDRCTLSSACLIGDAWKELTIVAGAVSNQLLVWYPATALADNKPVAPDRRISGHVGIIFSMSYLESKGLLATASEDRSVRIWKVGDLRVPGGRVQNIGHCFGHSARVWQVKLLENYLISAGEDCVCLVWSHEGEILQAFRGHQGRGIRAIAAHERQAWVITGGDDSGIRLWHLVGRGYRGLGVSALCFKSRSRPGTLKAVTLAGSWRLLAVTDTGALYLYDVEVKCWEQLLEDKHFQSYCLLEAAPGPEGFGLCAMANGEGRVKVVPINTPTAAVDQTLFPGKVHSLSWALRGYEELLLLASGPGGVVACLEISAAPSGKAIFVKERCRYLLPPSKQRWHTCSAFLPPGDFLVCGDRRGSVLLFPSRPGLLKDPGVGGKARAGAGAPVVGSGSSGGGNAFTGLGPVSTLPSLHGKQGVTSVTCHGGYVYTTGRDGAYYQLFVRDGQLQPVLRQKSCRGMNWLAGLRIVPDGSMVILGFHANEFVVWNPRSHEKLHIVNCGGGHRSWAFSDTEAAMAFAYLKDGDVMLYRALGGCTRPHVILREGLHGREITCVKRVGTITLGPEYGVPSFMQPDDLEPGSEGPDLTDIVITCSEDTTVCVLALPTTTGSAHALTAVCNHISSVRAVAVWGIGTPGGPQDPQPGLTAHVVSAGGRAEMHCFSIMVTPDPSTPSRLACHVMHLSSHRLDEYWDRQRNRHRMVKVDPETR

SEQ ID NO: 4339 - DNA, 1122 bp, Homo sapiens
gtgagggtcccgatgtcctggtgtacagcttggactttggtgggcatctgcggatgataaagcgagtgcagaacctgcttggccactatcttatccatggcttccgggtacggccagagcctaatggagaccttgacttggaggccatggtggctgtgtttggaagcaagggactccgagttgtgaaaattagctggggacagggccacttctgggagctttggcgctctggcctgtggaacatgtctgactggatttgggatgcacgctggcttgagggaaatatagccttggccctgggccacaactcagtggtgctatatgaccctgtagtagggtgcatcctgcaagaggtgccctgcacagacaggtgcaccctctcttcagcctgcctgattggagacgcctggaaggagctgaccatagtggcaggtgctgtttccaaccagctcttggtctggtacccagcaactgccttagcagacaacaaacctgtagcacctgaccgacgaatcagtgggcatgtgggcatcatcttcagcatcatgccttgaggggaggaggtggtggccgtgggttcctgatgtcggtgcaggagctgaaggtgagtggagtgctgccaagaatatgcccgactccccatgacaagacagaactttgtaacaaacagtaccaatttattttggccgtgggtttttgctttttttccagttgatgactttgtgaacattcccaggtattggagcctctgtggccttaaatgtggctcagtggagggagacccagcatagccaggccagtatggagcacctcacgcacagctctcagaagctgcaggcggacgaacatctgaccaaagaggtgtggtcgaggctcctgaaagagaaagggcctgctggtctcatcctctgcttcctttgcctttaccctatacctctctgcacgtcccaccccattttgctgtgtgctcacccccaggatgtgtacccggttgtagtaggagctgaaatccatgctgagctgtaccaggaacttgcatatctagagacagagactgagtcactggcccatctctttgctcttgtgccccaggccagaataaagaatagagtgtagagtgtc

SEQ ID NO: 4340 - protein, 166 aa, Homo sapiens
MIKRVQNLLGHYLIHGFRVRPEPNGDLDLEAMVAVFGSKGLRVVKISWGQGHFWELWRSGLWNMSDWIWDARWLEGNIALALGHNSVVLYDPVVGCILQEVPCTDRCTLSSACLIGDAWKELTIVAGAVSNQLLVWYPATALADNKPVAPDRRISGHVGIIFSIMP

SEQ ID NO: 4341 - DNA, 1919 bp, Homo sapiens
gtgagggtcccgatgtcctggtgtacagcttggactttggtgggcatctgcggatgataaagcgagtgcagaacctgcttggccactatcttatccatggcttccgggtacggccagagcctaatggagaccttgacttggaggccatggtggctgtgtttggaagcaagggactccgagttgtgaaaattagctggggacagggccacttctgggagctttggcgctctggcctgtggaacatgtctgactggatttgggatgcacgctggcttgagggaaatatagccttggccctgggccacaactcagtggtgctatatgaccctgtagtagggtgcatcctgcaagaggtgccctgcacagacaggtgcaccctctcttcagcctgcctgattggagacgcctggaaggagctgaccatagtggcaggtgctgtttccaaccagctcttggtctggtacccagcaactgccttagcagacaacaaacctgtagcacctgaccgacgaatcagtgggcatgtgggcatcatcttcagcatgtcatacctggaaagcaagggattgctggctacagcttcagaagacctctgcttcctttgcctttaccctatacctctctgcacgtcccaccccattttgctgtgtgctcacccccaggatgtgtacccggttgtagtaggagctgaaatccatgctgagctgtaccaggaacttgcatatctagagacagagactgagtcactggcccatctctttgctcttgtgccccaggccagaataaagaatagagtgtagagtgtcctggttgtctatgcctcaccatctctgtgcgtacagcaatgtggagccccggggctgtgcagtccagcactgctgtccggctcagcagatccggaaaggggaggatactgttgaagagcaacaaccactcaccctgttggggagaaaggtgctgggaggggaagtccaggcctccttgtgccagctaccaggagggacactcacctcatcatgtagcagtgagaagtccagactgctcacaggaggaaaagtggggtacagaccttgttccatactacacttgtaactctcaaagagtgtggcaagacgggcacaattatacatgacaaaggtgccactctttgtgcccttcgtggagatactgctgtcagccagagccaggaagagctggggaatagaagcacagctgcagagagagaaggcagccaccacaccctgtgccccaacactggccctgtcaggctcccaggctcacctgactctgtggggctgtgctcagcatctcaaacttgatggtggccacagagagaacaccaaagatctctgtccaggctgggtctgagggagtatagggttggtcagtcagtctgcaggcaagggcagggatgcaaaaaacctgcccctaacccagaacatagccagggtttcccaggcacaccttgtgccagatccccaccatgcttcagtgctgaggccttgcacacctgggtatgccggaacctgtgtttggaagagaggaaggccagtgggcagggtcctgggtaaagagtcccccctcattaccctggcttaggttggtgttcctcccagcctcactcactcgtagtactcaggggcagtcatcagagtgccaggtgcaccagctactttcacagggccacagatgaggtgcttctgtcagaaagatgtcaggggctcagcctagttggcgctactctccaggaagtcccttgaggagcccaaatctggtgcctctactcagcccagactccctcaaattggaactgccaggttgagtgcctccgtctacccagccactcaggctacgcatggttcatccttctcaacctggtcttcagtgttcttgggatgtgtctacagaccccccttccc

SEQ ID NO: 4342 - protein, 248 aa, Homo sapiens
MIKRVQNLLGHYLIHGFRVRPEPNGDLDLEAMVAVFGSKGLRVVKISWGQGHFWELWRSGLWNMSDWIWDARWLEGNIALALGHNSVVLYDPVVGCILQEVPCTDRCTLSSACLIGDAWKELTIVAGAVSNQLLVWYPATALADNKPVAPDRRISGHVGIIFSMSYLESKGLLATASEDLCFLCLYPIPLCTSHPILLCAHPQDVYPVVVGAEIHAELYQELAYLETETESLAHLFALVPQARIKNRV

SEQ ID NO: 4343 - DNA, 2235 bp, Homo sapiens
gtgagggtcccgatgtcctggtgtacagcttggactttggtgggcatctgcggatgataaagcgagtgcagaacctgcttggccactatcttatccatggcttccgggtacggccagagcctaatggagaccttgacttggaggccatggtggctgtgtttggaagcaagggactccgagttgtgaaaattagctggggacagggccacttctgggagctttggcgctctggcctgtggaacatgtctgactggatttgggatgcacgctggcttgagggaaatatagccttggccctgggccacaactcagtggtgctatatgaccctgtagtagggtgcatcctgcaagaggtgccctgcacagacaggtgcaccctctcttcagcctgcctgattggagacgcctggaaggagctgaccatagtggcaggtgctgtttccaaccagctcttggtctggtacccagcaactgccttagcagacaacaaacctgtagcacctgaccgacgaatcagtgggcatgtgggcatcatcttcagcatcatgccttgaggggaggaggtggtggccgtgggttcctgatgtcggtgcaggagctgaaggtgagtggagtgctgccaagaatatgcccgactccccatgacaagacagaactttgtaacaaacagtaccaatttattttggccgtgggtttttgctttttttccagttgatgactttgtgaacattcccaggtattggagcctctgtggccttaaatgtggctcagtggagggagacccagcatagccaggccagtatggagcacctcacgcacagctctcagaagctgcaggcggacgaacatctgaccaaagaggtgtggtcgaggctcctgaaagagaaagggcctgctggtctcatcctctgcttcctttgcctttaccctatacctctctgcacgtcccaccccattttgctgtgtgctcacccccaggatgtgtacccggttgtagtaggagctgaaatccatgctgagctgtaccaggaacttgcatatctagagacagagactgagtcactggcccatctctttgctcttgtgccccaggccagaataaagaatagagtgtagagtgtcctggttgtctatgcctcaccatctctgtgcgtacagcaatgtggagccccggggctgtgcagtccagcactgctgtccggctcagcagatccggaaaggggaggatactgttgaagagcaacaaccactcaccctgttggggagaaaggtgctgggaggggaagtccaggcctccttgtgccagctaccaggagggacactcacctcatcatgtagcagtgagaagtccagactgctcacaggaggaaaagtggggtacagaccttgttccatactacacttgtaactctcaaagagtgtggcaagacgggcacaattatacatgacaaaggtgccactctttgtgcccttcgtggagatactgctgtcagccagagccaggaagagctggggaatagaagcacagctgcagagagagaaggcagccaccacaccctgtgccccaacactggccctgtcaggctcccaggctcacctgactctgtggggctgtgctcagcatctcaaacttgatggtggccacagagagaacaccaaagatctctgtccaggctgggtctgagggagtatagggttggtcagtcagtctgcaggcaagggcagggatgcaaaaaacctgcccctaacccagaacatagccagggtttcccaggcacaccttgtgccagatccccaccatgcttcagtgctgaggccttgcacacctgggtatgccggaacctgtgtttggaagagaggaaggccagtgggcagggtcctgggtaaagagtcccccctcattaccctggcttaggttggtgttcctcccagcctcactcactcgtagtactcaggggcagtcatcagagtgccaggtgcaccagctactttcacagggccacagatgaggtgcttctgtcagaaagatgtcaggggctcagcctagttggcgctactctccaggaagtcccttgaggagcccaaatctggtgcctctactcagcccagactccctcaaattggaactgccaggttgagtgcctccgtctacccagccactcaggctacgcatggttcatccttctcaacctggtcttcagtgttcttgggatgtgtctacagaccccccttccc

SEQ ID NO: 4344 - protein, 166 aa, Homo sapiens; identical to SEQ ID NO: 4340

SEQ ID NO: 4345 - DNA, 1924 bp, Homo sapiens
ggattgctggctacagcttcagaagaccgaagcgttcgtatctggaaggtgggcgacctgcgagtgcctgggggtcgggtgcagaatattgggcactgctttgggcacagcgcccgtgtgtggcaggtcaagcttctagagaattaccttatcagtgcaggagaggattgtgtctgcttggtgtggagccatgaaggtgagatcctccaggcctttcggggacaccagggacgtgggatccgggccatagctgcccatgagaggcaggcctgggtgatcactgggggtgatgactcaggcattcggctgtggcacttggtagggcgtgggtaccggggattgggggtctcggctctctgcttcaagtcccgtagtaggccaggtacactcaaggctgtgactctggctggctcttggcgactgctggcagtgactgatacaggggccctgtatctctatgacgtcgaggtcaagtgctgggagcagctgctagaggataaacatttccagtcctactgcctgctggaggcagctcctggtcccgagggcttcggattgtgtgctatggccaatggggaaggtcgtgtcaaggttgtccccatcaacactccaactgctgctgtggaccagaccctgtttcctgggaaggtgcacagcttgagctgggccctgcgtggttatgaggagctcctgttgctggcatcgggccctggcggggtagtagcttgcctagagatctcagccgcaccctctggcaaggccatctttgtcaaggaacgttgtcggtacctgctgcccccaagcaagcagagatggcacacatgcagtgccttcctacccccaggtgacttcctggtgtgtggtgaccgccggggctctgtgctgctattcccctccagaccagggcgtgatggagcctactaccagctgtttgtacgagacggccagctccagccagtcctaaggcagaagtcctgtcgaggcatgaactggctagctgggctccgtatagtgcccgatgggagcatggttatcctgggtttccatgccaatgagtttgtggtgtggaaccctcggtcacacgagaagctgcacatcgtcaactgtggtggagggcaccgttcgtgggcattctctgatactgaggcggccatggcctttgcttacctcaaggatggggatgtcatgctgtacagggctctgggtggctgcacccggccacacgtgattctccgggagggtctgcatggccgtgagatcacttgtgtaaagcgtgtgggcaccattaccctggggcctgaatatggagtgcccagcttcatgcagcctgatgacctggagcctggcagtgaggggcccgacttgactgacattgtgatcacatgtagtgaggacactactgtctgtgtcctagcactccctacaaccacaggctcagcccacgcactcacagctgtttgtaaccatatctcctcggtacgtgctgtggctgtgtggggcattggcaccccaggtggccctcaggatcctcagccaggcctgactgcccatgtggtgtctgcgggggggcgggctgagatgcactgcttcagcatcatggttactccggaccccagcaccccaagccgcctcgcctgccatgtcatgcacctttcgtcccaccggctagatgagtattgggaccggcaacgcaatcggcatcggatggttaaggtagacccagagaccaggtaatatatgctcctgggcagggtgtggtatgggtcatgcagatgctcccaggcttgcaggctccacctgacagctgcatgttgtctctgcaggtacatgtcccttgctgtgtgtgaacttgaccagcccggccttggcccccttgtggctgcagcctgtagtgatggggccgtaaggtgagagcatagggccc

SEQ ID NO: 4346 - protein, 389 aa, Homo sapiens
MANGEGRVKVVPINTPTAAVDQTLFPGKVHSLSWALRGYEELLLLASGPGGVVACLEISAAPSGKAIFVKERCRYLLPPSKQRWHTCSAFLPPGDFLVCGDRRGSVLLFPSRPGRDGAYYQLFVRDGQLQPVLRQKSCRGMNWLAGLRIVPDGSMVILGFHANEFVVWNPRSHEKLHIVNCGGGHRSWAFSDTEAAMAFAYLKDGDVMLYRALGGCTRPHVILREGLHGREITCVKRVGTITLGPEYGVPSFMQPDDLEPGSEGPDLTDIVITCSEDTTVCVLALPTTTGSAHALTAVCNHISSVRAVAVWGIGTPGGPQDPQPGLTAHVVSAGGRAEMHCFSIMVTPDPSTPSRLACHVMHLSSHRLDEYWDRQRNRHRMVKVDPETR

SEQ ID NO: 4347 - DNA, 1856 bp, Homo sapiens
cacttggtagggcgtgggtaccggggattgggggtctcggctctctgcttcaagtcccgtagtaggccaggtacactcaaggctgtgactctggctggctcttggcgactgctggcagtgactgatacaggggccctgtatctctatgacgtcgaggtcaagtgctgggagcagctgctagaggataaacatttccagtcctactgcctgctggaggcagctcctggtcccgagggcttcggattgtgtgctatggccaatggggaaggtcgtgtcaaggttgtccccatcaacactccaactgctgctgtggaccagaccctgtttcctgggaaggtgcacagcttgagctgggccctgcgtggttatgaggagctcctgttgctggcatcgggccctggcggggtagtagcttgcctagagatctcagccgcaccctctggcaaggccatctttgtcaaggaacgttgtcggtacctgctgcccccaagcaagcagagatggcacacatgcagtgccttcctacccccaggtgacttcctggtgtgtggtgaccgccggggctctgtgctgctattcccctccagaccaggtctgctcaaggaccctggggtgggaggcaaggctcgggctggtgctggggcacctgtagtgggtagtggtagtagtgggggtgggaatgctttcactgggttgggcccagtgtctaccctgccctctctgcacgggaagcagggtgtgacctcagtcacatgccatggtggctatgtgtataccacagggcgtgatggagcctactaccagctgtttgtacgagacggccagctccagccagtcctaaggcagaagtcctgtcgaggcatgaactggctagctgggctccgtatagtgcccgatgggagcatggttatcctgggtttccatgccaatgagtttgtggtgtggaaccctcggtcacacgagaagctgcacatcgtcaactgtggtggagggcaccgttcgtgggcattctctgatactgaggcggccatggcctttgcttacctcaaggatggggatgtcatgctgtacagggctctgggtggctgcacccggccacacgtgattctccgggagggtctgcatggccgtgagatcacttgtgtaaagcgtgtgggcaccattaccctggggcctgaatatggagtgcccagcttcatgcagcctgatgacctggagcctggcagtgaggggcccgacttgactgacattgtgatcacatgtagtgaggacactactgtctgtgtcctagcactccctacaaccacaggctcagcccacgcactcacagctgtttgtaaccatatctcctcggtacgtgctgtggctgtgtggggcattggcaccccaggtggccctcaggatcctcagccaggcctgactgcccatgtggtgtctgcgggggggcgggctgagatgcactgcttcagcatcatggttactccggaccccagcaccccaagccgcctcgcctgccatgtcatgcacctttcgtcccaccggctagatgagtattgggaccggcaacgcaatcggcatcggatggttaaggtagacccagagaccaggtacatgtcccttgctgtgtgtgaacttgaccagcccggccttggcccccttgtggctgcagcctgtagtgatggggccgtaaggctctttcttttgcaggattctgggcggattctgcagctccttgctgaaaccttccaccataagcgatgtgtcctcaaggtccactcctttacacacgaggcacccaaccagaggcggaggctcctcctgtgcagcgcagctactgatggcagcctggctttctg

SEQ ID NO: 4348 - protein, 533 aa, Homo sapiens
MANGEGRVKVVPINTPTAAVDQTLFPGKVHSLSWALRGYEELLLLASGPGGVVACLEISAAPSGKAIFVKERCRYLLPPSKQRWHTCSAFLPPGDFLVCGDRRGSVLLFPSRPGLLKDPGVGGKARAGAGAPVVGSGSSGGGNAFTGLGPVSTLPSLHGKQGVTSVTCHGGYVYTTGRDGAYYQLFVRDGQLQPVLRQKSCRGMNWLAGLRIVPDGSMVILGFHANEFVVWNPRSHEKLHIVNCGGGHRSWAFSDTEAAMAFAYLKDGDVMLYRALGGCTRPHVILREGLHGREITCVKRVGTITLGPEYGVPSFMQPDDLEPGSEGPDLTDIVITCSEDTTVCVLALPTTTGSAHALTAVCNHISSVRAVAVWGIGTPGGPQDPQPGLTAHVVSAGGRAEMHCFSIMVTPDPSTPSRLACHVMHLSSHRLDEYWDRQRNRHRMVKVDPETRYMSLAVCELDQPGLGPLVAAACSDGAVRLFLLQDSGRILQLLAETFHHKRCVLKVHSFTHEAPNQRRRLLLCSAATDGSLA

SEQ ID NO: 4349 - DNA, 1049 bp, Homo sapiens
gtataccacagggcgtgatggagcctactaccagctgtttgtacgagacggccagctccagccagtcctaaggcagaagtcctgtcgaggcatgaactggctagctgggctccgtatagtgcccgatgggagcatggttatcctgggtttccatgccaatgagtttgtggtgtggaaccctcggtcacacgagaagctgcacatcgtcaactgtggtggagggcaccgttcgtgggcattctctgatactgaggcggccatggcctttgcttacctcaaggatggggatgtcatgctgtacagggctctgggtggctgcacccggccacacgtgattctccgggagggtctgcatggccgtgagatcacttgtgtaaagcgtgtgggcaccattaccctggggcctgaatatggagtgcccagcttcatgcagcctgatgacctggagcctggcagtgaggggcccgacttgactgacattgtgatcacatgtagtgaggacactactgtctgtgtcctagcactccctacaaccacaggctcagcccacgcactcacagctgtttgtaaccatatctcctcggtacgtgctgtggctgtgtggggcattggcaccccaggtggccctcaggatcctcagccaggcctgactgcccatgtggtgtctgcgggggggcgggctgagatgcactgcttcagcatcatggttactccggaccccagcaccccaagccgcctcgcctgccatgtcatgcacctttcgtcccaccggctagatgagtattgggaccggcaacgcaatcggcatcggatggttaaggtagacccagagaccaggtacatgtcccttgctgtgtgtgaacttgaccagcccggccttggcccccttgtggctgcagcctgtagtgatggggccgtaaggctctttcttttgcaggattctgggcggattctgcagctccttgctgaaaccttccaccataagcgatgtgtcctcaaggtccactcctttacacacgaggcacccaaccagaggcggctgtcttttc

SEQ ID NO: 4350 - protein, 318 aa, Homo sapiens
MNWLAGLRIVPDGSMVILGFHANEFVVWNPRSHEKLHIVNCGGGHRSWAFSDTEAAMAFAYLKDGDVMLYRALGGCTRPHVILREGLHGREITCVKRVGTITLGPEYGVPSFMQPDDLEPGSEGPDLTDIVITCSEDTTVCVLALPTTTGSAHALTAVCNHISSVRAVAVWGIGTPGGPQDPQPGLTAHVVSAGGRAEMHCFSIMVTPDPSTPSRLACHVMHLSSHRLDEYWDRQRNRHRMVKVDPETRYMSLAVCELDQPGLGPLVAAACSDGAVRLFLLQDSGRILQLLAETFHHKRCVLKVHSFTHEAPNQRRLS

SEQ ID NO: 4351 - DNA, 2286 bp, Homo sapiens
gtataccacagggcgtgatggagcctactaccagctgtttgtacgagacggccagctccagccagtcctaaggcagaagtcctgtcgaggcatgaactggctagctgggctccgtatagtgcccgatgggagcatggttatcctgggtttccatgccaatgagtttgtggtgtggaaccctcggtcacacgagaagctgcacatcgtcaactgtggtggagggcaccgttcgtgggcattctctgatactgaggcggccatggcctttgcttacctcaaggatggggatgtcatgctgtacagggctctgggtggctgcacccggccacacgtgattctccgggagggtctgcatggccgtgagatcacttgtgtaaagcgtgtgggcaccattaccctggggcctgaatatggagtgcccagcttcatgcagcctgatgacctggagcctggcagtgaggggcccgacttgactgacattgtgatcacatgtagtgaggacactactgtctgtgtcctagcactccctacaaccacaggctcagcccacgcactcacagctgtttgtaaccatatctcctcggtacgtgctgtggctgtgtggggcattggcaccccaggtggccctcaggatcctcagccaggcctgactgcccatgtggtgtctgcgggggggcgggctgagatgcactgcttcagcatcatggttactccggaccccagcaccccaagccgcctcgcctgccatgtcatgcacctttcgtcccaccggctagatgagtattgggaccggcaacgcaatcggcatcggatggttaaggtagacccagagaccaggtacatgtcccttgctgtgtgtgaacttgaccagcccggccttggcccccttgtggctgcagcctgtagtgatggggccgtaaggctctttcttttgcaggattctgggcggattctgcagctccttgctgaaaccttccaccataagcgatgtgtcctcaaggtccactcctttacacacgaggcacccaaccagaggcggaggctcctcctgtgcagcgcagctactgatggcagcctggctttctgggatctcaccaccatgctagaccatgactccactgtcctggagcctccagtggatcctgggcttccctaccggcttggcaccccctccctgactctccaggcccacagctgtggtatcaacagcctgcacaccttgcccacccgtgagggccaccatctcgtggccagtggcagtgaagatggatccctccatgtcttcgtgcttgctgtggagatgctacagctagaagaggctgtgggagaggctgggctggtaccccagctgcgtgtgctagaggaatactctgtcccctgtgcacatgctgcccatgtgacaggcctcaagatcctaagcccaagcatcatggtctcagcctccattgatcaacggctgaccttctggcgtctggggcatggtgaacccaccttcatgaatagcactgtgttccatgtgcctgatgtggctgacatggactgctggcctgtgagccctgagtttggccaccgttgtgcccttgggggtcaggggcttgaggtttacaactggtatgactgaggtatcctgcggtggctggcgtgctgggcatggggcctgctcacagacagcatggagcagggatgggctgtctgtgcccatgctcagcatgccttgaggggaggaggtggtggccgtgggttcctgatgtcggtgcaggagctgaaggtgagtggagtgctgccaagaatatgcccgactccccatgacaagacagaactttgtaacaaacagtaccaatttattttggccgtgggtttttgctttttttccagttgatgactttgtgaacattcccaggtattggagcctctgtggccttaaatgtggctcagtggagggagacccagcatagccaggccagtatggagcacctcacgcacagctctcagaagctgcaggcggacgaacatctgaccaaagaggtgtggtcgaggctcctgaaagagaaagggcctgctggtctcatcctctgcttcctttgcctttaccctatacctctctgcacgtcccaccccattttgctgtgtgctcacccccaggatgtgtacccggttgtagtaggagctgaaatccatgctgagctgtaccaggaacttgcatatctagagacagagactgagtcactggcccatctctttgctcttgtgccccaggccagaataaagaatagagtgtagagtgtc

SEQ ID NO: 4352 - protein, 509 aa, Homo sapiens [sequence omitted]

SEQ ID NO: 4353 - DNA, 3399 bp, Homo sapiens
gtataccacagggcgtgatggagcctactaccagctgtttgtacgagacggccagctccagccagtcctaaggcagaagtcctgtcgaggcatgaactggctagctgggctccgtatagtgcccgatgggagcatggttatcctgggtttccatgccaatgagtttgtggtgtggaaccctcggtcacacgagaagctgcacatcgtcaactgtggtggagggcaccgttcgtgggcattctctgatactgaggcggccatggcctttgcttacctcaaggatggggatgtcatgctgtacagggctctgggtggctgcacccggccacacgtgattctccgggagggtctgcatggccgtgagatcacttgtgtaaagcgtgtgggcaccattaccctggggcctgaatatggagtgcccagcttcatgcagcctgatgacctggagcctggcagtgaggggcccgacttgactgacattgtgatcacatgtagtgaggacactactgtctgtgtcctagcactccctacaaccacaggctcagcccacgcactcacagctgtttgtaaccatatctcctcggtacgtgctgtggctgtgtggggcattggcaccccaggtggccctcaggatcctcagccaggcctgactgcccatgtggtgtctgcgggggggcgggctgagatgcactgcttcagcatcatggttactccggaccccagcaccccaagccgcctcgcctgccatgtcatgcacctttcgtcccaccggctagatgagtattgggaccggcaacgcaatcggcatcggatggttaaggtagacccagagaccaggtacatgtcccttgctgtgtgtgaacttgaccagcccggccttggcccccttgtggctgcagcctgtagtgatggggccgtaaggctctttcttttgcaggattctgggcggattctgcagctccttgctgaaaccttccaccataagcgatgtgtcctcaaggtccactcctttacacacgaggcacccaaccagaggcggaggctcctcctgtgcagcgcagctactgatggcagcctggctttctgggatctcaccaccatgctagaccatgactccactgtcctggagcctccagtggatcctgggcttccctaccggcttggcaccccctccctgactctccaggcccacagctgtggtatcaacagcctgcacaccttgcccacccgtgagggccaccatctcgtggccagtggcagtgaagatggatccctccatgtcttcgtgcttgctgtggagatgctacagctagaagaggctgtgggagaggctgggctggtaccccagctgcgtgtgctagaggaatactctgtcccctgtgcacatgctgcccatgtgacaggcctcaagatcctaagcccaagcatcatggtctcagcctccattgatcaacggctgaccttctggcgtctggggcatggtgaacccaccttcatgaatagcactgtgttccatgtgcctgatgtggctgacatggactgctggcctgtgagccctgagtttggccaccgttgtgcccttgggggtcaggggcttgaggtttacaactggtatgactgaggtatcctgcggtggctggcgtgctgggcatggggcctgctcacagacagcatggagcagggatgggctgtctgtgcccatgctcagcatgccttgaggggaggaggtggtggccgtgggttcctgatgtcggtgcaggagctgaaggtgagtggagtgctgccaagaatatgcccgactccccatgacaagacagaactttgtaacaaacagtaccaatttattttggccgtgggtttttgctttttttccagttgatgactttgtgaacattcccaggtattggagcctctgtggccttaaatgtggctcagtggagggagacccagcatagccaggccagtatggagcacctcacgcacagctctcagaagctgcaggcggacgaacatctgaccaaagaggtgtggtcgaggctcctgaaagagaaagggcctgctggtctcatcctctgcttcctttgcctttaccctatacctctctgcacgtcccaccccattttgctgtgtgctcacccccaggatgtgtacccggttgtagtaggagctgaaatccatgctgagctgtaccaggaacttgcatatctagagacagagactgagtcactggcccatctctttgctcttgtgccccaggccagaataaagaatagagtgtagagtgtcctggttgtctatgcctcaccatctctgtgcgtacagcaatgtggagccccggggctgtgcagtccagcactgctgtccggctcagcagatccggaaaggggaggatactgttgaagagcaacaaccactcaccctgttggggagaaaggtgctgggaggggaagtccaggcctccttgtgccagctaccaggagggacactcacctcatcatgtagcagtgagaagtccagactgctcacaggaggaaaagtggggtacagaccttgttccatactacacttgtaactctcaaagagtgtggcaagacgggcacaattatacatgacaaaggtgccactctttgtgcccttcgtggagatactgctgtcagccagagccaggaagagctggggaatagaagcacagctgcagagagagaaggcagccaccacaccctgtgccccaacactggccctgtcaggctcccaggctcacctgactctgtggggctgtgctcagcatctcaaacttgatggtggccacagagagaacaccaaagatctctgtccaggctgggtctgagggagtatagggttggtcagtcagtctgcaggcaagggcagggatgcaaaaaacctgcccctaacccagaacatagccagggtttcccaggcacaccttgtgccagatccccaccatgcttcagtgctgaggccttgcacacctgggtatgccggaacctgtgtttggaagagaggaaggccagtgggcagggtcctgggtaaagagtcccccctcattaccctggcttaggttggtgttcctcccagcctcactcactcgtagtactcaggggcagtcatcagagtgccaggtgcaccagctactttcacagggccacagatgaggtgcttctgtcagaaagatgtcaggggctcagcctagttggcgctactctccaggaagtcccttgaggagcccaaatctggtgcctctactcagcccagactccctcaaattggaactgccaggttgagtgcctccgtctacccagccactcaggctacgcatggttcatccttctcaacctggtcttcagtgttcttgggatgtgtctacagaccccccttccc

SEQ ID NO: 4354 - protein, 509 aa, Homo sapiens [sequence omitted]

SEQ ID NO: 4355 - DNA, 1602 bp, Homo sapiens
gcctgatgacctggagcctggcagtgaggggcccgacttgactgacattgtgatcacatgtagtgaggacactactgtctgtgtcctagcactccctacaaccacaggctcagcccacgcactcacagctgtttgtaaccatatctcctcggtacgtgctgtggctgtgtggggcattggcaccccaggtggccctcaggatcctcagccaggcctgactgcccatgtggtgtctgcgggggggcgggctgagatgcactgcttcagcatcatggttactccggaccccagcaccccaagccgcctcgcctgccatgtcatgcacctttcgtcccaccggctagatgagtattgggaccggcaacgcaatcggcatcggatggttaaggtagacccagagaccaggtaatatatgctcctgggcagggtgtggtatgggtcatgcagatgctcccaggcttgcaggctccacctgacagctgcatgttgtctctgcaggtacatgtcccttgctgtgtgtgaacttgaccagcccggccttggcccccttgtggctgcagcctgtagtgatggggccgtaaggctctttcttttgcaggattctgggcggattctgcagctccttgctgaaaccttccaccataagcgatgtgtcctcaaggtccactcctttacacacgaggcacccaaccagaggcggaggctcctcctgtgcagcgcagctactgatggcagcctggctttctgggatctcacctccattgatcaacggctgaccttctggcgtctggggcatggtgaacccaccttcatgaatagcactgtgttccatgtgcctgatgtggctgacatggactgctggcctgtgagccctgagtttggccaccgttgtgcccttgggggtcaggggcttgaggtttacaactggtatgactgaggtatcctgcggtggctggcgtgctgggcatggggcctgctcacagacagcatggagcagggatgggctgtctgtgcccatgctcagcatgccttgaggggaggaggtggtggccgtgggttcctgatgtcggtgcaggagctgaaggtgagtggagtgctgccaagaatatgcccgactccccatgacaagacagaactttgtaacaaacagtaccaatttattttggccgtgggtttttgctttttttccagttgatgactttgtgaacattcccaggtattggagcctctgtggccttaaatgtggctcagtggagggagacccagcatagccaggccagtatggagcacctcacgcacagctctcagaagctgcaggcggacgaacatctgaccaaagaggtgtggtcgaggctcctgaaagagaaagggcctgctggtctcatcctctgcttcctttgcctttaccctatacctctctgcacgtcccaccccattttgctgtgtgctcacccccaggatgtgtacccggttgtagtaggagctgaaatccatgctgagctgtaccaggaacttgcatatctagagacagagactgagtcactggcccatctctttgctcttgtgccccaggccagaataaagaatagagtgtagagtgtc

SEQ ID NO: 4356 - protein, 174 aa, Homo sapiens
MLLGRVWYGSCRCSQACRLHLTAACCLCRYMSLAVCELDQPGLGPLVAAACSDGAVRLFLLQDSGRILQLLAETFHHKRCVLKVHSFTHEAPNQRRRLLLCSAATDGSLAFWDLTSIDQRLTFWRLGHGEPTFMNSTVFHVPDVADMDCWPVSPEFGHRCALGGQGLEVYNWYD

SEQ ID NO: 4357 - DNA, 2715 bp, Homo sapiens
gcctgatgacctggagcctggcagtgaggggcccgacttgactgacattgtgatcacatgtagtgaggacactactgtctgtgtcctagcactccctacaaccacaggctcagcccacgcactcacagctgtttgtaaccatatctcctcggtacgtgctgtggctgtgtggggcattggcaccccaggtggccctcaggatcctcagccaggcctgactgcccatgtggtgtctgcgggggggcgggctgagatgcactgcttcagcatcatggttactccggaccccagcaccccaagccgcctcgcctgccatgtcatgcacctttcgtcccaccggctagatgagtattgggaccggcaacgcaatcggcatcggatggttaaggtagacccagagaccaggtaatatatgctcctgggcagggtgtggtatgggtcatgcagatgctcccaggcttgcaggctccacctgacagctgcatgttgtctctgcaggtacatgtcccttgctgtgtgtgaacttgaccagcccggccttggcccccttgtggctgcagcctgtagtgatggggccgtaaggctctttcttttgcaggattctgggcggattctgcagctccttgctgaaaccttccaccataagcgatgtgtcctcaaggtccactcctttacacacgaggcacccaaccagaggcggaggctcctcctgtgcagcgcagctactgatggcagcctggctttctgggatctcacctccattgatcaacggctgaccttctggcgtctggggcatggtgaacccaccttcatgaatagcactgtgttccatgtgcctgatgtggctgacatggactgctggcctgtgagccctgagtttggccaccgttgtgcccttgggggtcaggggcttgaggtttacaactggtatgactgaggtatcctgcggtggctggcgtgctgggcatggggcctgctcacagacagcatggagcagggatgggctgtctgtgcccatgctcagcatgccttgaggggaggaggtggtggccgtgggttcctgatgtcggtgcaggagctgaaggtgagtggagtgctgccaagaatatgcccgactccccatgacaagacagaactttgtaacaaacagtaccaatttattttggccgtgggtttttgctttttttccagttgatgactttgtgaacattcccaggtattggagcctctgtggccttaaatgtggctcagtggagggagacccagcatagccaggccagtatggagcacctcacgcacagctctcagaagctgcaggcggacgaacatctgaccaaagaggtgtggtcgaggctcctgaaagagaaagggcctgctggtctcatcctctgcttcctttgcctttaccctatacctctctgcacgtcccaccccattttgctgtgtgctcacccccaggatgtgtacccggttgtagtaggagctgaaatccatgctgagctgtaccaggaacttgcatatctagagacagagactgagtcactggcccatctctttgctcttgtgccccaggccagaataaagaatagagtgtagagtgtcctggttgtctatgcctcaccatctctgtgcgtacagcaatgtggagccccggggctgtgcagtccagcactgctgtccggctcagcagatccggaaaggggaggatactgttgaagagcaacaaccactcaccctgttggggagaaaggtgctgggaggggaagtccaggcctccttgtgccagctaccaggagggacactcacctcatcatgtagcagtgagaagtccagactgctcacaggaggaaaagtggggtacagaccttgttccatactacacttgtaactctcaaagagtgtggcaagacgggcacaattatacatgacaaaggtgccactctttgtgcccttcgtggagatactgctgtcagccagagccaggaagagctggggaatagaagcacagctgcagagagagaaggcagccaccacaccctgtgccccaacactggccctgtcaggctcccaggctcacctgactctgtggggctgtgctcagcatctcaaacttgatggtggccacagagagaacaccaaagatctctgtccaggctgggtctgagggagtatagggttggtcagtcagtctgcaggcaagggcagggatgcaaaaaacctgcccctaacccagaacatagccagggtttcccaggcacaccttgtgccagatccccaccatgcttcagtgctgaggccttgcacacctgggtatgccggaacctgtgtttggaagagaggaaggccagtgggcagggtcctgggtaaagagtcccccctcattaccctggcttaggttggtgttcctcccagcctcactcactcgtagtactcaggggcagtcatcagagtgccaggtgcaccagctactttcacagggccacagatgaggtgcttctgtcagaaagatgtcaggggctcagcctagttggcgctactctccaggaagtcccttgaggagcccaaatctggtgcctctactcagcccagactccctcaaattggaactgccaggttgagtgcctccgtctacccagccactcaggctacgcatggttcatccttctcaacctggtcttcagtgttcttgggatgtgtctacagaccccccttccc

SEQ ID NO: 4358 - protein, 174 aa, Homo sapiens; identical to SEQ ID NO: 4356

SEQ ID NO: 4359 - DNA, 2628 bp, Homo sapiens
gctagatgagtattgggaccggcaacgcaatcggcatcggatggttaaggtagacccagagaccaggtacatgtcccttgctgtgtgtgaacttgaccagcccggccttggcccccttgtggctgcagcctgtagtgatggggccgtaaggctctttcttttgcaggattctgggcggattctgcagctccttgctgaaaccttccaccataagcgatgtgtcctcaaggtccactcctttacacacgaggcacccaaccagaggcggaggctcctcctgtgcagcgcagctactgatggcagcctggctttctgggatctcaccaccatgctagaccatgactccactgtcctggagcctccagtggatcctgggcttccctaccggcttggcaccccctccctgactctccaggcccacagctgtggtatcaacagcctgcacaccttgcccacccgtgagggccaccatctcgtggccagtggcagtgaagatggatccctccatgtcttcgtgcttgctgtggagatgctacagctagaagaggctgtgggagaggctgggctggtaccccagctgcgtgtgctagaggaatactctgtcccctgtgcacatgctgcccatgtgacaggcctcaagatcctaagcccaagcatcatggtctcagcctccattgatcaacggctgaccttctggcgtctggggcatggtgaacccaccttcatgaatagcactgtgttccatgtgcctgatgtggctgacatggactgctggcctgtgagccctgagtttggccaccgttgtgcccttgggggtcaggggcttgaggtttacaactggtatgactgaggtatcctgcggtggctggcgtgctgggcatggggcctgctcacagacagcatggagcagggatgggctgtctgtgcccatgctcagcatgccttgaggggaggaggtggtggccgtgggttcctgatgtcggtgcaggagctgaaggtgagtggagtgctgccaagaatatgcccgactccccatgacaagacagaactttgtaacaaacagtaccaatttattttggccgtgggtttttgctttttttccagttgatgactttgtgaacattcccaggtattggagcctctgtggccttaaatgtggctcagtggagggagacccagcatagccaggccagtatggagcacctcacgcacagctctcagaagctgcaggcggacgaacatctgaccaaagaggtgtggtcgaggctcctgaaagagaaagggcctgctggtctcatcctctgcttcctttgcctttaccctatacctctctgcacgtcccaccccattttgctgtgtgctcacccccaggatgtgtacccggttgtagtaggagctgaaatccatgctgagctgtaccaggaacttgcatatctagagacagagactgagtcactggcccatctctttgctcttgtgccccaggccagaataaagaatagagtgtagagtgtcctggttgtctatgcctcaccatctctgtgcgtacagcaatgtggagccccggggctgtgcagtccagcactgctgtccggctcagcagatccggaaaggggaggatactgttgaagagcaacaaccactcaccctgttggggagaaaggtgctgggaggggaagtccaggcctccttgtgccagctaccaggagggacactcacctcatcatgtagcagtgagaagtccagactgctcacaggaggaaaagtggggtacagaccttgttccatactacacttgtaactctcaaagagtgtggcaagacgggcacaattatacatgacaaaggtgccactctttgtgcccttcgtggagatactgctgtcagccagagccaggaagagctggggaatagaagcacagctgcagagagagaaggcagccaccacaccctgtgccccaacactggccctgtcaggctcccaggctcacctgactctgtggggctgtgctcagcatctcaaacttgatggtggccacagagagaacaccaaagatctctgtccaggctgggtctgagggagtatagggttggtcagtcagtctgcaggcaagggcagggatgcaaaaaacctgcccctaacccagaacatagccagggtttcccaggcacaccttgtgccagatccccaccatgcttcagtgctgaggccttgcacacctgggtatgccggaacctgtgtttggaagagaggaaggccagtgggcagggtcctgggtaaagagtcccccctcattaccctggcttaggttggtgttcctcccagcctcactcactcgtagtactcaggggcagtcatcagagtgccaggtgcaccagctactttcacagggccacagatgaggtgcttctgtcagaaagatgtcaggggctcagcctagttggcgctactctccaggaagtcccttgaggagcccaaatctggtgcctctactcagcccagactccctcaaattggaactgccaggttgagtgcctccgtctacccagccactcaggctacgcatggttcatccttctcaacctggtcttcagtgttcttgggatgtgtctacagaccccccttccc

SEQ ID NO: 4360 - protein, 269 aa, Homo sapiens
MVKVDPETRYMSLAVCELDQPGLGPLVAAACSDGAVRLFLLQDSGRILQLLAETFHHKRCVLKVHSFTHEAPNQRRRLLLCSAATDGSLAFWDLTTMLDHDSTVLEPPVDPGLPYRLGTPSLTLQAHSCGINSLHTLPTREGHHLVASGSEDGSLHVFVLAVEMLQLEEAVGEAGLVPQLRVLEEYSVPCAHAAHVTGLKILSPSIMVSASIDQRLTFWRLGHGEPTFMNSTVFHVPDVADMDCWPVSPEFGHRCALGGQGLEVYNWYD

SEQ ID NO: 4361 - DNA, 1614 bp, Homo sapiens
acaccaacctaagccagggtaatgaggggggactctttacccaggaccctgcccactggccttcctctcttccaaacacaggttccggcatacccaggtgtgcaaggcctcagcactgaagcatggtggggatctggcacaagacccagcctggacagagatctttggtgttctctctgtggccaccatcaagtttgagatgctgagcacagccccacagagtcagctcttcctggctctggctgacagcagtatctccacgaagggcacaaagagtggcacctttgtcatgtataattgtgcccgtcttgccacactctttgagagttacaagtgtagtatggaacaaggtctgtaccccacttttcctcctgtgagcagtctggacttctcactgctacatgatgaggtgagtgtccctcctggtagctggcacaaggaggcctggacttcccctcccagcacctttctccccaacagggtgagtggttgttgctcttcaacagtatcctcccctttccggatctgctgagccggacagcagtgctggactgcacagccccggggctccacattgctgtacgcacagagatggtgaggcatagacaaccaggacactctacactctattctttattctggcctggggcacaagagcaaagagatgggccagtgactcagtctctgtctctagatatgcaagttcctggtacagctcagcatggatttcagctcctactacaaccgggtacacatcctgggggagcctcgaccacacctctttggtcagatgttcgtccgcctgcagcttctgagagctgtgcgtgaggtgctccatactggcctggctatgctgggtctccctccactgagccacatttaaggccacagaggctccaatacctgggaatgttcacaaagtcatcaactggaaaaaaagcaaaaacccacggccaaaataaattggtactgtttgttacaaagttctgtcttgtcatggggagtcgggcatattcttggcagcactccactcaccttcagctcctgcaccgacatcaggaacccacggccaccacctcctcccctcaaggcatgctgagcatgggcacagacagcccatccctgctccatgctgtctgtgagcaggccccatgcccagcacgccagccaccgcaggatacctcagtcataccagttgtaaacctcaagcccctgacccccaagggcacaacggtggccaaactcagggctcacaggccagcagtccatgtcagccacatcaggcacatggaacacagtgctattcatgaaggtgggttcaccatgccccagacgccagaaggtcagccgttgatcaatggaggctgagaccatgatgcttgggcttaggatcttgaggcctgtcacatgggcagcatgtgcacaggggacagagtattcctctagcacacgcagctggggtaccagcccagcctctcccacagcctcttctagctgtagcatctccacagcaagcacgaagacatggagggatccatcttcactgccactggccacgagatggtggccctcacgggtgggcaaggtgtgcaggctgttgataccacagctgtg

SEQ ID NO: 4362 - protein, 110 aa, Homo sapiens [sequence omitted]

SEQ ID NO: 4363 - DNA, 3621 bp, Homo sapiens
cttccggtcaccatggcgaccaggcgccttggggtcggggagacgctgggggccctcaacgcggccctggggccaggcggtccggtgtggatcaaggagacgcgcacccgccacctgcgttcccgagactttctggcaccgcaccgcgcgctgcaggcgcgcttcgatgacggccaggtgggcgtgagccgggcggggccgtgcggccgggagatgggccccgtgccgtggctcttttacacgcccgttctcccgcaggttccggagcatttgctccatgccctcgcctgcctgcagggccccggtgtggccccggtgctgcgctgcgcgccgacccccgcgggtctgtctctccaactgcagcggtccgccgtcttcgagcgcgtcctcagcgccgtggccgcctatgccacgcccgcctcgcctgcctcgctgggccagcgcgtcttactacactgcccagcactgcgcagctccccctgcgcactccgcttgagccagctgcgtacggtgctcgtggccgatcacctggcgcgagccctgcgcgctcacgggtgagcggggccgcggggccggaatggagaaagtgggactgccgggtacctagaaagcgagcggcgccgcccgtggggactgcggctggaggtgggaagtcgtggcgagctggaccaggtgctcagactgaggcggccgccctcccttcgcagggtgtgcgtgcgcctagtgccagctgtgcgggatccgcacatgctgaccttcctgcagcaactgcgggtggactggcccgctgcctcggagagagcttcctcccacaccctgaggagccacgcccttgaagaacttacctctgctaatgacgggaggacactgtcccctggcatcctaggcagactgtgtctgaaggagctggtggaagaacagggccgcacagctggctatgaccccaacctggacaactgtctggtgactgaggatctcctctctgtgctggctgagctgcaagaggctctatggcattggcccgaggacagccacccaggcctggttagtgactcccagccctgtaggttctcccaaaccaagtatactgtacttccacagttatgattgtcctcccttaggctggggcctcagatactggtacaggcggctgcctggttgtacatgttgttagctgtgaggaggagttccagcaacagaagttggacctgctttggcagaagttggttgacaaggctccactcagacaggtaggttaataatgatggtggagctccccaccacctaacccccaacctcagagggcccttgaaaacccaccgaggggcttgttagctgacagaaaccaacacttgaccttgggggagttgctggacttgagagggcatgtacagcaggtgcagaggctctggggaaggggggtctgtagacacatcccaagaacactgaagaccaggttgagaaggatgaaccatgcgtagcctgagtggctgggtagacggaggcactcaacctggcagttccaatttgagggagtctgggctgagtagaggcaccagatttgggctcctcaagggacttcctggagagtagcgccaactaggctgagcccctgacatctttctgacagaagcacctcatctgtggccctgtgaaagtagctggtgcacctggcactctgatgactgcccctgagtactacgagtgagtgaggctgggaggaacaccaacctaagccagggtaatgaggggggactctttacccaggaccctgcccactggccttcctctcttccaaacacaggttccggcatacccaggtgtgcaaggcctcagcactgaagcatggtggggatctggcacaaggtgtgcctgggaaaccctggctatgttctgggttaggggcaggttttttgcatccctgcccttgcctgcagactgactgaccaaccctatactccctcagacccagcctggacagagatctttggtgttctctctgtggccaccatcaagtttgagatgctgagcacagccccacagagtcaggtgagcctgggagcctgacagggccagtgttggggcacagggtgtggtggctgccttctctctctgcagctgtgcttctattccccagctcttcctggctctggctgacagcagtatctccacgaagggcacaaagagtggcacctttgtcatgtataattgtgcccgtcttgccacactctttgagagttacaagtgtagtatggaacaaggtctgtaccccacttttcctcctgtgagcagtctggacttctcactgctacatgatgaggtgagtgtccctcctggtagctggcacaaggaggcctggacttcccctcccagcacctttctccccaacagggtgagtggttgttgctcttcaacagtatcctcccctttccggatctgctgagccggacagcagtgctggactgcacagccccggggctccacattgctgtacgcacagagatggtgaggcatagacaaccaggacactctacactctattctttattctggcctggggcacaagagcaaagagatgggccagtgactcagtctctgtctctagatatgcaagttcctggtacagctcagcatggatttcagctcctactacaaccgggtacacatcctgggggtgagcacacagcaaaatggggtgggacgtgcagagaggtatagggtaaaggcaaaggaagcagaggatgagaccagcaggccctttctctttcaggagcctcgaccacacctctttggtcagatgttcgtccgcctgcagcttctgagagctgtgcgtgaggtgctccatactggcctggctatgctgggtctccctccactgagccacatttaaggccacagaggctccaatacctgggaatgttcacaaagtcatcaactggaaaaaaagcaaaaacccacggccaaaataaattggtactgtttgttacaaagttctgtcttgtcatggggagtcgggcatattcttggcagcactccactcaccttcagctcctgcaccgacatcaggaacccacggccaccacctcctcccctcaaggcatgctgagcatgggcacagacagcccatccctgctccatgctgtctgtgagcaggccccatgcccagcacgccagccaccgcaggatacctcagtcataccagttgtaaacctcaagcccctgacccccaagggcacaacggtggccaaactcagggctcacaggccagcagtccatgtcagccacatcaggcacatggaacacagtgctattcatgaaggtgggttcaccatgccccagacgccagaaggtcagccgttgatcaatggaggctgagaccatgatgcttgggcttaggatcttgaggcctgtcacatgggcagcatgtgcacaggggacagagtattcctctagcacacgcagctggggtaccagcccagcctctcccacagcctcttctagctgtagcatctccacagcaagcacgaagacatggagggatccatcttcactgccactggccacgagatggtggccctcacgggtgggcaaggtgtgcaggctgttgataccacagctgtg

SEQ ID NO: 4364 - protein, 119 aa, Homo sapiens [sequence omitted]

SEQ ID NO: 4365 - DNA, 2244 bp, Homo sapiens
gattccgaagcccgccccaccaccgtcaccgcaccagtggcccaggcttcgtgggaccaacagggctaatcctgccccacggatctaatccggatcgggacccggtcccaggggaggcccccacctccccttctattgttctgtggcccagcggtccgccgtcttcgagcgcgtcctcagcgccgtggccgcctatgccacgcccgcctcgcctgcctcgctgggccagcgcgtcttactacactgcccagcactgcgcagctccccctgcgcactccgcttgagccagctgcgtacggtgctcgtggccgatcacctggcgcgagccctgcgcgctcacggggtgtgcgtgcgcctagtgccagctgtgcgggatccgcacatgctgaccttcctgcagcaactgcgggtggactggcccgctgcctcggagagagcttcctcccacaccctgaggagccacgcccttgaagaacttacctctgctaatgacgggaggacactgtcccctggcatcctaggcagactgtgtctgaaggagctggtggaagaacagggccgcacagctggctatgaccccaacctggacaactgtctggtgactgaggatctcctctctgtgctggctgagctgcaagaggctctatggcattggcccgaggacagccacccaggcctggctggggcctcagatactggtacaggcggctgcctggttgtacatgttgttagctgtgaggaggagttccagcaacagaagttggacctgctttggcagaagttggttgacaaggctccactcagacagaagcacctcatctgtggccctgtgaaagtagctggtgcacctggcactctgatgactgcccctgagtactacgagttccggcatacccaggtgtgcaaggcctcagcactgaagcatggtggggatctggcacaagacccagcctggacagagatctttggtgttctctctgtggccaccatcaagtttgagatgctgagcacagccccacagagtcagctcttcctggctctggctgacagcagtatctccacgaagggcacaaagagtggcacctttgtcatgtataattgtgcccgtcttgccacactctttgagagttacaagtgtagtatggaacaaggtctgtaccccacttttcctcctgtgagcagtctggacttctcactgctacatgatgagggtgagtggttgttgctcttcaacagtatcctcccctttccggatctgctgagccggacagcagtgctggactgcacagccccggggctccacattgctgtacgcacagagatgatatgcaagttcctggtacagctcagcatggatttcagctcctactacaaccgggtacacatcctgggggagcctcgaccacacctctttggtcagatgttcgtccgcctgcagcttctgagagctgtgcgtgaggtgctccatactggcctggctatgctgggtctccctccactgagccacatttaaggccacagaggctccaatacctgggaatgttcacaaagtcatcaactggaaaaaaagcaaaaacccacggccaaaataaattggtactgtttgttacaaagttctgtcttgtcatggggagtcgggcatattcttggcagcactccactcaccttcagctcctgcaccgacatcaggaacccacggccaccacctcctcccctcaaggcatgctgagcatgggcacagacagcccatccctgctccatgctgtctgtgagcaggccccatgcccagcacgccagccaccgcaggatacctcagtcataccagttgtaaacctcaagcccctgacccccaagggcacaacggtggccaaactcagggctcacaggccagcagtccatgtcagccacatcaggcacatggaacacagtgctattcatgaaggtgggttcaccatgccccagacgccagaaggtcagccgttgatcaatggaggctgagaccatgatgcttgggcttaggatcttgaggcctgtcacatgggcagcatgtgcacaggggacagagtattcctctagcacacgcagctggggtaccagcccagcctctcccacagcctcttctagctgtagcatctccacagcaagcacgaagacatggagggatccatcttcactgccactggccacgagatggtggccctcacgggtgggcaaggtgtgcaggctgttgataccacagctgtg

SEQ ID NO: 4366 - protein, 376 aa, Homo sapiens; identical to SEQ ID NO: 417

SEQ ID NO: 4367 - DNA, 2845 bp, Homo sapiens
gggcaagctgtgatagtgtttgggtggctgttcggctggcccagaccaggccgaaccggaccagacttgaagtagaagcgcgtggagcatcaccttgtcctcgttcactctgctcgcgtcctgggagtcccccgtcccccgtcttgatccaagtcaagggcctactggcgcgagagtcgctggcccccgcgcggggtttgggcatctcggcacgccggctctgtcgtggcctcaggggaacattgtcgctttcgctacccgcggggccgggcgagcgggaagctcggcacagtgggagcctggtggtgggtctcctggggccggtcgcaatgggtttccgggggtcccgcggctgctctgtggaccccttcggcccctggtgctccgggcgctggcagcgtcaccggacaaaggccaccgagcgcgggggtgtccccgaggtggacgcgcgggtttacttcctctccggccccacgggcgcgcttccctcctgacggattccgaagcccgccccaccaccgtcaccgcaccagtggcccaggcttcgtgggaccaacagggctaatcctgccccacggatctaatccggatcgggacccggtcccaggggaggcccccacctccccttctattgttctgtggcccaggttccggagcatttgctccatgccctcgcctgcctgcagggccccggtgtggccccggtgctgcgctgcgcgccgacccccgcgggtctgtctctccaactgcagcggtccgccgtcttcgagcgcgtcctcagcgccgtggccgcctatgccacgcccgcctcgcctgcctcgctgggccagcgcgtcttactacactgcccagcactgcgcagctccccctgcgcactccgcttgagccagctgcgtacggtgctcgtggccgatcacctggcgcgagccctgcgcgctcacggggtgtgcgtgcgcctagtgccagctgtgcgggatccgcacatgctgaccttcctgcagcaactgcgggtggactggcccgctgcctcggagagagcttcctcccacaccctgaggagccacgcccttgaagaacttacctctgctaatgacgggaggacactgtcccctggcatcctaggcagactgtgtctgaaggagctggtggaagaacagggccgcacagctggctatgaccccaacctggacaactgtctggtgactgaggatctcctctctgtgctggctgagctgcaagaggctctatggcattggcccgaggacagccacccaggcctggctggggcctcagatactggtacaggcggctgcctggttgtacatgttgttagctgtgaggaggagttccagcaacagaagttggacctgctttggcagaagttggttgacaaggctccactcagacagaagcacctcatctgtggccctgtgaaagtagctggtgcacctggcactctgatgactgcccctgagtactacgagttccggcatacccaggtgtgcaaggcctcagcactgaagcatggtggggatctggcacaagacccagcctggacagagatctttggtgttctctctgtggccaccatcaagtttgagatgctgagcacagccccacagagtcagctcttcctggctctggctgacagcagtatctccacgaagggcacaaagagtggcacctttgtcatgtataattgtgcccgtcttgccacactctttgagagttacaagtgtagtatggaacaaggtctgtaccccacttttcctcctgtgagcagtctggacttctcactgctacatgatgagggtgagtggttgttgctcttcaacagtatcctcccctttccggatctgctgagccggacagcagtgctggactgcacagccccggggctccacattgctgtacgcacagagatgatatgcaagttcctggtacagctcagcatggatttcagctcctactacaaccgggtacacatcctgggggagcctcgaccacacctctttggtcagatgttcgtccgcctgcagcttctgagagctgtgcgtgaggtgctccatactggcctggctatgctgggtctccctccactgagccacatttaaggccacagaggctccaatacctgggaatgttcacaaagtcatcaactggaaaaaaagcaaaaacccacggccaaaataaattggtactgtttgttacaaagttctgtcttgtcatggggagtcgggcatattcttggcagcactccactcaccttcagctcctgcaccgacatcaggaacccacggccaccacctcctcccctcaaggcatgctgagcatgggcacagacagcccatccctgctccatgctgtctgtgagcaggccccatgcccagcacgccagccaccgcaggatacctcagtcataccagttgtaaacctcaagcccctgacccccaagggcacaacggtggccaaactcagggctcacaggccagcagtccatgtcagccacatcaggcacatggaacacagtgctattcatgaaggtgggttcaccatgccccagacgccagaaggtcagccgttgatcaatggaggctgagaccatgatgcttgggcttaggatcttgaggcctgtcacatgggcagcatgtgcacaggggacagagtattcctctagcacacgcagctggggtaccagcccagcctctcccacagcctcttctagctgtagcatctccacagcaagcacgaagacatggagggatccatcttcactgccactggccacgagatggtggccctcacgggtgggcaaggtgtgcaggctgttgataccacagctgtg

SEQ ID NO: 4368 - protein, 376 aa, Homo sapiens; identical to SEQ ID NO: 417

SEQ ID NO: 4369 - DNA, 980 bp, Homo sapiens
acaccaacctaagccagggtaatgaggggggactctttacccaggaccctgcccactggccttcctctcttccaaacacaggttccggcatacccaggtgtgcaaggcctcagcactgaagcatggtggggatctggcacaagacccagcctggacagagatctttggtgttctctctgtggccaccatcaagtttgagatgctgagcacagccccacagagtcagctcttcctggctctggctgacagcagtatctccacgaagggcacaaagagtggcacctttgtcatgtataattgtgcccgtcttgccacactctttgagagttacaagtgtagtatggaacaaggtctgtaccccacttttcctcctgtgagcagtctggacttctcactgctacatgatgaggtgagtgtccctcctggtagctggcacaaggaggcctggacttcccctcccagcacctttctccccaacagggtgagtggttgttgctcttcaacagtatcctcccctttccggatctgctgagccggacagcagtgctggactgcacagccccggggctccacattgctgtacgcacagagatggtgaggcatagacaaccaggacactctacactctattctttattctggcctggggcacaagagcaaagagatgggccagtgactcagtctctgtctctagatatgcaagttcctggtacagctcagcatggatttcagctcctactacaaccgggtacacatcctgggggagcctcgaccacacctctttggtcagatgttcgtccgcctgcagcttctgagagctgtgcgtgaggtgctccatactggcctggctatgctgggtctccctccactgagccacatttaaggccacagaggctccaatacctgggaatgttcacaaagtcatcaactggaaaaaaagcaaaaacccacggccaaaataaattggtactgtttgttac

SEQ ID NO: 4370 - protein, 110 aa, Homo sapiens [sequence omitted]

SEQ ID NO: 4371 - DNA, 1883 bp, Homo sapiens
ccatggcgaccaggcgccttggggtcggggagacgctgggggccctcaacgcggccctggggccaggcggtccggtgtggatcaaggagacgcgcacccgccacctgcgttcccgagactttctggcaccgcaccgcgcgctgcaggcgcgcttcgatgacggccaggtgggcgtgagccgggcggggccgtgcggccgggagatgggccccgtgccgtggctcttttacacgcccgttctcccgcaggttccggagcatttgctccatgccctcgcctgcctgcagggccccggtgtggccccggtgctgcgctgcgcgccgacccccgcgggtctgtctctccaactgcagcggtccgccgtcttcgagcgcgtcctcagcgccgtggccgcctatgccacgcccgcctcgcctgcctcgctgggccagcgcgtcttactacactgcccagcactgcgcagctccccctgcgcactccgcttgagccagctgcgtacggtgctcgtggccgatcacctggcgcgagccctgcgcgctcacggggtgtgcgtgcgcctagtgccagctgtgcgggatccgcacatgctgaccttcctgcagcaactgcgggtggactggcccgctgcctcggagagagcttcctcccacaccctgaggagccacgcccttgaagaacttacctctgctaatgacgggaggacactgtcccctggcatcctaggcagactgtgtctgaaggagctggtggaagaacagggccgcacagctggctatgaccccaacctggacaactgtctggtgactgaggatctcctctctgtgctggctgagctgcaagaggctctatggcattggcccgaggacagccacccaggcctggctggggcctcagatactggtacaggcggctgcctggttgtacatgttgttagctgtgaggaggagttccagcaacagaagttggacctgctttggcagaagttggttgacaaggctccactcagacagaagcacctcatctgtggccctgtgaaagtagctggtgcacctggcactctgatgactgcccctgagtactacgagttccggcatacccaggtgtgcaaggcctcagcactgaagcatggtggggatctggcacaagacccagcctggacagagatctttggtgttctctctgtggccaccatcaagtttgagatgctgagcacagccccacagagtcagctcttcctggctctggctgacagcagtatctccacgaagggcacaaagagtggcacctttgtcatgtataattgtgcccgtcttgccacactctttgagagttacaagtgtagtatggaacaaggtctgtaccccacttttcctcctgtgagcagtctggacttctcactgctacatgatgaggtgagtgtccctcctggtagctggcacaaggaggcctggacttcccctcccagcacctttctccccaacagggtgagtggttgttgctcttcaacagtatcctcccctttccggatctgctgagccggacagcagtgctggactgcacagccccggggctccacattgctgtacgcacagagatgatatgcaagttcctggtacagctcagcatggatttcagctcctactacaaccgggtacacatcctgggggagcctcgaccacacctctttggtcagatgttcgtccgcctgcagcttctgagagctgtgcgtgaggtgctccatactggcctggctatgctgggtctccctccactgagccacatttaaggccacagaggctccaatacctgggaatgttcacaaagtcatcaactggaaaaaaagcaaaaacccacggccaaaataaattggtactgtttgttac

SEQ ID NO: 4372 - protein, 510 aa, Homo sapiens
MATRRLGVGETLGALNAALGPGGPVWIKETRTRHLRSRDFLAPHRALQARFDDGQVGVSRAGPCGREMGPVPWLFYTPVLPQVPEHLLHALACLQGPGVAPVLRCAPTPAGLSLQLQRSAVFERVLSAVAAYATPASPASLGQRVLLHCPALRSSPCALRLSQLRTVLVADHLARALRAHGVCVRLVPAVRDPHMLTFLQQLRVDWPAASERASSHTLRSHALEELTSANDGRTLSPGILGRLCLKELVEEQGRTAGYDPNLDNCLVTEDLLSVLAELQEALWHWPEDSHPGLAGASDTGTGGCLVVHVVSCEEEFQQQKLDLLWQKLVDKAPLRQKHLICGPVKVAGAPGTLMTAPEYYEFRHTQVCKASALKHGGDLAQDPAWTEIFGVLSVATIKFEMLSTAPQSQLFLALADSSISTKGTKSGTFVMYNCARLATLFESYKCSMEQGLYPTFPPVSSLDFSLLHDEVSVPPGSWHKEAWTSPPSTFLPNRVSGCCSSTVSSPFRIC

SEQ ID NO: 4373 - DNA, 2987 bp, Homo sapiens
cttccggtcaccatggcgaccaggcgccttggggtcggggagacgctgggggccctcaacgcggccctggggccaggcggtccggtgtggatcaaggagacgcgcacccgccacctgcgttcccgagactttctggcaccgcaccgcgcgctgcaggcgcgcttcgatgacggccaggtgggcgtgagccgggcggggccgtgcggccgggagatgggccccgtgccgtggctcttttacacgcccgttctcccgcaggttccggagcatttgctccatgccctcgcctgcctgcagggccccggtgtggccccggtgctgcgctgcgcgccgacccccgcgggtctgtctctccaactgcagcggtccgccgtcttcgagcgcgtcctcagcgccgtggccgcctatgccacgcccgcctcgcctgcctcgctgggccagcgcgtcttactacactgcccagcactgcgcagctccccctgcgcactccgcttgagccagctgcgtacggtgctcgtggccgatcacctggcgcgagccctgcgcgctcacgggtgagcggggccgcggggccggaatggagaaagtgggactgccgggtacctagaaagcgagcggcgccgcccgtggggactgcggctggaggtgggaagtcgtggcgagctggaccaggtgctcagactgaggcggccgccctcccttcgcagggtgtgcgtgcgcctagtgccagctgtgcgggatccgcacatgctgaccttcctgcagcaactgcgggtggactggcccgctgcctcggagagagcttcctcccacaccctgaggagccacgcccttgaagaacttacctctgctaatgacgggaggacactgtcccctggcatcctaggcagactgtgtctgaaggagctggtggaagaacagggccgcacagctggctatgaccccaacctggacaactgtctggtgactgaggatctcctctctgtgctggctgagctgcaagaggctctatggcattggcccgaggacagccacccaggcctggttagtgactcccagccctgtaggttctcccaaaccaagtatactgtacttccacagttatgattgtcctcccttaggctggggcctcagatactggtacaggcggctgcctggttgtacatgttgttagctgtgaggaggagttccagcaacagaagttggacctgctttggcagaagttggttgacaaggctccactcagacaggtaggttaataatgatggtggagctccccaccacctaacccccaacctcagagggcccttgaaaacccaccgaggggcttgttagctgacagaaaccaacacttgaccttgggggagttgctggacttgagagggcatgtacagcaggtgcagaggctctggggaaggggggtctgtagacacatcccaagaacactgaagaccaggttgagaaggatgaaccatgcgtagcctgagtggctgggtagacggaggcactcaacctggcagttccaatttgagggagtctgggctgagtagaggcaccagatttgggctcctcaagggacttcctggagagtagcgccaactaggctgagcccctgacatctttctgacagaagcacctcatctgtggccctgtgaaagtagctggtgcacctggcactctgatgactgcccctgagtactacgagtgagtgaggctgggaggaacaccaacctaagccagggtaatgaggggggactctttacccaggaccctgcccactggccttcctctcttccaaacacaggttccggcatacccaggtgtgcaaggcctcagcactgaagcatggtggggatctggcacaaggtgtgcctgggaaaccctggctatgttctgggttaggggcaggttttttgcatccctgcccttgcctgcagactgactgaccaaccctatactccctcagacccagcctggacagagatctttggtgttctctctgtggccaccatcaagtttgagatgctgagcacagccccacagagtcaggtgagcctgggagcctgacagggccagtgttggggcacagggtgtggtggctgccttctctctctgcagctgtgcttctattccccagctcttcctggctctggctgacagcagtatctccacgaagggcacaaagagtggcacctttgtcatgtataattgtgcccgtcttgccacactctttgagagttacaagtgtagtatggaacaaggtctgtaccccacttttcctcctgtgagcagtctggacttctcactgctacatgatgaggtgagtgtccctcctggtagctggcacaaggaggcctggacttcccctcccagcacctttctccccaacagggtgagtggttgttgctcttcaacagtatcctcccctttccggatctgctgagccggacagcagtgctggactgcacagccccggggctccacattgctgtacgcacagagatggtgaggcatagacaaccaggacactctacactctattctttattctggcctggggcacaagagcaaagagatgggccagtgactcagtctctgtctctagatatgcaagttcctggtacagctcagcatggatttcagctcctactacaaccgggtacacatcctgggggtgagcacacagcaaaatggggtgggacgtgcagagaggtatagggtaaaggcaaaggaagcagaggatgagaccagcaggccctttctctttcaggagcctcgaccacacctctttggtcagatgttcgtccgcctgcagcttctgagagctgtgcgtgaggtgctccatactggcctggctatgctgggtctccctccactgagccacatttaaggccacagaggctccaatacctgggaatgttcacaaagtcatcaactggaaaaaaagcaaaaacccacggccaaaataaattggtactgtttgttac

SEQ ID NO: 4374 - protein, 119 aa, Homo sapiens [sequence omitted]

SEQ ID NO: 4375 - DNA, 1610 bp, Homo sapiens
gattccgaagcccgccccaccaccgtcaccgcaccagtggcccaggcttcgtgggaccaacagggctaatcctgccccacggatctaatccggatcgggacccggtcccaggggaggcccccacctccccttctattgttctgtggcccagcggtccgccgtcttcgagcgcgtcctcagcgccgtggccgcctatgccacgcccgcctcgcctgcctcgctgggccagcgcgtcttactacactgcccagcactgcgcagctccccctgcgcactccgcttgagccagctgcgtacggtgctcgtggccgatcacctggcgcgagccctgcgcgctcacggggtgtgcgtgcgcctagtgccagctgtgcgggatccgcacatgctgaccttcctgcagcaactgcgggtggactggcccgctgcctcggagagagcttcctcccacaccctgaggagccacgcccttgaagaacttacctctgctaatgacgggaggacactgtcccctggcatcctaggcagactgtgtctgaaggagctggtggaagaacagggccgcacagctggctatgaccccaacctggacaactgtctggtgactgaggatctcctctctgtgctggctgagctgcaagaggctctatggcattggcccgaggacagccacccaggcctggctggggcctcagatactggtacaggcggctgcctggttgtacatgttgttagctgtgaggaggagttccagcaacagaagttggacctgctttggcagaagttggttgacaaggctccactcagacagaagcacctcatctgtggccctgtgaaagtagctggtgcacctggcactctgatgactgcccctgagtactacgagttccggcatacccaggtgtgcaaggcctcagcactgaagcatggtggggatctggcacaagacccagcctggacagagatctttggtgttctctctgtggccaccatcaagtttgagatgctgagcacagccccacagagtcagctcttcctggctctggctgacagcagtatctccacgaagggcacaaagagtggcacctttgtcatgtataattgtgcccgtcttgccacactctttgagagttacaagtgtagtatggaacaaggtctgtaccccacttttcctcctgtgagcagtctggacttctcactgctacatgatgagggtgagtggttgttgctcttcaacagtatcctcccctttccggatctgctgagccggacagcagtgctggactgcacagccccggggctccacattgctgtacgcacagagatgatatgcaagttcctggtacagctcagcatggatttcagctcctactacaaccgggtacacatcctgggggagcctcgaccacacctctttggtcagatgttcgtccgcctgcagcttctgagagctgtgcgtgaggtgctccatactggcctggctatgctgggtctccctccactgagccacatttaaggccacagaggctccaatacctgggaatgttcacaaagtcatcaactggaaaaaaagcaaaaacccacggccaaaataaattggtactgtttgttac

SEQ ID NO: 4376 - protein, 376 aa, Homo sapiens; identical to SEQ ID NO: 417

SEQ ID NO: 4377 - DNA, 2211 bp, Homo sapiens
gggcaagctgtgatagtgtttgggtggctgttcggctggcccagaccaggccgaaccggaccagacttgaagtagaagcgcgtggagcatcaccttgtcctcgttcactctgctcgcgtcctgggagtcccccgtcccccgtcttgatccaagtcaagggcctactggcgcgagagtcgctggcccccgcgcggggtttgggcatctcggcacgccggctctgtcgtggcctcaggggaacattgtcgctttcgctacccgcggggccgggcgagcgggaagctcggcacagtgggagcctggtggtgggtctcctggggccggtcgcaatgggtttccgggggtcccgcggctgctctgtggaccccttcggcccctggtgctccgggcgctggcagcgtcaccggacaaaggccaccgagcgcgggggtgtccccgaggtggacgcgcgggtttacttcctctccggccccacgggcgcgcttccctcctgacggattccgaagcccgccccaccaccgtcaccgcaccagtggcccaggcttcgtgggaccaacagggctaatcctgccccacggatctaatccggatcgggacccggtcccaggggaggcccccacctccccttctattgttctgtggcccaggttccggagcatttgctccatgccctcgcctgcctgcagggccccggtgtggccccggtgctgcgctgcgcgccgacccccgcgggtctgtctctccaactgcagcggtccgccgtcttcgagcgcgtcctcagcgccgtggccgcctatgccacgcccgcctcgcctgcctcgctgggccagcgcgtcttactacactgcccagcactgcgcagctccccctgcgcactccgcttgagccagctgcgtacggtgctcgtggccgatcacctggcgcgagccctgcgcgctcacggggtgtgcgtgcgcctagtgccagctgtgcgggatccgcacatgctgaccttcctgcagcaactgcgggtggactggcccgctgcctcggagagagcttcctcccacaccctgaggagccacgcccttgaagaacttacctctgctaatgacgggaggacactgtcccctggcatcctaggcagactgtgtctgaaggagctggtggaagaacagggccgcacagctggctatgaccccaacctggacaactgtctggtgactgaggatctcctctctgtgctggctgagctgcaagaggctctatggcattggcccgaggacagccacccaggcctggctggggcctcagatactggtacaggcggctgcctggttgtacatgttgttagctgtgaggaggagttccagcaacagaagttggacctgctttggcagaagttggttgacaaggctccactcagacagaagcacctcatctgtggccctgtgaaagtagctggtgcacctggcactctgatgactgcccctgagtactacgagttccggcatacccaggtgtgcaaggcctcagcactgaagcatggtggggatctggcacaagacccagcctggacagagatctttggtgttctctctgtggccaccatcaagtttgagatgctgagcacagccccacagagtcagctcttcctggctctggctgacagcagtatctccacgaagggcacaaagagtggcacctttgtcatgtataattgtgcccgtcttgccacactctttgagagttacaagtgtagtatggaacaaggtctgtaccccacttttcctcctgtgagcagtctggacttctcactgctacatgatgagggtgagtggttgttgctcttcaacagtatcctcccctttccggatctgctgagccggacagcagtgctggactgcacagccccggggctccacattgctgtacgcacagagatgatatgcaagttcctggtacagctcagcatggatttcagctcctactacaaccgggtacacatcctgggggagcctcgaccacacctctttggtcagatgttcgtccgcctgcagcttctgagagctgtgcgtgaggtgctccatactggcctggctatgctgggtctccctccactgagccacatttaaggccacagaggctccaatacctgggaatgttcacaaagtcatcaactggaaaaaaagcaaaaacccacggccaaaataaattggtactgtttgttac

SEQ ID NO: 4378 - protein, 376 aa, Homo sapiens; identical to SEQ ID NO: 417

SEQ ID NO: 4379 - DNA, 1924 bp, Homo sapiens
gggagatgggccccgtgccgtggctcttttacacgcccgttctcccgcaggttccggagcatttgctccatgccctcgcctgcctgcagggccccggtgtggccccggtgctgcgctgcgcgccgacccccgcgggtctgtctctccaactgcagcggtccgccgtcttcgagcgcgtcctcagcgccgtggccgcctatgccacgcccgcctcgcctgcctcgctgggccagcgcgtcttactacactgcccagcactgcgcagctccccctgcgcactccgcttgagccagctgcgtacggtgctcgtggccgatcacctggcgcgagccctgcgcgctcacgggtgagcggggccgcggggccggaatggagaaagtgggactgccgggtacctagaaagcgagcggcgccgcccgtggggactgcggctggaggtgggaagtcgtggcgagctggaccaggtgctcagactgaggcggccgccctcccttcgcagggtgtgcgtgcgcctagtgccagctgtgcgggatccgcacatgctgaccttcctgcagcaactgcgggtggactggcccgctgcctcggagagagcttcctcccacaccctgaggagccacgcccttgaagaacttacctctgctaatgacgggaggacactgtcccctggcatcctaggcagactgtgtctgaaggagctggtggaagaacagggccgcacagctggctatgaccccaacctggacaactgtctggtgactgaggatctcctctctgtgctggctgagctgcaagaggctctatggcattggcccgaggacagccacccaggcctggctggggcctcagatactggtacaggcggctgcctggttgtacatgttgttagctgtgaggaggagttccagcaacagaagttggacctgctttggcagaagttggttgacaaggctccactcagacagaagcacctcatctgtggccctgtgaaagtagctggtgcacctggcactctgatgactgcccctgagtactacgaacccagcctggacagagatctttggtgttctctctgtggccaccatcaagtttgagatgctgagcacagccccacagagtcagctcttcctggctctggctgacagcagtatctccacgaagggcacaaagagtggcacctttgtcatgtataattgtgcccgtcttgccacactctttgagagttacaagtgtagtatggaacaaggtctgtaccccacttttcctcctgtgagcagtctggacttctcactgctacatgatgaggtgagtgtccctcctggtagctggcacaaggaggcctggacttcccctcccagcacctttctccccaacagggtgagtggttgttgctcttcaacagtatcctcccctttccggatctgctgagccggacagcagtgctggactgcacagccccggggctccacattgctgtacgcacagagatggtgaggcatagacaaccaggacactctacactctattctttattctggcctggggcacaagagcaaagagatgggccagtgactcagtctctgtctctagatatgcaagttcctggtacagctcagcatggatttcagctcctactacaaccgggtacacatcctgggggtgagcacacagcaaaatggggtgggacgtgcagagaggtatagggtaaaggcaaaggaagcagaggatgagaccagcaggccctttctctttcaggagcctcgaccacacctctttggtcagatgttcgtccgcctgcagcttctgagagctgtgcgtgaggtgctccatactggcctggctatgctgggtctccctccactgagccacatttaaggccacagaggctccaatacctgggaatgttcacaaagtcatcaactgg

SEQ ID NO: 4380 - protein, 184 aa, Homo sapiens
MLTFLQQLRVDWPAASERASSHTLRSHALEELTSANDGRTLSPGILGRLCLKELVEEQGRTAGYDPNLDNCLVTEDLLSVLAELQEALWHWPEDSHPGLAGASDTGTGGCLVVHVVSCEEEFQQQKLDLLWQKLVDKAPLRQKHLICGPVKVAGAPGTLMTAPEYYEPSLDRDLWCSLCGHHQV

SEQ ID NO: 4381 - DNA, 707 bp, Homo sapiens
ctccccagggttccagagatggccaccagcctcggctctcccacgtctacacccatcacctccagcctgagggcgcaactgagaggaactgagacccaagcagctcagtaaaggccccgcggcgagggcatcggctctcgccggcggatgacgagctgtatcagcggacgcgcatctctctgctgcaacgcgaggccgctcaggcaatgtacatcgacagctacaacagccgcggcttcatgataaacggaaaccgcgtgctcggcccctgcgctctgctcccgcactcggtggtgcagtggaacgtgggatcccaccaggacatcaccgaagacagcttttccctcttctggttgctggagccccggatagagatcgtggtggtggggactggagaccggaccgagaggctgcagtcccaggtgcttcaagccatgaggcagcggggcattgctgtggaagtgcaggacacgcccaatgcctgtgccaccttcaacttcctgtgtcatgaaggccgagtaactggagctgctctcatccctccaccaggagggacttcacttacatctttgggccaagctgctcaatgaaccgccaggaactgacctgctgactgcactctgccaggcttcccaatgctttcactcttatctaccctttggcacttatcttgcttatcaacataataatttatacacttctcccat

SEQ ID NO: 4382 - protein, 127 aa, Homo sapiens; identical to SEQ ID NO: 421

SEQ ID NO: 4383 - DNA, 909 bp, Homo sapiens
ctccccagggttccagagatggccaccagcctcggctctcccacgtctacacccatcacctccagcctgagggcgcaactgagaggaactgagacccaagcagctcagtaaaggccccgcggcgagggcatcggctctcgccggcggatgacgagctgtatcagcggacgcgcatctctctgctgcaacgcgaggccgctcaggcaatgtacatcgacagctacaacagccgcggcttcatgataaacggaaaccgcgtgctcggcccctgcgctctgctcccgcactcggtggtgcagtggaacgtgggatcccaccaggacatcaccgaagacagcttttccctcttctggttgctggagccccggatagagatcgtggtggtggggactggagaccggaccgagaggctgcagtcccaggtgcttcaagccatgaggcagcggggcattgctgtggaagtgcaggacacgcccaatgcctgtgccaccttcaacttcctgtgtcatgaaggccgagtaactggagctgctctcatccctccaccaggagggacttcacttacatctttgggccaagctgctcaatgaaccgccaggaactgacctgctgactgcactctgccaggcttcccaatgctttcactcttatctaccctttggcacttatcttgcttatcaacataataatttatacacttctcccattttgtatcaggtgtgttgctggccaggagctgatggctcactgggctcttggaggggaatgtgaagaaaccaaggagtcactttttcatctagattacttaggattccttgacttttcagaagtcgggaagcagtatgtttgcctgttgtagacctacttgctcacatgcagatttgagaggacctcaacggcttttctcac

SEQ ID NO: 4384 - protein, 127 aa, Homo sapiens; identical to SEQ ID NO: 421

SEQ ID NO: 4385 - DNA, 925 bp, Homo sapiens
ctccccagggttccagagatggccaccagcctcggctctcccacgtctacacccatcacctccagcctgagggcgcaactgagaggaactgagacccaagcagctcagtaaaggccccgcggcgagggcatcggctctcgccggcggatgacgagctgtatcagcggacgcgcatctctctgctgcaacgcgaggccgctcaggcaatgtacatcgacagctacaacagccgcggcttcatgataaacggaaaccgcgtgctcggcccctgcgctctgctcccgcactcggtggtgcagtggaacgtgggatcccaccaggacatcaccgaagacagcttttccctcttctggttgctggagccccggatagagatcgtggtggtggggactggagaccggaccgagaggctgcagtcccaggtgcttcaagccatgaggcagcggggcattgctgtggaagtgcaggacacgcccaatgcctgtgccaccttcaacttcctgtgtcatgaaggccgagtaactggagctgctctcatccctccaccaggagggacttcacttacatctttgggccaagctgctcaatgaaccgccaggaactgacctgctgactgcactctgccaggcttcccaatgctttcactcttatctaccctttggcacttatcttgcttatcaacataataatttatacacttctcccattttgtatcaggtgtgttgctggccaggagctgatggctcactgggctcttggaggggaatgtgaagaaaccaaggagtcactttttcatctagattacttaggattccttgacttttcagaagtcgggaagcagtatgtttgcctgttgtagacctacttgctcacatgcagatttgagaggacctcaacggcttttctcacaaaatcgctgattgtt

SEQ ID NO: 4386 - protein, 127 aa, Homo sapiens; identical to SEQ ID NO: 421

SEQ ID NO: 4387 - DNA, 778 bp, Homo sapiens
gtcccgaacacctggccaggcggtgggtgccagacttctagcccctaattccagcctttggggcttcgggcaccgtgggcggggcagccggctcaagtttctccggctagacgcggaagcacgccccgccctaaccgtcacccgcgcgaccgttggcctctccgcagcgcgcggagaggggcgtggccgagcgtggattggcttctcgggttctctagggggcgtggccaggtggtttctccttaaaatggctccaagtctgcaggcagccagagcaagcggaagggcaagctgtgatagtgtttgggtggctgttcggctggcccagaccaggccgaaccggaccagacttgaagtagaagcgcgtggagcatcaccttgtcctcgttcactctgctcgcgtcctgggagtcccccgtcccccgtcttgatccaagtcaagggcctactggcgcgagagtcgctggcccccgcgcggggtttgggcatctcggcacgccggctctgtcgtggcctcaggggaacattgtcgctttcgctacccgcggggccgggcgagcgggaagctcggcacagtgggagcctggtggtgggtctcctggggccggtcgcaatgggtttccgggggtcccgcggctgctctgtggaccccttcggcccctggtgctccgggcgctggcagcgtcaccggacaaaggccaccgagcgcgggggtgtccccgaggtggacgcgcgggtttacttcctctccggccccacgggcgcgcttccctcctga

SEQ ID NO: 4388 - protein, 176 aa, Homo sapiens
MAPSLQAARASGRASCDSVWVAVRLAQTRPNRTRLEVEARGASPCPRSLCSRPGSPPSPVLIQVKGLLARESLAPARGLGISARRLCRGLRGTLSLSLPAGPGEREARHSGSLVVGLLGPVAMGFRGSRGCSVDPFGPWCSGRWQRHRTKATERGGVPEVDARVYFLSGPTGALPS

SEQ ID NO: 4389 - DNA, 1989 bp, Homo sapiens
gcgcccgtggggccggagaggaagtaaacccgcgcgtccacctcggggacacccccgcgctcggtggcctttgtccggtgacgctgccagcgcccggagcaccaggggccgaaggggtccacagagcagccgcgggacccccggaaacccattgcgaccggccccaggagacccaccaccaggctcccactgtgccgagcttcccgctcgcccggccccgcgggtagcgaaagcgacaatgttcccctgaggccacgacagagccggcgtgccgagatgcccaaaccccgcgcgggggccagcgactctcgcgccagtaggcccttgacttggatcaagacgggggacgggggactcccaggacgcgagcagagtgaacgaggacaaggtgatgctccacgcgcttctacttcaagtctggtccggttcggcctggtctgggccagccgaacagccacccaaacactatcacagcttgcccttccgcttgctctggctgcctgcagacttggagccattttaaggagaaaccacctggccacgccccctagagaacccgagaagccaatccacgctcggccacgcccctctccgcgcgctgcggagaggccaacggtcgcgcgggtgacggttagggcggggcgtgcttccgcgtctagccggagaaacttgagccggctgccccgcccacggtgcccgaagccccaaaggctggaattaggggctagaagtctggcacccaccgcctggccaggtgttcgggacgcgaccaggtgggcggtcgccccgccccgggagcgcggcttaatagctgagagcccgggggccaggccgcggctgcggcccaggcaacgccctgagggtggccacgctgccaggtgttccactcccccgggactatgggcaagggcccggggcggggagggcggcaggtgctgacactggagctgcgccggaggtcggggaactcggcctcctaagactgaggacactcgcctgctgggccggtcgagctgtgcggtgccctccgggacgcagggggcgctgcagccacgctgggtcaggctccgcagggccctcccaacccggggactaacggcgccggtgacgacttcgccgcgcgttggtcagccatggccaccgctctcgcgctacgtagcttgtaccgagcgcgaccctcgctgcgctgtccgcccgttgagcttccctgggccccgcggcgagggcatcggctctcgccggcggatgacgagctgtatcagcggacgcgcatctctctgctgcaacgcgaggccgctcaggcaatgtacatcgacagctacaacagccgcggcttcatgataaacggaaaccgcgtgctcggcccctgcgctctgctcccgcactcggtggtgcagtggaacgtgggatcccaccaggacatcaccgaagacagcttttccctcttctggttgctggagccccggataggtactggggaaggggagggagaacagaggtgttctgggccccagaaggcgacccccactgcagcctctcaacagaactgtagactagccacacccacccttccctagagatcgtggtggtggggactggagaccggaccgagaggctgcagtcccaggtgcttcaagccatgaggcagcggggcattgctgtggaagtgcaggacacggtgagtcccgggactggggcatgctgcggggagcacaggcctggcgctagacaggctgatgctggccttttctttgcagcccaatgcctgtgccaccttcaacttcctgtgtcatgaaggccgagtaactggagctgctctcatccctccaccaggagggacttcacttacatctttgggccaagctgctcaatgaaccgccaggaactgacctgctgactgcactctgccaggcttcccaatgctttcactcttatctaccctttggcacttatcttgcttatcaacataataatttatacacttctccc

SEQ ID NO: 4390 - protein, 147 aa, Homo sapiens [sequence omitted]

SEQ ID NO: 4391 - DNA, 1882 bp, Homo sapiens
gcgcccgtggggccggagaggaagtaaacccgcgcgtccacctcggggacacccccgcgctcggtggcctttgtccggtgacgctgccagcgcccggagcaccaggggccgaaggggtccacagagcagccgcgggacccccggaaacccattgcgaccggccccaggagacccaccaccaggctcccactgtgccgagcttcccgctcgcccggccccgcgggtagcgaaagcgacaatgttcccctgaggccacgacagagccggcgtgccgagatgcccaaaccccgcgcgggggccagcgactctcgcgccagtaggcccttgacttggatcaagacgggggacgggggactcccaggacgcgagcagagtgaacgaggacaaggtgatgctccacgcgcttctacttcaagtctggtccggttcggcctggtctgggccagccgaacagccacccaaacactatcacagcttgcccttccgcttgctctggctgcctgcagacttggagccattttaaggagaaaccacctggccacgccccctagagaacccgagaagccaatccacgctcggccacgcccctctccgcgcgctgcggagaggccaacggtcgcgcgggtgacggttagggcggggcgtgcttccgcgtctagccggagaaacttgagccggctgccccgcccacggtgcccgaagccccaaaggctggaattaggggctagaagtctggcacccaccgcctggccaggtgttcgggacgcgaccaggtgggcggtcgccccgccccgggagcgcggcttaatagctgagagcccgggggccaggccgcggctgcggcccaggcaacgccctgagggtggccacgctgccaggtgttccactcccccgggactatgggcaagggcccggggcggggagggcggcaggtgctgacactggagctgcgccggaggtcggggaactcggcctcctaagactgaggacactcgcctgctgggccggtcgagctgtgcggtgccctccgggacgcagggggcgctgcagccacgctgggtcaggctccgcagggccctcccaacccggggactaacggcgccggtgacgacttcgccgcgcgttggtcagccatggccaccgctctcgcgctacgtagcttgtaccgagcgcgaccctcgctgcgctgtccgcccgttgagcttccctgggccccgcggcgagggcatcggctctcgccggcggatgacgagctgtatcagcggacgcgcatctctctgctgcaacgcgaggccgctcaggcaatgtacatcgacagctacaacagccgcggcttcatgataaacggaaaccgcgtgctcggcccctgcgctctgctcccgcactcggtggtgcagtggaacgtgggatcccaccaggacatcaccgaagacagcttttccctcttctggttgctggagccccggatagagatcgtggtggtggggactggagaccggaccgagaggctgcagtcccaggtgcttcaagccatgaggcagcggggcattgctgtggaagtgcaggacacggtgagtcccgggactggggcatgctgcggggagcacaggcctggcgctagacaggctgatgctggccttttctttgcagcccaatgcctgtgccaccttcaacttcctgtgtcatgaaggccgagtaactggagctgctctcatccctccaccaggagggacttcacttacatctttgggccaagctgctcaatgaaccgccaggaactgacctgctgactgcactctgccaggcttcccaatgctttcactcttatctaccctttggcacttatcttgcttatcaacataataatttatacacttctccc

SEQ ID NO: 4392 - protein, 184 aa, Homo sapiens
MATALALRSLYRARPSLRCPPVELPWAPRRGHRLSPADDELYQRTRISLLQREAAQAMYIDSYNSRGFMINGNRVLGPCALLPHSVVQWNVGSHQDITEDSFSLFWLLEPRIEIVVVGTGDRTERLQSQVLQAMRQRGIAVEVQDTVSPGTGACCGEHRPGARQADAGLFFAAQCLCHLQLPVS

SEQ ID NO: 4393 - DNA, 1928 bp, Homo sapiens
gcgcccgtggggccggagaggaagtaaacccgcgcgtccacctcggggacacccccgcgctcggtggcctttgtccggtgacgctgccagcgcccggagcaccaggggccgaaggggtccacagagcagccgcgggacccccggaaacccattgcgaccggccccaggagacccaccaccaggctcccactgtgccgagcttcccgctcgcccggccccgcgggtagcgaaagcgacaatgttcccctgaggccacgacagagccggcgtgccgagatgcccaaaccccgcgcgggggccagcgactctcgcgccagtaggcccttgacttggatcaagacgggggacgggggactcccaggacgcgagcagagtgaacgaggacaaggtgatgctccacgcgcttctacttcaagtctggtccggttcggcctggtctgggccagccgaacagccacccaaacactatcacagcttgcccttccgcttgctctggctgcctgcagacttggagccattttaaggagaaaccacctggccacgccccctagagaacccgagaagccaatccacgctcggccacgcccctctccgcgcgctgcggagaggccaacggtcgcgcgggtgacggttagggcggggcgtgcttccgcgtctagccggagaaacttgagccggctgccccgcccacggtgcccgaagccccaaaggctggaattaggggctagaagtctggcacccaccgcctggccaggtgttcgggacgcgaccaggtgggcggtcgccccgccccgggagcgcggcttaatagctgagagcccgggggccaggccgcggctgcggcccaggcaacgccctgagggtggccacgctgccaggtgttccactcccccgggactatgggcaagggcccggggcggggagggcggcaggtgctgacactggagctgcgccggaggtcggggaactcggcctcctaagactgaggacactcgcctgctgggccggtcgagctgtgcggtgccctccgggacgcagggggcgctgcagccacgctgggtcaggctccgcagggccctcccaacccggggactaacggcgccggtgacgacttcgccgcgcgttggtcagccatggccaccgctctcgcgctacgtagcttgtaccgagcgcgaccctcgctgcgctgtccgcccgttgagcttccctggtgagcttggaccccgcgccctcgaccatccagccccctagggccggcgactgccagcccagcaccttccggcctctcgggctgcccggcccggccccgcgcccctgaccctttccctccgcagggccccgcggcgagggcatcggctctcgccggcggatgacgagctgtatcagcggacgcgcatctctctgctgcaacgcgaggccgctcaggcaatgtacatcgacagctacaacagccgcggcttcatgataaacggaaaccgcgtgctcggcccctgcgctctgctcccgcactcggtggtgcagtggaacgtgggatcccaccaggacatcaccgaagacagcttttccctcttctggttgctggagccccggatagagatcgtggtggtggggactggagaccggaccgagaggctgcagtcccaggtgcttcaagccatgaggcagcggggcattgctgtggaagtgcaggacacgcccaatgcctgtgccaccttcaacttcctgtgtcatgaaggccgagtaactggagctgctctcatccctccaccaggagggacttcacttacatctttgggccaagctgctcaatgaaccgccaggaactgacctgctgactgcactctgccaggcttcccaatgctttcactcttatctaccctttggcacttatcttgcttatcaacataataatttatacacttctccca

SEQ ID NO: 4394 - protein, 127 aa, Homo sapiens; identical to SEQ ID NO: 421

SEQ ID NO: 4395 - DNA, 1702 bp, Homo sapiens
gcgcccgtggggccggagaggaagtaaacccgcgcgtccacctcggggacacccccgcgctcggtggcctttgtccggtgacgctgccagcgcccggagcaccaggggccgaaggggtccacagagcagccgcgggacccccggaaacccattgcgaccggccccaggagacccaccaccaggctcccactgtgccgagcttcccgctcgcccggccccgcgggtagcgaaagcgacaatgttcccctgaggccacgacagagccggcgtgccgagatgcccaaaccccgcgcgggggccagcgactctcgcgccagtaggcccttgacttggatcaagacgggggacgggggactcccaggacgcgagcagagtgaacgaggacaaggtgatgctccacgcgcttctacttcaagtctggtccggttcggcctggtctgggccagccgaacagccacccaaacactatcacagcttgcccttccgcttgctctggctgcctgcagacttggagccattttaaggagaaaccacctggccacgccccctagagaacccgagaagccaatccacgctcggccacgcccctctccgcgcgctgcggagaggccaacggtcgcgcgggtgacggttagggcggggcgtgcttccgcgtctagccggagaaacttgagccggctgccccgcccacggtgcccgaagccccaaaggctggaattaggggctagaagtctggcacccaccgcctggccaggtgttcgggacgcgaccaggtgggcggtcgccccgccccgggagcgcggcttaatagctgagagcccgggggccaggccgcggctgcggcccaggcaacgccctgagggtggccacgctgccaggtgttccactcccccgggactatgggcaagggcccggggcggggagggcggcaggtgctgacactggagctgcgccggaggtcggggaactcggcctcctaagactgaggacactcgcctgctgggccggtcgagctgtgcggtgccctccgggacgcagggggcgctgcagccacgctgggtcaggctccgcagggccctcccaacccggggactaacggcgccggtgacgacttcgccgcgcgttggtcagccatggccaccgctctcgcgctacgtagcttgtaccgagcgcgaccctcgctgcgctgtccgcccgttgagcttccctgggccccgcggcgagggcatcggctctcgccggcggatgacgagctgtatcagcggacgcgcatctctctgctgcaacgcgaggccgctcaggtgggatcccaccaggacatcaccgaagacagcttttccctcttctggttgctggagccccggatagagatcgtggtggtggggactggagaccggaccgagaggctgcagtcccaggtgcttcaagccatgaggcagcggggcattgctgtggaagtgcaggacacgcccaatgcctgtgccaccttcaacttcctgtgtcatgaaggccgagtaactggagctgctctcatccctccaccaggagggacttcacttacatctttgggccaagctgctcaatgaaccgccaggaactgacctgctgactgcactctgccaggcttcccaatgctttcactcttatctaccctttggcacttatcttgcttatcaacataataatttatacacttctccca

SEQ ID NO: 4396 - protein, 150 aa, Homo sapiens
MATALALRSLYRARPSLRCPPVELPWAPRRGHRLSPADDELYQRTRISLLQREAAQVGSHQDITEDSFSLFWLLEPRIEIVVVGTGDRTERLQSQVLQAMRQRGIAVEVQDTPNACATFNFLCHEGRVTGAALIPPPGGTSLTSLGQAAQ

SEQ ID NO: 4397 - DNA, 1805 bp, Homo sapiens
gcgcccgtggggccggagaggaagtaaacccgcgcgtccacctcggggacacccccgcgctcggtggcctttgtccggtgacgctgccagcgcccggagcaccaggggccgaaggggtccacagagcagccgcgggacccccggaaacccattgcgaccggccccaggagacccaccaccaggctcccactgtgccgagcttcccgctcgcccggccccgcgggtagcgaaagcgacaatgttcccctgaggccacgacagagccggcgtgccgagatgcccaaaccccgcgcgggggccagcgactctcgcgccagtaggcccttgacttggatcaagacgggggacgggggactcccaggacgcgagcagagtgaacgaggacaaggtgatgctccacgcgcttctacttcaagtctggtccggttcggcctggtctgggccagccgaacagccacccaaacactatcacagcttgcccttccgcttgctctggctgcctgcagacttggagccattttaaggagaaaccacctggccacgccccctagagaacccgagaagccaatccacgctcggccacgcccctctccgcgcgctgcggagaggccaacggtcgcgcgggtgacggttagggcggggcgtgcttccgcgtctagccggagaaacttgagccggctgccccgcccacggtgcccgaagccccaaaggctggaattaggggctagaagtctggcacccaccgcctggccaggtgttcgggacgcgaccaggtgggcggtcgccccgccccgggagcgcggcttaatagctgagagcccgggggccaggccgcggctgcggcccaggcaacgccctgagggtggccacgctgccaggtgttccactcccccgggactatgggcaagggcccggggcggggagggcggcaggtgctgacactggagctgcgccggaggtcggggaactcggcctcctaagactgaggacactcgcctgctgggccggtcgagctgtgcggtgccctccgggacgcagggggcgctgcagccacgctgggtcaggctccgcagggccctcccaacccggggactaacggcgccggtgacgacttcgccgcgcgttggtcagccatggccaccgctctcgcgctacgtagcttgtaccgagcgcgaccctcgctgcgctgtccgcccgttgagcttccctgggccccgcggcgagggcatcggctctcgccggcggatgacgagctgtatcagcggacgcgcatctctctgctgcaacgcgaggccgctcaggcaatgtacatcgacagctacaacagccgcggcttcatgataaacggaaaccgcgtgctcggcccctgcgctctgctcccgcactcggtggtgcagtggaacgtgggatcccaccaggacatcaccgaagacagcttttccctcttctggttgctggagccccggatagagatcgtggtggtggggactggagaccggaccgagaggctgcagtcccaggtgcttcaagccatgaggcagcggggcattgctgtggaagtgcaggacacgcccaatgcctgtgccaccttcaacttcctgtgtcatgaaggccgagtaactggagctgctctcatccctccaccaggagggacttcacttacatctttgggccaagctgctcaatgaaccgccaggaactgacctgctgactgcactctgccaggcttcccaatgctttcactcttatctaccctttggcacttatcttgcttatcaacataataatttatacacttctcccat

SEQ ID NO: 4398 - protein, 184 aa, Homo sapiens; identical to SEQ ID NO: 419

SEQ ID NO: 4399 - DNA, 1368 bp, Homo sapiens
gcgcccgtggggccggagaggaagtaaacccgcgcgtccacctcggggacacccccgcgctcggtggcctttgtccggtgacgctgccagcgcccggagcaccaggggccgaaggggtccacagagcagccgcgggacccccggaaacccattgcgaccggccccaggagacccaccaccaggctcccactgtgccgagcttcccgctcgcccggccccgcgggtagcgaaagcgacaatgttcccctgaggccacgacagagccggcgtgccgagatgcccaaaccccgcgcgggggccagcgactctcgcgccagtaggcccttgacttggatcaagacgggggacgggggactcccaggacgcgagcagagtgaacgaggacaaggtgatgctccacgcgcttctacttcaagtctggtccggttcggcctggtctgggccagccgaacagccacccaaacactatcacagcttgcccttccgcttgctctggctgcctgcagacttggagccattttaaggagaaaccacctggccacgccccctagagaacccgagaagccaatccacgctcggccacgcccctctccgcgcgctgcggagaggccaacggtcgcgcgggtgacggttagggcggggcgtgcttccgcgtctagccggagaaacttgagccggctgccccgcccacggtgcccgaagccccaaaggctggaattaggggctagaagtctggcacccaccgcctggccaggtgttcgggacgcgaccagggccccgcggcgagggcatcggctctcgccggcggatgacgagctgtatcagcggacgcgcatctctctgctgcaacgcgaggccgctcaggcaatgtacatcgacagctacaacagccgcggcttcatgataaacggaaaccgcgtgctcggcccctgcgctctgctcccgcactcggtggtgcagtggaacgtgggatcccaccaggacatcaccgaagacagcttttccctcttctggttgctggagccccggatagagatcgtggtggtggggactggagaccggaccgagaggctgcagtcccaggtgcttcaagccatgaggcagcggggcattgctgtggaagtgcaggacacgcccaatgcctgtgccaccttcaacttcctgtgtcatgaaggccgagtaactggagctgctctcatccctccaccaggagggacttcacttacatctttgggccaagctgctcaatgaaccgccaggaactgacctgctgactgcactctgccaggcttcccaatgctttcactcttatctaccctttggcacttatcttgcttatcaacataataatttatacacttctcccat

SEQ ID NO: 4400 - protein, 324 aa, Homo sapiens
MPKPRAGASDSRASRPLTWIKTGDGGLPGREQSERGQGDAPRASTSSLVRFGLVWASRTATQTLSQLALPLALAACRLGAILRRNHLATPPREPEKPIHARPRPSPRAAERPTVARVTVRAGRASASSRRNLSRLPRPRCPKPQRLELGARSLAPTAWPGVRDATRAPRRGHRLSPADDELYQRTRISLLQREAAQAMYIDSYNSRGFMINGNRVLGPCALLPHSVVQWNVGSHQDITEDSFSLFWLLEPRIEIVVVGTGDRTERLQSQVLQAMRQRGIAVEVQDTPNACATFNFLCHEGRVTGAALIPPPGGTSLTSLGQAAQ

SEQ ID NO: 4401 - DNA, 1570 bp, Homo sapiens
gcgcccgtggggccggagaggaagtaaacccgcgcgtccacctcggggacacccccgcgctcggtggcctttgtccggtgacgctgccagcgcccggagcaccaggggccgaaggggtccacagagcagccgcgggacccccggaaacccattgcgaccggccccaggagacccaccaccaggctcccactgtgccgagcttcccgctcgcccggccccgcgggtagcgaaagcgacaatgttcccctgaggccacgacagagccggcgtgccgagatgcccaaaccccgcgcgggggccagcgactctcgcgccagtaggcccttgacttggatcaagacgggggacgggggactcccaggacgcgagcagagtgaacgaggacaaggtgatgctccacgcgcttctacttcaagtctggtccggttcggcctggtctgggccagccgaacagccacccaaacactatcacagcttgcccttccgcttgctctggctgcctgcagacttggagccattttaaggagaaaccacctggccacgccccctagagaacccgagaagccaatccacgctcggccacgcccctctccgcgcgctgcggagaggccaacggtcgcgcgggtgacggttagggcggggcgtgcttccgcgtctagccggagaaacttgagccggctgccccgcccacggtgcccgaagccccaaaggctggaattaggggctagaagtctggcacccaccgcctggccaggtgttcgggacgcgaccagggccccgcggcgagggcatcggctctcgccggcggatgacgagctgtatcagcggacgcgcatctctctgctgcaacgcgaggccgctcaggcaatgtacatcgacagctacaacagccgcggcttcatgataaacggaaaccgcgtgctcggcccctgcgctctgctcccgcactcggtggtgcagtggaacgtgggatcccaccaggacatcaccgaagacagcttttccctcttctggttgctggagccccggatagagatcgtggtggtggggactggagaccggaccgagaggctgcagtcccaggtgcttcaagccatgaggcagcggggcattgctgtggaagtgcaggacacgcccaatgcctgtgccaccttcaacttcctgtgtcatgaaggccgagtaactggagctgctctcatccctccaccaggagggacttcacttacatctttgggccaagctgctcaatgaaccgccaggaactgacctgctgactgcactctgccaggcttcccaatgctttcactcttatctaccctttggcacttatcttgcttatcaacataataatttatacacttctcccattttgtatcaggtgtgttgctggccaggagctgatggctcactgggctcttggaggggaatgtgaagaaaccaaggagtcactttttcatctagattacttaggattccttgacttttcagaagtcgggaagcagtatgtttgcctgttgtagacctacttgctcacatgcagatttgagaggacctcaacggcttttctcac

SEQ ID NO: 4402 - protein, 324 aa, Homo sapiens; identical to SEQ ID NO: 4400

SEQ ID NO: 4403 - DNA, 1905 bp, Homo sapiens
gcgcccgtggggccggagaggaagtaaacccgcgcgtccacctcggggacacccccgcgctcggtggcctttgtccggtgacgctgccagcgcccggagcaccaggggccgaaggggtccacagagcagccgcgggacccccggaaacccattgcgaccggccccaggagacccaccaccaggctcccactgtgccgagcttcccgctcgcccggccccgcgggtagcgaaagcgacaatgttcccctgaggccacgacagagccggcgtgccgagatgcccaaaccccgcgcgggggccagcgactctcgcgccagtaggcccttgacttggatcaagacgggggacgggggactcccaggacgcgagcagagtgaacgaggacaaggtgatgctccacgcgcttctacttcaagtctggtccggttcggcctggtctgggccagccgaacagccacccaaacactatcacagcttgcccttccgcttgctctggctgcctgcagacttggagccattttaaggagaaaccacctggccacgccccctagagaacccgagaagccaatccacgctcggccacgcccctctccgcgcgctgcggagaggccaacggtcgcgcgggtgacggttagggcggggcgtgcttccgcgtctagccggagaaacttgagccggctgccccgcccacggtgcccgaagccccaaaggctggaattaggggctagaagtctggcacccaccgcctggccaggtgttcgggacgcgaccaggtgggcggtcgccccgccccgggagcgcggcttaatagctgagagcccgggggccaggccgcggctgcggcccaggcaacgccctgagggtggccacgctgccaggtgttccactcccccgggactatgggcaagggcccggggcggggagggcggcaggtgctgacactggagctgcgccggaggtcggggaactcggcctcctaagactgaggacactcgcctgctgggccggtcgagctgtgcggtgccctccgggacgcagggggcgctgcagccacgctgggtcaggctccgcagggccctcccaacccggggactaacggcgccggtgacgacttcgccgcgcgttggtcagccatggccaccgctctcgcgctacgtagcttgtaccgagcgcgaccctcgctgcgctgtccgcccgttgagcttccctgggccccgcggcgagggcatcggctctcgccggcggatgacgagctgtatcagcggacgcgcatctctctgctgcaacgcgaggccgctcaggtgggatcccaccaggacatcaccgaagacagcttttccctcttctggttgctggagccccggatagagatcgtggtggtggggactggagaccggaccgagaggctgcagtcccaggtgcttcaagccatgaggcagcggggcattgctgtggaagtgcaggacacgcccaatgcctgtgccaccttcaacttcctgtgtcatgaaggccgagtaactggagctgctctcatccctccaccaggagggacttcacttacatctttgggccaagctgctcaatgaaccgccaggaactgacctgctgactgcactctgccaggcttcccaatgctttcactcttatctaccctttggcacttatcttgcttatcaacataataatttatacacttctcccattttgtatcaggtgtgttgctggccaggagctgatggctcactgggctcttggaggggaatgtgaagaaaccaaggagtcactttttcatctagattacttaggattccttgacttttcagaagtcgggaagcagtatgtttgcctgttgtagacctacttgctcacatgcagatttgagaggacctcaacggcttttctcac

SEQ ID NO: 4404 - protein, 150 aa, Homo sapiens; identical to SEQ ID NO: 4396

SEQ ID NO: 4405 - DNA, 2131 bp, Homo sapiens
gcgcccgtggggccggagaggaagtaaacccgcgcgtccacctcggggacacccccgcgctcggtggcctttgtccggtgacgctgccagcgcccggagcaccaggggccgaaggggtccacagagcagccgcgggacccccggaaacccattgcgaccggccccaggagacccaccaccaggctcccactgtgccgagcttcccgctcgcccggccccgcgggtagcgaaagcgacaatgttcccctgaggccacgacagagccggcgtgccgagatgcccaaaccccgcgcgggggccagcgactctcgcgccagtaggcccttgacttggatcaagacgggggacgggggactcccaggacgcgagcagagtgaacgaggacaaggtgatgctccacgcgcttctacttcaagtctggtccggttcggcctggtctgggccagccgaacagccacccaaacactatcacagcttgcccttccgcttgctctggctgcctgcagacttggagccattttaaggagaaaccacctggccacgccccctagagaacccgagaagccaatccacgctcggccacgcccctctccgcgcgctgcggagaggccaacggtcgcgcgggtgacggttagggcggggcgtgcttccgcgtctagccggagaaacttgagccggctgccccgcccacggtgcccgaagccccaaaggctggaattaggggctagaagtctggcacccaccgcctggccaggtgttcgggacgcgaccaggtgggcggtcgccccgccccgggagcgcggcttaatagctgagagcccgggggccaggccgcggctgcggcccaggcaacgccctgagggtggccacgctgccaggtgttccactcccccgggactatgggcaagggcccggggcggggagggcggcaggtgctgacactggagctgcgccggaggtcggggaactcggcctcctaagactgaggacactcgcctgctgggccggtcgagctgtgcggtgccctccgggacgcagggggcgctgcagccacgctgggtcaggctccgcagggccctcccaacccggggactaacggcgccggtgacgacttcgccgcgcgttggtcagccatggccaccgctctcgcgctacgtagcttgtaccgagcgcgaccctcgctgcgctgtccgcccgttgagcttccctggtgagcttggaccccgcgccctcgaccatccagccccctagggccggcgactgccagcccagcaccttccggcctctcgggctgcccggcccggccccgcgcccctgaccctttccctccgcagggccccgcggcgagggcatcggctctcgccggcggatgacgagctgtatcagcggacgcgcatctctctgctgcaacgcgaggccgctcaggcaatgtacatcgacagctacaacagccgcggcttcatgataaacggaaaccgcgtgctcggcccctgcgctctgctcccgcactcggtggtgcagtggaacgtgggatcccaccaggacatcaccgaagacagcttttccctcttctggttgctggagccccggatagagatcgtggtggtggggactggagaccggaccgagaggctgcagtcccaggtgcttcaagccatgaggcagcggggcattgctgtggaagtgcaggacacgcccaatgcctgtgccaccttcaacttcctgtgtcatgaaggccgagtaactggagctgctctcatccctccaccaggagggacttcacttacatctttgggccaagctgctcaatgaaccgccaggaactgacctgctgactgcactctgccaggcttcccaatgctttcactcttatctaccctttggcacttatcttgcttatcaacataataatttatacacttctcccattttgtatcaggtgtgttgctggccaggagctgatggctcactgggctcttggaggggaatgtgaagaaaccaaggagtcactttttcatctagattacttaggattccttgacttttcagaagtcgggaagcagtatgtttgcctgttgtagacctacttgctcacatgcagatttgagaggacctcaacggcttttctcac

SEQ ID NO: 4406 - protein, 127 aa, Homo sapiens; identical to SEQ ID NO: 421

SEQ ID NO: 4407 - DNA, 2007 bp, Homo sapiens
gcgcccgtggggccggagaggaagtaaacccgcgcgtccacctcggggacacccccgcgctcggtggcctttgtccggtgacgctgccagcgcccggagcaccaggggccgaaggggtccacagagcagccgcgggacccccggaaacccattgcgaccggccccaggagacccaccaccaggctcccactgtgccgagcttcccgctcgcccggccccgcgggtagcgaaagcgacaatgttcccctgaggccacgacagagccggcgtgccgagatgcccaaaccccgcgcgggggccagcgactctcgcgccagtaggcccttgacttggatcaagacgggggacgggggactcccaggacgcgagcagagtgaacgaggacaaggtgatgctccacgcgcttctacttcaagtctggtccggttcggcctggtctgggccagccgaacagccacccaaacactatcacagcttgcccttccgcttgctctggctgcctgcagacttggagccattttaaggagaaaccacctggccacgccccctagagaacccgagaagccaatccacgctcggccacgcccctctccgcgcgctgcggagaggccaacggtcgcgcgggtgacggttagggcggggcgtgcttccgcgtctagccggagaaacttgagccggctgccccgcccacggtgcccgaagccccaaaggctggaattaggggctagaagtctggcacccaccgcctggccaggtgttcgggacgcgaccaggtgggcggtcgccccgccccgggagcgcggcttaatagctgagagcccgggggccaggccgcggctgcggcccaggcaacgccctgagggtggccacgctgccaggtgttccactcccccgggactatgggcaagggcccggggcggggagggcggcaggtgctgacactggagctgcgccggaggtcggggaactcggcctcctaagactgaggacactcgcctgctgggccggtcgagctgtgcggtgccctccgggacgcagggggcgctgcagccacgctgggtcaggctccgcagggccctcccaacccggggactaacggcgccggtgacgacttcgccgcgcgttggtcagccatggccaccgctctcgcgctacgtagcttgtaccgagcgcgaccctcgctgcgctgtccgcccgttgagcttccctgggccccgcggcgagggcatcggctctcgccggcggatgacgagctgtatcagcggacgcgcatctctctgctgcaacgcgaggccgctcaggcaatgtacatcgacagctacaacagccgcggcttcatgataaacggaaaccgcgtgctcggcccctgcgctctgctcccgcactcggtggtgcagtggaacgtgggatcccaccaggacatcaccgaagacagcttttccctcttctggttgctggagccccggatagagatcgtggtggtggggactggagaccggaccgagaggctgcagtcccaggtgcttcaagccatgaggcagcggggcattgctgtggaagtgcaggacacgcccaatgcctgtgccaccttcaacttcctgtgtcatgaaggccgagtaactggagctgctctcatccctccaccaggagggacttcacttacatctttgggccaagctgctcaatgaaccgccaggaactgacctgctgactgcactctgccaggcttcccaatgctttcactcttatctaccctttggcacttatcttgcttatcaacataataatttatacacttctcccattttgtatcaggtgtgttgctggccaggagctgatggctcactgggctcttggaggggaatgtgaagaaaccaaggagtcactttttcatctagattacttaggattccttgacttttcagaagtcgggaagcagtatgtttgcctgttgtagacctacttgctcacatgcagatttgagaggacctcaacggcttttctcac

SEQ ID NO: 4408 - protein, 184 aa, Homo sapiens; identical to SEQ ID NO: 419

SEQ ID NO: 4409 - DNA, 2147 bp, Homo sapiens
gcgcccgtggggccggagaggaagtaaacccgcgcgtccacctcggggacacccccgcgctcggtggcctttgtccggtgacgctgccagcgcccggagcaccaggggccgaaggggtccacagagcagccgcgggacccccggaaacccattgcgaccggccccaggagacccaccaccaggctcccactgtgccgagcttcccgctcgcccggccccgcgggtagcgaaagcgacaatgttcccctgaggccacgacagagccggcgtgccgagatgcccaaaccccgcgcgggggccagcgactctcgcgccagtaggcccttgacttggatcaagacgggggacgggggactcccaggacgcgagcagagtgaacgaggacaaggtgatgctccacgcgcttctacttcaagtctggtccggttcggcctggtctgggccagccgaacagccacccaaacactatcacagcttgcccttccgcttgctctggctgcctgcagacttggagccattttaaggagaaaccacctggccacgccccctagagaacccgagaagccaatccacgctcggccacgcccctctccgcgcgctgcggagaggccaacggtcgcgcgggtgacggttagggcggggcgtgcttccgcgtctagccggagaaacttgagccggctgccccgcccacggtgcccgaagccccaaaggctggaattaggggctagaagtctggcacccaccgcctggccaggtgttcgggacgcgaccaggtgggcggtcgccccgccccgggagcgcggcttaatagctgagagcccgggggccaggccgcggctgcggcccaggcaacgccctgagggtggccacgctgccaggtgttccactcccccgggactatgggcaagggcccggggcggggagggcggcaggtgctgacactggagctgcgccggaggtcggggaactcggcctcctaagactgaggacactcgcctgctgggccggtcgagctgtgcggtgccctccgggacgcagggggcgctgcagccacgctgggtcaggctccgcagggccctcccaacccggggactaacggcgccggtgacgacttcgccgcgcgttggtcagccatggccaccgctctcgcgctacgtagcttgtaccgagcgcgaccctcgctgcgctgtccgcccgttgagcttccctggtgagcttggaccccgcgccctcgaccatccagccccctagggccggcgactgccagcccagcaccttccggcctctcgggctgcccggcccggccccgcgcccctgaccctttccctccgcagggccccgcggcgagggcatcggctctcgccggcggatgacgagctgtatcagcggacgcgcatctctctgctgcaacgcgaggccgctcaggcaatgtacatcgacagctacaacagccgcggcttcatgataaacggaaaccgcgtgctcggcccctgcgctctgctcccgcactcggtggtgcagtggaacgtgggatcccaccaggacatcaccgaagacagcttttccctcttctggttgctggagccccggatagagatcgtggtggtggggactggagaccggaccgagaggctgcagtcccaggtgcttcaagccatgaggcagcggggcattgctgtggaagtgcaggacacgcccaatgcctgtgccaccttcaacttcctgtgtcatgaaggccgagtaactggagctgctctcatccctccaccaggagggacttcacttacatctttgggccaagctgctcaatgaaccgccaggaactgacctgctgactgcactctgccaggcttcccaatgctttcactcttatctaccctttggcacttatcttgcttatcaacataataatttatacacttctcccattttgtatcaggtgtgttgctggccaggagctgatggctcactgggctcttggaggggaatgtgaagaaaccaaggagtcactttttcatctagattacttaggattccttgacttttcagaagtcgggaagcagtatgtttgcctgttgtagacctacttgctcacatgcagatttgagaggacctcaacggcttttctcacaaaatcgctgattgtt

SEQ ID NO: 4410 - protein, 127 aa, Homo sapiens; identical to SEQ ID NO: 421

SEQ ID NO: 4411 - DNA, 2023 bp, Homo sapiens
gcgcccgtggggccggagaggaagtaaacccgcgcgtccacctcggggacacccccgcgctcggtggcctttgtccggtgacgctgccagcgcccggagcaccaggggccgaaggggtccacagagcagccgcgggacccccggaaacccattgcgaccggccccaggagacccaccaccaggctcccactgtgccgagcttcccgctcgcccggccccgcgggtagcgaaagcgacaatgttcccctgaggccacgacagagccggcgtgccgagatgcccaaaccccgcgcgggggccagcgactctcgcgccagtaggcccttgacttggatcaagacgggggacgggggactcccaggacgcgagcagagtgaacgaggacaaggtgatgctccacgcgcttctacttcaagtctggtccggttcggcctggtctgggccagccgaacagccacccaaacactatcacagcttgcccttccgcttgctctggctgcctgcagacttggagccattttaaggagaaaccacctggccacgccccctagagaacccgagaagccaatccacgctcggccacgcccctctccgcgcgctgcggagaggccaacggtcgcgcgggtgacggttagggcggggcgtgcttccgcgtctagccggagaaacttgagccggctgccccgcccacggtgcccgaagccccaaaggctggaattaggggctagaagtctggcacccaccgcctggccaggtgttcgggacgcgaccaggtgggcggtcgccccgccccgggagcgcggcttaatagctgagagcccgggggccaggccgcggctgcggcccaggcaacgccctgagggtggccacgctgccaggtgttccactcccccgggactatgggcaagggcccggggcggggagggcggcaggtgctgacactggagctgcgccggaggtcggggaactcggcctcctaagactgaggacactcgcctgctgggccggtcgagctgtgcggtgccctccgggacgcagggggcgctgcagccacgctgggtcaggctccgcagggccctcccaacccggggactaacggcgccggtgacgacttcgccgcgcgttggtcagccatggccaccgctctcgcgctacgtagcttgtaccgagcgcgaccctcgctgcgctgtccgcccgttgagcttccctgggccccgcggcgagggcatcggctctcgccggcggatgacgagctgtatcagcggacgcgcatctctctgctgcaacgcgaggccgctcaggcaatgtacatcgacagctacaacagccgcggcttcatgataaacggaaaccgcgtgctcggcccctgcgctctgctcccgcactcggtggtgcagtggaacgtgggatcccaccaggacatcaccgaagacagcttttccctcttctggttgctggagccccggatagagatcgtggtggtggggactggagaccggaccgagaggctgcagtcccaggtgcttcaagccatgaggcagcggggcattgctgtggaagtgcaggacacgcccaatgcctgtgccaccttcaacttcctgtgtcatgaaggccgagtaactggagctgctctcatccctccaccaggagggacttcacttacatctttgggccaagctgctcaatgaaccgccaggaactgacctgctgactgcactctgccaggcttcccaatgctttcactcttatctaccctttggcacttatcttgcttatcaacataataatttatacacttctcccattttgtatcaggtgtgttgctggccaggagctgatggctcactgggctcttggaggggaatgtgaagaaaccaaggagtcactttttcatctagattacttaggattccttgacttttcagaagtcgggaagcagtatgtttgcctgttgtagacctacttgctcacatgcagatttgagaggacctcaacggcttttctcacaaaatcgctgattgtt

SEQ ID NO: 4412 - protein, 184 aa, Homo sapiens; identical to SEQ ID NO: 419

SEQ ID NO: 4413 - DNA, 1921 bp, Homo sapiens
gcgcccgtggggccggagaggaagtaaacccgcgcgtccacctcggggacacccccgcgctcggtggcctttgtccggtgacgctgccagcgcccggagcaccaggggccgaaggggtccacagagcagccgcgggacccccggaaacccattgcgaccggccccaggagacccaccaccaggctcccactgtgccgagcttcccgctcgcccggccccgcgggtagcgaaagcgacaatgttcccctgaggccacgacagagccggcgtgccgagatgcccaaaccccgcgcgggggccagcgactctcgcgccagtaggcccttgacttggatcaagacgggggacgggggactcccaggacgcgagcagagtgaacgaggacaaggtgatgctccacgcgcttctacttcaagtctggtccggttcggcctggtctgggccagccgaacagccacccaaacactatcacagcttgcccttccgcttgctctggctgcctgcagacttggagccattttaaggagaaaccacctggccacgccccctagagaacccgagaagccaatccacgctcggccacgcccctctccgcgcgctgcggagaggccaacggtcgcgcgggtgacggttagggcggggcgtgcttccgcgtctagccggagaaacttgagccggctgccccgcccacggtgcccgaagccccaaaggctggaattaggggctagaagtctggcacccaccgcctggccaggtgttcgggacgcgaccaggtgggcggtcgccccgccccgggagcgcggcttaatagctgagagcccgggggccaggccgcggctgcggcccaggcaacgccctgagggtggccacgctgccaggtgttccactcccccgggactatgggcaagggcccggggcggggagggcggcaggtgctgacactggagctgcgccggaggtcggggaactcggcctcctaagactgaggacactcgcctgctgggccggtcgagctgtgcggtgccctccgggacgcagggggcgctgcagccacgctgggtcaggctccgcagggccctcccaacccggggactaacggcgccggtgacgacttcgccgcgcgttggtcagccatggccaccgctctcgcgctacgtagcttgtaccgagcgcgaccctcgctgcgctgtccgcccgttgagcttccctgggccccgcggcgagggcatcggctctcgccggcggatgacgagctgtatcagcggacgcgcatctctctgctgcaacgcgaggccgctcaggtgggatcccaccaggacatcaccgaagacagcttttccctcttctggttgctggagccccggatagagatcgtggtggtggggactggagaccggaccgagaggctgcagtcccaggtgcttcaagccatgaggcagcggggcattgctgtggaagtgcaggacacgcccaatgcctgtgccaccttcaacttcctgtgtcatgaaggccgagtaactggagctgctctcatccctccaccaggagggacttcacttacatctttgggccaagctgctcaatgaaccgccaggaactgacctgctgactgcactctgccaggcttcccaatgctttcactcttatctaccctttggcacttatcttgcttatcaacataataatttatacacttctcccattttgtatcaggtgtgttgctggccaggagctgatggctcactgggctcttggaggggaatgtgaagaaaccaaggagtcactttttcatctagattacttaggattccttgacttttcagaagtcgggaagcagtatgtttgcctgttgtagacctacttgctcacatgcagatttgagaggacctcaacggcttttctcacaaaatcgctgattgtt

SEQ ID NO: 4414 - protein, 150 aa, Homo sapiens; identical to SEQ ID NO: 4396

SEQ ID NO: 4415 - DNA, 1586 bp, Homo sapiens
gcgcccgtggggccggagaggaagtaaacccgcgcgtccacctcggggacacccccgcgctcggtggcctttgtccggtgacgctgccagcgcccggagcaccaggggccgaaggggtccacagagcagccgcgggacccccggaaacccattgcgaccggccccaggagacccaccaccaggctcccactgtgccgagcttcccgctcgcccggccccgcgggtagcgaaagcgacaatgttcccctgaggccacgacagagccggcgtgccgagatgcccaaaccccgcgcgggggccagcgactctcgcgccagtaggcccttgacttggatcaagacgggggacgggggactcccaggacgcgagcagagtgaacgaggacaaggtgatgctccacgcgcttctacttcaagtctggtccggttcggcctggtctgggccagccgaacagccacccaaacactatcacagcttgcccttccgcttgctctggctgcctgcagacttggagccattttaaggagaaaccacctggccacgccccctagagaacccgagaagccaatccacgctcggccacgcccctctccgcgcgctgcggagaggccaacggtcgcgcgggtgacggttagggcggggcgtgcttccgcgtctagccggagaaacttgagccggctgccccgcccacggtgcccgaagccccaaaggctggaattaggggctagaagtctggcacccaccgcctggccaggtgttcgggacgcgaccagggccccgcggcgagggcatcggctctcgccggcggatgacgagctgtatcagcggacgcgcatctctctgctgcaacgcgaggccgctcaggcaatgtacatcgacagctacaacagccgcggcttcatgataaacggaaaccgcgtgctcggcccctgcgctctgctcccgcactcggtggtgcagtggaacgtgggatcccaccaggacatcaccgaagacagcttttccctcttctggttgctggagccccggatagagatcgtggtggtggggactggagaccggaccgagaggctgcagtcccaggtgcttcaagccatgaggcagcggggcattgctgtggaagtgcaggacacgcccaatgcctgtgccaccttcaacttcctgtgtcatgaaggccgagtaactggagctgctctcatccctccaccaggagggacttcacttacatctttgggccaagctgctcaatgaaccgccaggaactgacctgctgactgcactctgccaggcttcccaatgctttcactcttatctaccctttggcacttatcttgcttatcaacataataatttatacacttctcccattttgtatcaggtgtgttgctggccaggagctgatggctcactgggctcttggaggggaatgtgaagaaaccaaggagtcactttttcatctagattacttaggattccttgacttttcagaagtcgggaagcagtatgtttgcctgttgtagacctacttgctcacatgcagatttgagaggacctcaacggcttttctcacaaaatcgctgattgtt

SEQ ID NO: 4416 - protein, 324 aa, Homo sapiens; identical to SEQ ID NO: 4400

SEQ ID NO: 4417 - DNA, 2204 bp, Homo sapiens
gcgcccgtggggccggagaggaagtaaacccgcgcgtccacctcggggacacccccgcgctcggtggcctttgtccggtgacgctgccagcgcccggagcaccaggggccgaaggggtccacagagcagccgcgggacccccggaaacccattgcgaccggccccaggagacccaccaccaggctcccactgtgccgagcttcccgctcgcccggccccgcgggtagcgaaagcgacaatgttcccctgaggccacgacagagccggcgtgccgagatgcccaaaccccgcgcgggggccagcgactctcgcgccagtaggcccttgacttggatcaagacgggggacgggggactcccaggacgcgagcagagtgaacgaggacaaggtgatgctccacgcgcttctacttcaagtctggtccggttcggcctggtctgggccagccgaacagccacccaaacactatcacagcttgcccttccgcttgctctggctgcctgcagacttggagccattttaaggagaaaccacctggccacgccccctagagaacccgagaagccaatccacgctcggccacgcccctctccgcgcgctgcggagaggccaacggtcgcgcgggtgacggttagggcggggcgtgcttccgcgtctagccggagaaacttgagccggctgccccgcccacggtgcccgaagccccaaaggctggaattaggggctagaagtctggcacccaccgcctggccaggtgttcgggacgcgaccaggtgggcggtcgccccgccccgggagcgcggcttaatagctgagagcccgggggccaggccgcggctgcggcccaggcaacgccctgagggtggccacgctgccaggtgttccactcccccgggactatgggcaagggcccggggcggggagggcggcaggtgctgacactggagctgcgccggaggtcggggaactcggcctcctaagactgaggacactcgcctgctgggccggtcgagctgtgcggtgccctccgggacgcagggggcgctgcagccacgctgggtcaggctccgcagggccctcccaacccggggactaacggcgccggtgacgacttcgccgcgcgttggtcagccatggccaccgctctcgcgctacgtagcttgtaccgagcgcgaccctcgctgcgctgtccgcccgttgagcttccctgggccccgcggcgagggcatcggctctcgccggcggatgacgagctgtatcagcggacgcgcatctctctgctgcaacgcgaggccgctcaggcaatgtacatcgacagctacaacagccgcggcttcatgataaacggaaaccgcgtgctcggcccctgcgctctgctcccgcactcggtggtgcagtggaacgtgggatcccaccaggacatcaccgaagacagcttttccctcttctggttgctggagccccggatagagatcgtggtggtggggactggagaccggaccgagaggctgcagtcccaggtgcttcaagccatgaggcagcggggcattgctgtggaagtgcaggacacggtgagtcccgggactggggcatgctgcggggagcacaggcctggcgctagacaggctgatgctggccttttctttgcagcccaatgcctgtgccaccttcaacttcctgtgtcatgaaggccgagtaactggagctgctctcatccctccaccaggagggacttcacttacatctttgggccaagctgctcaatgaaccgccaggaactgacctgctgactgcactctgccaggcttcccaatgctttcactcttatctaccctttggcacttatcttgcttatcaacataataatttatacacttctcccattttgtatcaggtgtgttgctggccaggagctgatggctcactgggctcttggaggggaatgtgaagaaaccaaggagtcactttttcatctagattacttaggattccttgacttttcagaagtcgggaagcagtatgtttgcctgttgtagacctacttgctcacatgcagatttgagaggacctcaacggcttttctcacaaaatcgctgattgtttttctttttttgagatggagtctcgctgtcgcccgggctgcagtgcagtggcgtgatcttggcccactacaacctccacctcctggattcaagcgattctcg

SEQ ID NO: 4418 - protein, 184 aa, Homo sapiens; identical to SEQ ID NO: 4392

SEQ ID NO: 4419 - DNA, 2311 bp, Homo sapiens
gcgcccgtggggccggagaggaagtaaacccgcgcgtccacctcggggacacccccgcgctcggtggcctttgtccggtgacgctgccagcgcccggagcaccaggggccgaaggggtccacagagcagccgcgggacccccggaaacccattgcgaccggccccaggagacccaccaccaggctcccactgtgccgagcttcccgctcgcccggccccgcgggtagcgaaagcgacaatgttcccctgaggccacgacagagccggcgtgccgagatgcccaaaccccgcgcgggggccagcgactctcgcgccagtaggcccttgacttggatcaagacgggggacgggggactcccaggacgcgagcagagtgaacgaggacaaggtgatgctccacgcgcttctacttcaagtctggtccggttcggcctggtctgggccagccgaacagccacccaaacactatcacagcttgcccttccgcttgctctggctgcctgcagacttggagccattttaaggagaaaccacctggccacgccccctagagaacccgagaagccaatccacgctcggccacgcccctctccgcgcgctgcggagaggccaacggtcgcgcgggtgacggttagggcggggcgtgcttccgcgtctagccggagaaacttgagccggctgccccgcccacggtgcccgaagccccaaaggctggaattaggggctagaagtctggcacccaccgcctggccaggtgttcgggacgcgaccaggtgggcggtcgccccgccccgggagcgcggcttaatagctgagagcccgggggccaggccgcggctgcggcccaggcaacgccctgagggtggccacgctgccaggtgttccactcccccgggactatgggcaagggcccggggcggggagggcggcaggtgctgacactggagctgcgccggaggtcggggaactcggcctcctaagactgaggacactcgcctgctgggccggtcgagctgtgcggtgccctccgggacgcagggggcgctgcagccacgctgggtcaggctccgcagggccctcccaacccggggactaacggcgccggtgacgacttcgccgcgcgttggtcagccatggccaccgctctcgcgctacgtagcttgtaccgagcgcgaccctcgctgcgctgtccgcccgttgagcttccctgggccccgcggcgagggcatcggctctcgccggcggatgacgagctgtatcagcggacgcgcatctctctgctgcaacgcgaggccgctcaggcaatgtacatcgacagctacaacagccgcggcttcatgataaacggaaaccgcgtgctcggcccctgcgctctgctcccgcactcggtggtgcagtggaacgtgggatcccaccaggacatcaccgaagacagcttttccctcttctggttgctggagccccggataggtactggggaaggggagggagaacagaggtgttctgggccccagaaggcgacccccactgcagcctctcaacagaactgtagactagccacacccacccttccctagagatcgtggtggtggggactggagaccggaccgagaggctgcagtcccaggtgcttcaagccatgaggcagcggggcattgctgtggaagtgcaggacacggtgagtcccgggactggggcatgctgcggggagcacaggcctggcgctagacaggctgatgctggccttttctttgcagcccaatgcctgtgccaccttcaacttcctgtgtcatgaaggccgagtaactggagctgctctcatccctccaccaggagggacttcacttacatctttgggccaagctgctcaatgaaccgccaggaactgacctgctgactgcactctgccaggcttcccaatgctttcactcttatctaccctttggcacttatcttgcttatcaacataataatttatacacttctcccattttgtatcaggtgtgttgctggccaggagctgatggctcactgggctcttggaggggaatgtgaagaaaccaaggagtcactttttcatctagattacttaggattccttgacttttcagaagtcgggaagcagtatgtttgcctgttgtagacctacttgctcacatgcagatttgagaggacctcaacggcttttctcacaaaatcgctgattgtttttctttttttgagatggagtctcgctgtcgcccgggctgcagtgcagtggcgtgatcttggcccactacaacctccacctcctggattcaagcgattctcg

SEQ ID NO: 4420 - protein, 147 aa, Homo sapiens [sequence omitted]

SEQ ID NO: 4421 - DNA, 880 bp, Homo sapiens
aggggccgaaggggtccacagagcagccgcgggacccccggaaacccattgcgaccggccccaggagacccaccaccaggctcccactgtgccgagcttcccgctcgcccggccccgcgggtagcgaaagcgacaatgttcccctgaggccacgacagagccggcgtgccgagatgcccaaaccccgcgcgggggccagcgactctcgcgccagtaggcccttgacttggatcaagacgggggacgggggactcccaggacgcgagcagagtgaacgaggacaagggccccgcggcgagggcatcggctctcgccggcggatgacgagctgtatcagcggacgcgcatctctctgctgcaacgcgaggccgctcaggcaatgtacatcgacagctacaacagccgcggcttcatgataaacggaaaccgcgtgctcggcccctgcgctctgctcccgcactcggtggtgcagtggaacgtgggatcccaccaggacatcaccgaagacagcttttccctcttctggttgctggagccccggatagagatcgtggtggtggggactggagaccggaccgagaggctgcagtcccaggtgcttcaagccatgaggcagcggggcattgctgtggaagtgcaggacacgcccaatgcctgtgccaccttcaacttcctgtgtcatgaaggccgagtaactggagctgctctcatccctccaccaggagggacttcacttacatctttgggccaagctgctcaatgaaccgccaggaactgacctgctgactgcactctgccaggcttcccaatgctttcactcttatctaccctttggcacttatcttgcttatcaacataataatttatacacttctcccat

SEQ ID NO: 4422 - protein, 127 aa, Homo sapiens; identical to SEQ ID NO: 421

SEQ ID NO: 4423 - DNA, 1082 bp, Homo sapiens
aggggccgaaggggtccacagagcagccgcgggacccccggaaacccattgcgaccggccccaggagacccaccaccaggctcccactgtgccgagcttcccgctcgcccggccccgcgggtagcgaaagcgacaatgttcccctgaggccacgacagagccggcgtgccgagatgcccaaaccccgcgcgggggccagcgactctcgcgccagtaggcccttgacttggatcaagacgggggacgggggactcccaggacgcgagcagagtgaacgaggacaagggccccgcggcgagggcatcggctctcgccggcggatgacgagctgtatcagcggacgcgcatctctctgctgcaacgcgaggccgctcaggcaatgtacatcgacagctacaacagccgcggcttcatgataaacggaaaccgcgtgctcggcccctgcgctctgctcccgcactcggtggtgcagtggaacgtgggatcccaccaggacatcaccgaagacagcttttccctcttctggttgctggagccccggatagagatcgtggtggtggggactggagaccggaccgagaggctgcagtcccaggtgcttcaagccatgaggcagcggggcattgctgtggaagtgcaggacacgcccaatgcctgtgccaccttcaacttcctgtgtcatgaaggccgagtaactggagctgctctcatccctccaccaggagggacttcacttacatctttgggccaagctgctcaatgaaccgccaggaactgacctgctgactgcactctgccaggcttcccaatgctttcactcttatctaccctttggcacttatcttgcttatcaacataataatttatacacttctcccattttgtatcaggtgtgttgctggccaggagctgatggctcactgggctcttggaggggaatgtgaagaaaccaaggagtcactttttcatctagattacttaggattccttgacttttcagaagtcgggaagcagtatgtttgcctgttgtagacctacttgctcacatgcagatttgagaggacctcaacggcttttctcac

SEQ ID NO: 4424 - protein, 127 aa, Homo sapiens; identical to SEQ ID NO: 421

SEQ ID NO: 4425 - DNA, 1098 bp, Homo sapiens
aggggccgaaggggtccacagagcagccgcgggacccccggaaacccattgcgaccggccccaggagacccaccaccaggctcccactgtgccgagcttcccgctcgcccggccccgcgggtagcgaaagcgacaatgttcccctgaggccacgacagagccggcgtgccgagatgcccaaaccccgcgcgggggccagcgactctcgcgccagtaggcccttgacttggatcaagacgggggacgggggactcccaggacgcgagcagagtgaacgaggacaagggccccgcggcgagggcatcggctctcgccggcggatgacgagctgtatcagcggacgcgcatctctctgctgcaacgcgaggccgctcaggcaatgtacatcgacagctacaacagccgcggcttcatgataaacggaaaccgcgtgctcggcccctgcgctctgctcccgcactcggtggtgcagtggaacgtgggatcccaccaggacatcaccgaagacagcttttccctcttctggttgctggagccccggatagagatcgtggtggtggggactggagaccggaccgagaggctgcagtcccaggtgcttcaagccatgaggcagcggggcattgctgtggaagtgcaggacacgcccaatgcctgtgccaccttcaacttcctgtgtcatgaaggccgagtaactggagctgctctcatccctccaccaggagggacttcacttacatctttgggccaagctgctcaatgaaccgccaggaactgacctgctgactgcactctgccaggcttcccaatgctttcactcttatctaccctttggcacttatcttgcttatcaacataataatttatacacttctcccattttgtatcaggtgtgttgctggccaggagctgatggctcactgggctcttggaggggaatgtgaagaaaccaaggagtcactttttcatctagattacttaggattccttgacttttcagaagtcgggaagcagtatgtttgcctgttgtagacctacttgctcacatgcagatttgagaggacctcaacggcttttctcacaaaatcgctgattgtt

SEQ ID NO: 4426 - protein, 127 aa, Homo sapiens; identical to SEQ ID NO: 421

SEQ ID NO: 4427 - DNA, 1066 bp, Homo sapiens
ctgtgaccttgcccgtgtctctgcctctccctgcagtgaagctgacaaaatcaaagtggcccagggagtgtctggtgctgtgcaggacaaagggtcaatccacaaatttgtcccttacctgattgctggcatccaacactcatgccaggacattggtgccaagagcttgacccaagtccggtgagcttggggagctgggacatgggtagaggggctggtccagggccagctacccacatttgacctctgcccttcttcagagccatgatgtactctggggagcttaagtttgagaagagaacgtcctcagcccaggtggaaggtggcgtccatagcctccattcgtatgagaagcggcttttctgaaaagggatccagcacacctcctcggtttttttttcaataaaagtttagaaagaaaaaagtgatgcctgatctttcaacagacaggtggggctctgtagctgccactaccacagatgcacacaaaaacagcaccctcatttccagggggagcctcaggccccgagataaatgtgctccatggacctggaagcgggtagttccaggtccaaaaagttcctcctgaggctgctcacaaaacagctgactatagctatagctatggctcttggggtttcagtctcacactgagcatctgactctggctcccaaggggtcaaagaacaagccctgggactggcatacacagggcatcctgctagcccatagcttggccatataggaccaggtcaacacacatatatattccctaacttgaatctctctcggccaggcacattggctcacgtctgtaatcccagcactttgggaggcaggtggatcacttgagatcaggagttcgagaccatcctggccaacatggtgaaccctttctctactaaaaatacaaaaattagctgggcgtggtgatgcatacctctagtcccagctactcaggaggctgaggcaggagaatcactgaaacccaggaggcggaggttgcagtgagctgagactgcgccactgcactccaccctggcgaaagagcaagactcatctccag

SEQ ID NO: 4428 - protein, 33 aa, Homo sapiens
MMYSGELKFEKRTSSAQVEGGVHSLHSYEKRLF

SEQ ID NO: 4429 - DNA, 1171 bp, Homo sapiens
agtgctggcctgtgggcggccccaagcaacagcagtgtacaaggtgtcagagtatgcacggcgctttggtgttccgtcatgatgggctctctcctggctgccaccactgaggcccctggtgaatacttcttttccgatgggatccggctaaagaaatatcgcggtatgggttctctcgatgccatggacaagcacctcagcagccagaacagatatttcagtgaagctgacaaaatcaaagtggcccagggagtgtctggtgctgtgcaggacaaagggtcaatccacaaatttgtcccttacctgattgctggcatccaacactcatgccaggacattggtgccaagagcttgacccaagtccgagccatgatgtactctggggagcttaagtttgagaagagaacgtcctcagcccaggtggaaggtggcgtccatagcctccattcgtatgagaagcggcttttctgaaaagggatccagcacacctcctcggtttttttttcaataaaagtttagaaagaaaaaagtgatgcctgatctttcaacagacaggtggggctctgtagctgccactaccacagatgcacacaaaaacagcaccctcatttccagggggagcctcaggccccgagataaatgtgctccatggacctggaagcgggtagttccaggtccaaaaagttcctcctgaggctgctcacaaaacagctgactatagctatagctatggctcttggggtttcagtctcacactgagcatctgactctggctcccaaggggtcaaagaacaagccctgggactggcatacacagggcatcctgctagcccatagcttggccatataggaccaggtcaacacacatatatattccctaacttgaatctctctcggccaggcacattggctcacgtctgtaatcccagcactttgggaggcaggtggatcacttgagatcaggagttcgagaccatcctggccaacatggtgaaccctttctctactaaaaatacaaaaattagctgggcgtggtgatgcatacctctagtcccagctactcaggaggctgaggcaggagaatcactgaaacccaggaggcggaggttgcagtgagctgagactgcgccactgcactccaccctggcgaaagagcaagactcatctccag

SEQ ID NO: 4430 - protein, 130 aa, Homo sapiens
MMGSLLAATTEAPGEYFFSDGIRLKKYRGMGSLDAMDKHLSSQNRYFSEADKIKVAQGVSGAVQDKGSIHKFVPYLIAGIQHSCQDIGAKSLTQVRAMMYSGELKFEKRTSSAQVEGGVHSLHSYEKRLF

SEQ ID NO: 4431 - DNA, 1648 bp, Homo sapiens
agccatcccagacacgtctgttcctcagccaagctgcagtcctgatgcagatgtagccaaaagctcctgggtcctaaatatggccacagggtccactgcccgtccccattaaccctatccacccatgtgttcctccatctcaacagtgctggcctgtgggcggccccaagcaacagcagtgtacaaggtgtcagagtatgcacggcgctttggtgttccggtcattgctgatggaggaatccaaaatgtgggtcatattgcgaaagccttggcccttggggcctccacagtcatgatgggctctctcctggctgccaccactgaggcccctggtgaatacttcttttccgatgggatccggctaaagaaatatcgcggtatgggttctctcgatgccatggacaagcacctcagcagccagaacagatatttcaggtgggacaggcaagccagttaccccaccctaatcctgcactgacagtctcatctctgctgtgaccttgcccgtgtctctgcctctccctgcagtgaagctgacaaaatcaaagtggcccagggagtgtctggtgctgtgcaggacaaagggtcaatccacaaatttgtcccttacctgattgctggcatccaacactcatgccaggacattggtgccaagagcttgacccaagtccggtgagcttggggagctgggacatgggtagaggggctggtccagggccagctacccacatttgacctctgcccttcttcagagccatgatgtactctggggagcttaagtttgagaagagaacgtcctcagcccaggtggaaggtggcgtccatagcctccattcgtaagtcaccctgtccttggtggggcctctgccatacctcatgcctcctttctcctgccctcacctcacaggtggtccttctgcctgcaggtatgagaagcggcttttctgaaaagggatccagcacacctcctcggtttttttttcaataaaagtttagaaagaaaaaagtgatgcctgatctttcaacagacaggtggggctctgtagctgccactaccacagatgcacacaaaaacagcaccctcatttccagggggagcctcaggccccgagataaatgtgctccatggacctggaagcgggtagttccaggtccaaaaagttcctcctgaggctgctcacaaaacagctgactatagctatagctatggctcttggggtttcagtctcacactgagcatctgactctggctcccaaggggtcaaagaacaagccctgggactggcatacacagggcatcctgctagcccatagcttggccatataggaccaggtcaacacacatatatattccctaacttgaatctctctcggccaggcacattggctcacgtctgtaatcccagcactttgggaggcaggtggatcacttgagatcaggagttcgagaccatcctggccaacatggtgaaccctttctctactaaaaatacaaaaattagctgggcgtggtgatgcatacctctagtcccagctactcaggaggctgaggcaggagaatcactgaaacccaggaggcggaggttgcagtgagctgagactgcgccactgcactccaccctggcgaaagagcaagactcatctccag

SEQ ID NO: 4432 - protein, 117 aa, Homo sapiens
MCSSISTVLACGRPQATAVYKVSEYARRFGVPVIADGGIQNVGHIAKALALGASTVMMGSLLAATTEAPGEYFFSDGIRLKKYRGMGSLDAMDKHLSSQNRYFRWDRQASYPTLILH

SEQ ID NO: 4433 - DNA, 2332 bp, Homo sapiens
tcggctggtttatattggcgcggcccagacggcagaggtctctgcggcgcggtcctcggagacacgcggcggtgtcctgtgttggccatggccgactacctgattagtgggggcacgtcctacgtgccagacgacggactcacagcacagcagctcttcaactgcggagacggcctcacctacaatgactttctcattctccctgggtacatcgacttcactgcagaccaggtggacctgacttctgctctgaccaagaaaatcactcttaagaccccactggtttcctctcccatggacacagtcacagaggctgggatggccatagcaatggcgcttacaggcggtattggcttcatccaccacaactgtacacctgaattccaggccaatgaagttcggaaagtgaagaaatatgaacagggattcatcacagaccctgtggtcctcagccccaaggatcgcgtgcgggatgtttttgaggccaaggcccggcatggtttctgcggtatcccaatcacagacacaggccggatggggagccgcttggtgggcatcatctcctccagggacattgattttctcaaagaggaggaacatgactgtttcttggaagagataatgacaaagagggaagacttggtggtagcccctgcaggcatcacactgaaggaggcaaatgaaattctgcagcgcagcaagaagggaaagttgcccattgtaaatgaagatgatgagcttgtggccatcattgcccggacagacctgaagaagaatcgggactacccactagcctccaaagatgccaagaaacagctgctgtgtggggcagccattggcactcatgaggatgacaagtataggctggacttgctcgcccaggctggtgtggatgtagtggttttggactcttcccagggaaattccatcttccagatcaatatgatcaagtacatcaaagacaaataccctaatctccaagtcattggaggcaatgtggtcactgctgcccaggccaagaacctcattgatgcaggtgtggatgccctgcgggtgggcatgggaagtggctccatctgcattacgcaggaagtgctggcctgtgggcggccccaagcaacagcagtgtacaaggtgtcagagtatgcacggcgctttggtgttccggtcattgctgatggaggaatccaaaatgtgggtcatattgcgaaagccttggcccttggggcctccacagtcatgatgggctctctcctggctgccaccactgaggcccctggtgaatacttcttttccgatgggatccggctaaagaaatatcgcggtatgggttctctcgatgccatggacaagcacctcagcagccagaacagatatttcagtgaagctgacaaaatcaaagtggcccagggagtgtctggtgctgtgcaggacaaagggtcaatccacaaatttgtcccttacctgattgctggcatccaacactcatgccaggacattggtgccaagagcttgacccaagtccgagccatgatgtactctggggagcttaagtttgagaagagaacgtcctcagcccaggtggaaggtggcgtccatagcctccattcgtatgagaagcggcttttctgaaaagggatccagcacacctcctcggtttttttttcaataaaagtttagaaagaaaaaagtgatgcctgatctttcaacagacaggtggggctctgtagctgccactaccacagatgcacacaaaaacagcaccctcatttccagggggagcctcaggccccgagataaatgtgctccatggacctggaagcgggtagttccaggtccaaaaagttcctcctgaggctgctcacaaaacagctgactatagctatagctatggctcttggggtttcagtctcacactgagcatctgactctggctcccaaggggtcaaagaacaagccctgggactggcatacacagggcatcctgctagcccatagcttggccatataggaccaggtcaacacacatatatattccctaacttgaatctctctcggccaggcacattggctcacgtctgtaatcccagcactttgggaggcaggtggatcacttgagatcaggagttcgagaccatcctggccaacatggtgaaccctttctctactaaaaatacaaaaattagctgggcgtggtgatgcatacctctagtcccagctactcaggaggctgaggcaggagaatcactgaaacccaggaggcggaggttgcagtgagctgagactgcgccactgcactccaccctggcgaaagagcaagactcatctccag

SEQ ID NO: 4434 - protein, 514 aa, Homo sapiens; identical to SEQ ID NO: 429

SEQ ID NO: 4435 - DNA, 685 bp, Homo sapiens
cattgctgatggaggaatccaaaatgtgggtcatattgcgaaagccttggcccttggggcctccacagtcatgatgggctctctcctggctgccaccactgaggcccctggtgaatacttcttttccgatgggatccggctaaagaaatatcgcggtatgggttctctcgatgccatggacaagcacctcagcagccagaacagatatttcagtgaagctgacaaaatcaaagtggcccagggagtgtctggtgctgtgcaggacaaagggtcaatccacaaatttgtcccttacctgattgctggcatccaacactcatgccaggacattggtgccaagagcttgacccaagtccggtgagcttggggagctgggacatgggtagaggggctggtccagggccagctacccacatttgacctctgcccttcttcagagccatgatgtactctggggagcttaagtttgagaagagaacgtcctcagcccaggtggaaggtggcgtccatagcctccattcgtaagtcaccctgtccttggtggggcctctgccatacctcatgcctcctttctcctgccctcacctcacaggtggtccttctgcctgcaggtatgagaagcggcttttctgaaaagggatccagcacacctcctcggtttttttttcaataaaagtttagaaag

SEQ ID NO: 4436 - protein, 96 aa, Homo sapiens
MMGSLLAATTEAPGEYFFSDGIRLKKYRGMGSLDAMDKHLSSQNRYFSEADKIKVAQGVSGAVQDKGSIHKFVPYLIAGIQHSCQDIGAKSLTQVR

SEQ ID NO: 4437 - DNA, 523 bp, Homo sapiens
agtgctggcctgtgggcggccccaagcaacagcagtgtacaaggtgtcagagtatgcacggcgctttggtgttccgtcatgatgggctctctcctggctgccaccactgaggcccctggtgaatacttcttttccgatgggatccggctaaagaaatatcgcggtatgggttctctcgatgccatggacaagcacctcagcagccagaacagatatttcagtgaagctgacaaaatcaaagtggcccagggagtgtctggtgctgtgcaggacaaagggtcaatccacaaatttgtcccttacctgattgctggcatccaacactcatgccaggacattggtgccaagagcttgacccaagtccgagccatgatgtactctggggagcttaagtttgagaagagaacgtcctcagcccaggtggaaggtggcgtccatagcctccattcgtatgagaagcggcttttctgaaaagggatccagcacacctcctcggtttttttttcaataaaagtttagaaag

SEQ ID NO: 4438 - protein, 130 aa, Homo sapiens; identical to SEQ ID NO: 4430

SEQ ID NO: 4439 - DNA, 1684 bp, Homo sapiens
tcggctggtttatattggcgcggcccagacggcagaggtctctgcggcgcggtcctcggagacacgcggcggtgtcctgtgttggccatggccgactacctgattagtgggggcacgtcctacgtgccagacgacggactcacagcacagcagctcttcaactgcggagacggcctcacctacaatgactttctcattctccctgggtacatcgacttcactgcagaccaggtggacctgacttctgctctgaccaagaaaatcactcttaagaccccactggtttcctctcccatggacacagtcacagaggctgggatggccatagcaatggcgcttacaggcggtattggcttcatccaccacaactgtacacctgaattccaggccaatgaagttcggaaagtgaagaaatatgaacagggattcatcacagaccctgtggtcctcagccccaaggatcgcgtgcgggatgtttttgaggccaaggcccggcatggtttctgcggtatcccaatcacagacacaggccggatggggagccgcttggtgggcatcatctcctccagggacattgattttctcaaagaggaggaacatgactgtttcttggaagagataatgacaaagagggaagacttggtggtagcccctgcaggcatcacactgaaggaggcaaatgaaattctgcagcgcagcaagaagggaaagttgcccattgtaaatgaagatgatgagcttgtggccatcattgcccggacagacctgaagaagaatcgggactacccactagcctccaaagatgccaagaaacagctgctgtgtggggcagccattggcactcatgaggatgacaagtataggctggacttgctcgcccaggctggtgtggatgtagtggttttggactcttcccagggaaattccatcttccagatcaatatgatcaagtacatcaaagacaaataccctaatctccaagtcattggaggcaatgtggtcactgctgcccaggccaagaacctcattgatgcaggtgtggatgccctgcgggtgggcatgggaagtggctccatctgcattacgcaggaagtgctggcctgtgggcggccccaagcaacagcagtgtacaaggtgtcagagtatgcacggcgctttggtgttccggtcattgctgatggaggaatccaaaatgtgggtcatattgcgaaagccttggcccttggggcctccacagtcatgatgggctctctcctggctgccaccactgaggcccctggtgaatacttcttttccgatgggatccggctaaagaaatatcgcggtatgggttctctcgatgccatggacaagcacctcagcagccagaacagatatttcagtgaagctgacaaaatcaaagtggcccagggagtgtctggtgctgtgcaggacaaagggtcaatccacaaatttgtcccttacctgattgctggcatccaacactcatgccaggacattggtgccaagagcttgacccaagtccgagccatgatgtactctggggagcttaagtttgagaagagaacgtcctcagcccaggtggaaggtggcgtccatagcctccattcgtatgagaagcggcttttctgaaaagggatccagcacacctcctcggtttttttttcaataaaagtttagaaag

SEQ ID NO: 4440 - protein, 514 aa, Homo sapiens; identical to SEQ ID NO: 429

SEQ ID NO: 4441 - DNA, 997 bp, Homo sapiens
agccatcccagacacgtctgttcctcagccaagctgcagtcctgatgcagatgtagccaaaagctcctgggtcctaaatatggccacagggtccactgcccgtccccattaaccctatccacccatgtgttcctccatctcaacagtgctggcctgtgggcggccccaagcaacagcagtgtacaaggtgtcagagtatgcacggcgctttggtgttccggtcattgctgatggaggaatccaaaatgtgggtcatattgcgaaagccttggcccttggggcctccacagtcatgatgggctctctcctggctgccaccactgaggcccctggtgaatacttcttttccgatgggatccggctaaagaaatatcgcggtatgggttctctcgatgccatggacaagcacctcagcagccagaacagatatttcaggtgggacaggcaagccagttaccccaccctaatcctgcactgacagtctcatctctgctgtgaccttgcccgtgtctctgcctctccctgcagtgaagctgacaaaatcaaagtggcccagggagtgtctggtgctgtgcaggacaaagggtcaatccacaaatttgtcccttacctgattgctggcatccaacactcatgccaggacattggtgccaagagcttgacccaagtccggtgagcttggggagctgggacatgggtagaggggctggtccagggccagctacccacatttgacctctgcccttcttcagagccatgatgtactctggggagcttaagtttgagaagagaacgtcctcagcccaggtggaaggtggcgtccatagcctccattcgtaagtcaccctgtccttggtggggcctctgccatacctcatgcctcctttctcctgccctcacctcacaggtggtccttctgcctgcaggtatgagaagcggcttttctgaaaagggatccagcacacctcctcggtttttttttcaataaaagtttaga

SEQ ID NO: 4442 - protein, 117 aa, Homo sapiens; identical to SEQ ID NO: 4432

SEQ ID NO: 4443 - DNA, 1062 bp, Homo sapiens
ggaaggagcaaggactccatcgcctttccccaaaggcattcagtcctgcttcttgtcacttagtagtagtctctttttatcctgtagcttacaggcggtattggcttcatccaccacaactgtacacctgaattccaggccaatgaagttcggaaagtgaaggtcagaagggcaacgatcattagcaagcgctcctgggaattgcactgaggtggggtggggtgggagtaggggtttattctaatttagtattctttcttcccaccatggggttcagttactgagaagaccctgagattctgtttcttaaagcagcagcaatagaccaggtgtacagtgcctccagcctacccatgtctctaagatgtgttggtgtgatttggtcttgtggcactgccaaagggatcgataagcagagaccccatgcttcagatcaagagcctgatgaaagtagttcaaagatgcgatgccctttctcaccatccctttccagaaatatgaacagggattcatcacagaccctgtggtcctcagccccaaggatcgcgtgcgggatgtttttgaggccaaggcccggcatggtttctgcggtatcccaatcacagacacaggccggatggggagccgcttggtgggcatcatctcctccagggacattgattttctcaaagaggaggaacatgactgtttcttggaagagataatgacaaagagggaagacttggtggtagcccctgcaggcatcacactgaaggaggcaaatgaaattctgcagcgcagcaagaagggtaagtcctagagctgggaaagggcctggaactaatgcctagggtcctgattcatgtcctgccctgaccacaggaaagttgcccattgtaaatgaagatgatgagcttgtggccatcattgcccggacagacctgaagaagaatcgggactacccactagcctccaaagatgccaagaaacagctgctgtgtggggcagccattggcactcatgaggatgacaagtataggctggacttgctcgcccaggctggtgtggatgtagtggttttgg

SEQ ID NO: 4444 - protein, 116 aa, Homo sapiens
MSLRCVGVIWSCGTAKGIDKQRPHASDQEPDESSSKMRCPFSPSLSRNMNRDSSQTLWSSAPRIACGMFLRPRPGMVSAVSQSQTQAGWGAAWWASSPPGTLIFSKRRNMTVSWKR

SEQ ID NO: 4445 - DNA, 765 bp, Homo sapiens
cgaaatcggctggtttatattggcgcggcccagacggcagaggtctctgcggcgcggtcctcggagacacgcggcggtgtcctgtgttggccatggccgactacctgattagtgggggcacgtcctacgtgccagacgacggactcacagcacagcagctcttcaactgcggagacggcctcacctacaatgactttctcattctccctgggtacatcgacttcactgcagaccaggtggacctgacttctgctctgaccaagaaaatcactcttaagaccccactggtttcctctcccatggacacagtcacagaggctgggatggccatagcaatggcgcttacaggcggtattggcttcatccaccacaactgtacacctgaattccaggccaatgaagttcggaaagtgaagaaatatgaacagggattcatcacagaccctgtggtcctcagccccaaggatcgcgtgcgggatgtttttgaggccaaggcccggcatggtttctgcggtatcccaatcacagacacaggccggatggggagccgcttggtgggcatcatctcctccagggacattgattttctcaaagaggaggaacatgactgtttcttggaagagataatgacaaagagggaagacttggtggtagcccctgcaggcatcacactgaaggaggcaaatgaaattctgcagcgcagcaagaagggtaagtccagaagaatcgggactacccactagcctccaaagatgccaagaaaca

SEQ ID NO: 4446 - protein, 216 aa, Homo sapiens
MADYLISGGTSYVPDDGLTAQQLFNCGDGLTYNDFLILPGYIDFTADQVDLTSALTKKITLKTPLVSSPMDTVTEAGMAIAMALTGGIGFIHHNCTPEFQANEVRKVKKYEQGFITDPVVLSPKDRVRDVFEAKARHGFCGIPITDTGRMGSRLVGIISSRDIDFLKEEEHDCFLEEIMTKREDLVVAPAGITLKEANEILQRSKKGKSRRIGTTH

SEQ ID NO: 4447 - DNA, 593 bp, Homo sapiens
ctctgcggcgcggtcctcggagacacgcggcggtgtcctgtgttggccatggccgactacctgattagtgggggcacgtcctacgtgccagacgacggactcacagcacagcagctcttcaactgcggagacggcctcacctacaatgactttctcattctccctgggtacatcgacttcactgcagaccaggtggacctgacttctgctctgaccaagaaaatcactcttaagaccccactggtttcctctcccatggacacagtcacagaggctgggatggccatagcaatggcgaaatatgaacagggattcatcacagaccctgtggtcctcagccccaaggatcgcgtgcgggatgtttttgaggccaaggcccggcatggtttctgcggtatcccaatcacagacacaggccggatggggagccgcttggtgggcatcatctcctccagggacattgattttctcaaagaggaggaacatgactgtttcttggaagagataatgacaaagagggaagacttggtggtagcccctgcaggcatcacactgaaggaggcaaatgaaattctgcagcgcagcaagaaggg

SEQ ID NO: 4448 - protein, 180 aa, Homo sapiens
MADYLISGGTSYVPDDGLTAQQLFNCGDGLTYNDFLILPGYIDFTADQVDLTSALTKKITLKTPLVSSPMDTVTEAGMAIAMAKYEQGFITDPVVLSPKDRVRDVFEAKARHGFCGIPITDTGRMGSRLVGIISSRDIDFLKEEEHDCFLEEIMTKREDLVVAPAGITLKEANEILQRSK

SEQ ID NO: 4449 - DNA, 907 bp, Homo sapiens
gcggcccagacggcagaggtctctgcggcgcggtcctcggagacacgcggcggtgtcctgtgttggccatggccgactacctgattagtgggggcacgtcctacgtgccagacgacggactcacagcacagcagctcttcaactgcggagacggcctcacctacaatgactttctcattctccctgggtacatcgacttcactgcagaccaggtggacctgacttctgctctgaccaagaaaatcactcttaagaccccactggtttcctctcccatggacacagtcacagaggctgggatggccatagcaatggcgcttacaggcggtattggcttcatccaccacaactgtacacctgaattccaggccaatgaagttcggaaagtgaaggtcagaagggcaacgatcattagcaagcgctcctgggaattgcactgaggtggggtggggtgggagtaggggtttattctaatttagtattctttcttcccaccatggggttcagttactgagaagaccctgagattctgtttcttaaagcagcagcaatagaccaggtgtacagtgcctccagcctacccatgtctctaagatgtgttggtgtgatttggtcttgtggcactgccaaagggatcgataagcagagaccccatgcttcagatcaagagcctgatgaaagtagttcaaagatgcgatgccctttctcaccatccctttccagaaatatgaacagggattcatcacagaccctgtggtcctcagccccaaggatcgcgtgcgggatgtttttgaggccaaggcccggcatggtttctgcggtatcccaatcacagacacaggccggatggggagccgcttggtgggcatcatctcctccagggacattgattttctcaaagaggagg

SEQ ID NO: 4450 - protein, 123 aa, Homo sapiens
MADYLISGGTSYVPDDGLTAQQLFNCGDGLTYNDFLILPGYIDFTADQVDLTSALTKKITLKTPLVSSPMDTVTEAGMAIAMALTGGIGFIHHNCTPEFQANEVRKVKVRRATIISKRSWELH

SEQ ID NO: 4451 - DNA, 2580 bp, Homo sapiens
agtagagacggggtttcaccatattggccaggatggtctcaatctcctgacctcgtgatccacccgcctcggccttccaaagtgctgggattacaggcatcagccactgcgcctggccggccttgctttttagagacagttgagatgagagaagacttggtaagggcaaacgggcgtgcatgccagttctttgggtcctggaccacctttgaaaatatgcaaagctctgtacactctcagagaattatgcatatatgcagagtttggtttatagttttctgtacttcactgtctctgagggcagtctttttgccctgtgttagccttggattagagggtaacaacaatcatgtaaggctgtggttctcaagtgtggtgttagaagtgctcatcatcaggttccacctcagaaacagattgggacccagctatctgtgttttaagaagctttccagatgatttttgccacactttagggagagtcccctgatgaaatttatactcctgtgtggtccttatgcttcacacatcccatattgtacctttgagagaccacctgccatcctcttgttgtgacagtactctattcctcctaggctatgtcttgcccagccacgtgactgaggagatgctatgggagtgcaagcagcttggggctcactccccctccaccttgctgaccaccctcatgttctttaataccaagtaagtgttctagaggctccactgctggcatctgtccagtgaagagtgtggaagctatccaagaggccttctgaattcctctgacatatatttgagaaactgggctactgaaagccctaaccccacttggctgcattttatttggtaaccagtgaggcaaacacccttgccagacccctaccatccatcttgatgtggttcctgcactggacactgcttgggtacgggcctgcccagatcttgggaatgtgggcagtggctcctctgaagcaccagtgggcagaggatgagtcatggtatcctcccggcacccctccctctgccttgcattttacttgtgatccaggtacttcctattgaagacagtggaccagcacatgaagctggccttctccaaggtcttgcgacagacaaagaagaacccctctaatcccaaggataaaagcacgagtatccggtacttgaaggcccttggaatacaccagactggccagaaaggtagggaaaggaggcagggatggcaaaaacaggtgctacttgtcctgccctgtcctgcccttgtgcctgtgaggctagtgataagtgtaaaggttgggatttgctggataaaattctccactcccttctccccagccaaaaattccaaactttcctcctagaagcagagaagccccagacagaatagctgcctcttcccttagtagtcactgcccatgcctcataccttccctcccccgaccctgtatttcctagttgggctggctgaaagcctaagtttcctgatctgggcctgaggtaaggcagtctgatgccaggtctgtggtggtggggatgtgtgttttatagttacagatgacatgtatgcagaacagacggaaaatccagagaatccattgagatgtcccatcaagctctatgatttctacctcttcaaatgcccccagagtgtgaaaggccggaatgacaccttttacctgacacctgagccagtggtggcccccaacagcccaatctggtactcagtccagcctatcagcagagagcagatgggacaaatgctgacgcggatcctggtgataagagaaattcaggaggccatcgcagtggccaatgcaagcactatgcactgagatgccttggccatggcacaagagaaaccagccaggaaaaaccagacagactttcacactaaagaagaggcctccatttttttttttcttttttttattggtgtagttacgaagcctttcaggctgcttctgtttaaaatataaaagaaaactttgccccctttgcatcttcataaacctgctgcggcagactcctcagccgatggtggctctgggtttccttgagtgtcatatgtcctagaaagttgctggctgactcttttttgtctggggcctggggaaagggcttggactgtgaaaagaaatgtggcccctttccatcttcaagagagatggaattaatgatggatggaccctggagggaatctccccagccgacttccactgggctgacagactttgctgaccacaggggaacgatgttcttttctttcttcatgatcagacataaacttagcatcttaatggaagaaaaatgaggggaacttcaattatgatttattaaagacaatttctattacaccctcctttatgacaagtgacattttagatgtaaaagtaaaaactttaccatgccttttttttttttgttggcctaacattgaggccttaaaacctgaggctcctgtgcctgatggaattcttgtaacatacacttgtgtatcatataaagataccactctgtttctcttatgtattcttactctagttgtttattaagaatgacaagcacgtcttttcaaca

SEQ ID NO: 4452 - protein, 90 aa, Homo sapiens [sequence omitted]

SEQ ID NO: 4453 - DNA, 2598 bp, Homo sapiens
gtccctcgcagctgcaagcagctcagatccaggtgcagcacgtgcaagcagcccagcagatccaggctgcagaaatcccggaggagcacatcccacatcagcaaatccaggctcagctggtggctggccagtctcttgctggtggtcagcagatccaaatccagaccgtgggtgccctttccccaccaccatcccagcagggctcaccccgggaaggggagcggcgggttggcacggccagtgtcctccaaccagtgaagaagcgcaaagtggacatgcccatcactgtgtcctacgccatctcagggcagccggtggccaccgtgctggccattccacagggccagcagcagagttatgtgtctttgaggccagacttactgacagtagacagtgcccacctgtacagtgccactgggaccattactagccctacaggagaaacctggaccatccctgtttattctgcccagccccggggggaccctcagcagcagagcattacccacattgccattccccaggaagcctacaacgcagttcacgtcagtggctcacccacagccctggcagctgttaagctggaggatgacaaggagaagatggtgggcaccacatctgtagtgaaaaactcccatgaagaggtagtgcagacccttgcaaactctctctttccagcacagttcatgaatggcaacatccacattccagtggctgtgcaggctgtggcaggcacgtaccagaatacggctcaaactgtccatatatgggacccccaacagcagccgcagcagcaaactccccaggaacagacaccaccaccacagcagcagcagcagcaactccaagttacttgttcagctcaaactgtccaggttgctgaagttgaaccacagtcacagccacagccttccccagaacttctgcttccaaattctttgaagccagaagaagggcttgaagtatggaaaaactgggcccagaccaagaatgctgaactagagaaggatgctcagaacagattggcacccattgggaggcgccaactgctgcgattccaggaagatctcatctcctctgctgtggcagagttgaattatgggctctgtctaatgacacgggaagctcgaaatggagaaggtgaaccctatgacccagatgtgctctactatattttcctgtgtattcaaaagtatctttttgaaaatggaagggtagatgacattttctccgatctttattatgttcggttcacggagtggctacatgaagttctgaaggatgttcagccccgggtcactccacttggctatgtcttgcccagccacgtgactgaggagatgctatgggagtgcaagcagcttggggctcactccccctccaccttgctgaccaccctcatgttctttaataccaagtacttcctattgaagacagtggaccagcacatgaagctggccttctccaaggtcttgcgacagacaaagaagaacccctctaatcccaaggataaaagcacgagtatccggtacttgaaggcccttggaatacaccagactggccagaaagttacagatgacatgtatgcagaacagacggaaaatccagagaatccattgagatgtcccatcaagctctatgatttctacctcttcaaatgcccccagagtgtgaaaggccggaatgacaccttttacctgacacctgagccagtggtggcccccaacagcccaatctggtactcagtccagcctatcagcagagagcagatgggacaaatgctgacgcggatcctggtgataagagaaattcaggaggccatcgcagtggccaatgcaagcactatgcactgagatgccttggccatggcacaagagaaaccagccaggaaaaaccagacagactttcacactaaagaagaggcctccatttttttttttcttttttttattggtgtagttacgaagcctttcaggctgcttctgtttaaaatataaaagaaaactttgccccctttgcatcttcataaacctgctgcggcagactcctcagccgatggtggctctgggtttccttgagtgtcatatgtcctagaaagttgctggctgactcttttttgtctggggcctggggaaagggcttggactgtgaaaagaaatgtggcccctttccatcttcaagagagatggaattaatgatggatggaccctggagggaatctccccagccgacttccactgggctgacagactttgctgaccacaggggaacgatgttcttttctttcttcatgatcagacataaacttagcatcttaatggaagaaaaatgaggggaacttcaattatgatttattaaagacaatttctattacaccctcctttatgacaagtgacattttagatgtaaaagtaaaaactttaccatgccttttttttttttgttggcctaacattgaggccttaaaacctgaggctcctgtgcctgatggaattcttgtaacatacacttgtgtatcatataaagataccactctgtttctcttatgtattcttactctagttgtttattaagaatgacaagcacgtcttttcaaca

SEQ ID NO: 4454 - protein, 525 aa, Homo sapiens [sequence omitted]

SEQ ID NO: 4455 - DNA, 3317 bp, Homo sapiens
attggctgtgagggttgaatgtaagatggcgcccagggagctgtgaggagaaaaccctgtcggtcttggagcgacgacggcagaaccagggtccctggcggtgcggcggggccggcgggtgcagcggaggcggcggcggcggcggcagtgacgtcgccggaatattagaagtcttaagaactcaggacaagcagcagaaatacatgcaacatggtgactggaaccctaaggactctgcaatatgaataattccctagagaacaccatctcctttgaagagtacatccgagtaaaggcacggtctgtcccgcaacacaggatgaaggaatttctggactcactggcctctaaggggccagaagcccttcaggagttccagcagacagccaccactaccatggtgtaccaacagggtgggaactgcatatacacagacagcactgaagtggctgggtctttgcttgaacttgcctgtccagtcaccaccagtgttcagccacaaacccagcaagaacagcagatccaggttcagcagccgcagcaggttcaggtccaggtgcaggtacagcagtctccgcaacaggtctcggctcagctctccccacaactcaccgttcaccagcctactgagcaacccatccaggtccaggtgcagatccaaggccaggcaccacagtcagcagccccctccattcagaccccgtctctgcagagtcccagtccctcgcagctgcaagcagctcagatccaggtgcagcacgtgcaagcagcccagcagatccaggctgcagaaatcccggaggagcacatcccacatcagcaaatccaggctcagctggtggctggccagtctcttgctggtggtcagcagatccaaatccagaccgtgggtgccctttccccaccaccatcccagcagggctcaccccgggaaggggagcggcgggttggcacggccagtgtcctccaaccagtgaagaagcgcaaagtggacatgcccatcactgtgtcctacgccatctcagggcagccggtggccaccgtgctggccattccacagggccagcagcagagttatgtgtctttgaggccagacttactgacagtagacagtgcccacctgtacagtgccactgggaccattactagccctacaggagaaacctggaccatccctgtttattctgcccagccccggggggaccctcagcagcagagcattacccacattgccattccccaggaagcctacaacgcagttcacgtcagtggctcacccacagccctggcagctgttaagctggaggatgacaaggagaagatggtgggcaccacatctgtagtgaaaaactcccatgaagaggtagtgcagacccttgcaaactctctctttccagcacagttcatgaatggcaacatccacattccagtggctgtgcaggctgtggcaggcacgtaccagaatacggctcaaactgtccatatatgggacccccaacagcagccgcagcagcaaactccccaggaacagacaccaccaccacagcagcagcagcagcaactccaagttacttgttcagctcaaactgtccaggttgctgaagttgaaccacagtcacagccacagccttccccagaacttctgcttccaaattctttgaagccagaagaagggcttgaagtatggaaaaactgggcccagaccaagaatgctgaactagagaaggatgctcagaacagattggcacccattgggaggcgccaactgctgcgattccaggaagatctcatctcctctgctgtggcagagttgaattatgggctctgtctaatgacacgggaagctcgaaatggagaaggtgaaccctatgacccagatgtgctctactatattttcctgtgtattcaaaagtatctttttgaaaatggaagggtagatgacattttctccgatctttattatgttcggttcacggagtggctacatgaagttctgaaggatgttcagccccgggtcactccacttggctatgtcttgcccagccacgtgactgaggagatgctatgggagtgcaagcagcttggggctcactccccctccaccttgctgaccaccctcatgttctttaataccaagtacttcctattgaagacagtggaccagcacatgaagctggccttctccaaggtcttgcgacagacaaagaagaacccctctaatcccaaggataaaagcacgagtatccggtacttgaaggcccttggaatacaccagactggccagaaagttacagatgacatgtatgcagaacagacggaaaatccagagaatccattgagatgtcccatcaagctctatgatttctacctcttcaaatgcccccagagtgtgaaaggccggaatgacaccttttacctgacacctgagccagtggtggcccccaacagcccaatctggtactcagtccagcctatcagcagagagcagatgggacaaatgctgacgcggatcctggtgataagagaaattcaggaggccatcgcagtggccaatgcaagcactatgcactgagatgccttggccatggcacaagagaaaccagccaggaaaaaccagacagactttcacactaaagaagaggcctccatttttttttttcttttttttattggtgtagttacgaagcctttcaggctgcttctgtttaaaatataaaagaaaactttgccccctttgcatcttcataaacctgctgcggcagactcctcagccgatggtggctctgggtttccttgagtgtcatatgtcctagaaagttgctggctgactcttttttgtctggggcctggggaaagggcttggactgtgaaaagaaatgtggcccctttccatcttcaagagagatggaattaatgatggatggaccctggagggaatctccccagccgacttccactgggctgacagactttgctgaccacaggggaacgatgttcttttctttcttcatgatcagacataaacttagcatcttaatggaagaaaaatgaggggaacttcaattatgatttattaaagacaatttctattacaccctcctttatgacaagtgacattttagatgtaaaagtaaaaactttaccatgccttttttttttttgttggcctaacattgaggccttaaaacctgaggctcctgtgcctgatggaattcttgtaacatacacttgtgtatcatataaagataccactctgtttctcttatgtattcttactctagttgtttattaagaatgacaagcacgtcttttcaaca

SEQ ID NO: 4456 - protein, 776 aa, Homo sapiens; identical to SEQ ID NO: 431

SEQ ID NO: 4457 - DNA, 3259 bp, Homo sapiens
ctattggctgtgagggttgaatgtaagatggcgcccagggagctgtgaggagaaaaccctgtcggtcttggagcgacgacggcagaaccagggtccctggcggtgcggcggggccggcgggtgcagcggaggcggcggcggcggcggcagtgacgtcgccgggaaccctaaggactctgcaatatgaataattccctagagaacaccatctcctttgaagagtacatccgagtaaaggcacggtctgtcccgcaacacaggatgaaggaatttctggactcactggcctctaaggggccagaagcccttcaggagttccagcagacagccaccactaccatggtgtaccaacagggtgggaactgcatatacacagacagcactgaagtggctgggtctttgcttgaacttgcctgtccagtcaccaccagtgttcagccacaaacccagcaagaacagcagatccaggttcagcagccgcagcaggttcaggtccaggtgcaggtacagcagtctccgcaacaggtctcggctcagctctccccacaactcaccgttcaccagcctactgagcaacccatccaggtccaggtgcagatccaaggccaggcaccacagtcagcagccccctccattcagaccccgtctctgcagagtcccagtccctcgcagctgcaagcagctcagatccaggtgcagcacgtgcaagcagcccagcagatccaggctgcagaaatcccggaggagcacatcccacatcagcaaatccaggctcagctggtggctggccagtctcttgctggtggtcagcagatccaaatccagaccgtgggtgccctttccccaccaccatcccagcagggctcaccccgggaaggggagcggcgggttggcacggccagtgtcctccaaccagtgaagaagcgcaaagtggacatgcccatcactgtgtcctacgccatctcagggcagccggtggccaccgtgctggccattccacagggccagcagcagagttatgtgtctttgaggccagacttactgacagtagacagtgcccacctgtacagtgccactgggaccattactagccctacaggagaaacctggaccatccctgtttattctgcccagccccggggggaccctcagcagcagagcattacccacattgccattccccaggaagcctacaacgcagttcacgtcagtggctcacccacagccctggcagctgttaagctggaggatgacaaggagaagatggtgggcaccacatctgtagtgaaaaactcccatgaagaggtagtgcagacccttgcaaactctctctttccagcacagttcatgaatggcaacatccacattccagtggctgtgcaggctgtggcaggcacgtaccagaatacggctcaaactgtccatatatgggacccccaacagcagccgcagcagcaaactccccaggaacagacaccaccaccacagcagcagcagcagcaactccaagttacttgttcagctcaaactgtccaggttgctgaagttgaaccacagtcacagccacagccttccccagaacttctgcttccaaattctttgaagccagaagaagggcttgaagtatggaaaaactgggcccagaccaagaatgctgaactagagaaggatgctcagaacagattggcacccattgggaggcgccaactgctgcgattccaggaagatctcatctcctctgctgtggcagagttgaattatgggctctgtctaatgacacgggaagctcgaaatggagaaggtgaaccctatgacccagatgtgctctactatattttcctgtgtattcaaaagtatctttttgaaaatggaagggtagatgacattttctccgatctttattatgttcggttcacggagtggctacatgaagttctgaaggatgttcagccccgggtcactccacttggctatgtcttgcccagccacgtgactgaggagatgctatgggagtgcaagcagcttggggctcactccccctccaccttgctgaccaccctcatgttctttaataccaagtacttcctattgaagacagtggaccagcacatgaagctggccttctccaaggtcttgcgacagacaaagaagaacccctctaatcccaaggataaaagcacgagtatccggtacttgaaggcccttggaatacaccagactggccagaaagttacagatgacatgtatgcagaacagacggaaaatccagagaatccattgagatgtcccatcaagctctatgatttctacctcttcaaatgcccccagagtgtgaaaggccggaatgacaccttttacctgacacctgagccagtggtggcccccaacagcccaatctggtactcagtccagcctatcagcagagagcagatgggacaaatgctgacgcggatcctggtgataagagaaattcaggaggccatcgcagtggccaatgcaagcactatgcactgagatgccttggccatggcacaagagaaaccagccaggaaaaaccagacagactttcacactaaagaagaggcctccatttttttttttcttttttttattggtgtagttacgaagcctttcaggctgcttctgtttaaaatataaaagaaaactttgccccctttgcatcttcataaacctgctgcggcagactcctcagccgatggtggctctgggtttccttgagtgtcatatgtcctagaaagttgctggctgactcttttttgtctggggcctggggaaagggcttggactgtgaaaagaaatgtggcccctttccatcttcaagagagatggaattaatgatggatggaccctggagggaatctccccagccgacttccactgggctgacagactttgctgaccacaggggaacgatgttcttttctttcttcatgatcagacataaacttagcatcttaatggaagaaaaatgaggggaacttcaattatgatttattaaagacaatttctattacaccctcctttatgacaagtgacattttagatgtaaaagtaaaaactttaccatgccttttttttttttgttggcctaacattgaggccttaaaacctgaggctcctgtgcctgatggaattcttgtaacatacacttgtgtatcatataaagataccactctgtttctcttatgtattcttactctagttgtttattaagaatgacaagcacgtcttttcaaca

SEQ ID NO: 4458 - protein, 776 aa, Homo sapiens; identical to SEQ ID NO: 431

SEQ ID NO: 4459 - DNA, 2527 bp, Homo sapiens
agtagagacggggtttcaccatattggccaggatggtctcaatctcctgacctcgtgatccacccgcctcggccttccaaagtgctgggattacaggcatcagccactgcgcctggccggccttgctttttagagacagttgagatgagagaagacttggtaagggcaaacgggcgtgcatgccagttctttgggtcctggaccacctttgaaaatatgcaaagctctgtacactctcagagaattatgcatatatgcagagtttggtttatagttttctgtacttcactgtctctgagggcagtctttttgccctgtgttagccttggattagagggtaacaacaatcatgtaaggctgtggttctcaagtgtggtgttagaagtgctcatcatcaggttccacctcagaaacagattgggacccagctatctgtgttttaagaagctttccagatgatttttgccacactttagggagagtcccctgatgaaatttatactcctgtgtggtccttatgcttcacacatcccatattgtacctttgagagaccacctgccatcctcttgttgtgacagtactctattcctcctaggctatgtcttgcccagccacgtgactgaggagatgctatgggagtgcaagcagcttggggctcactccccctccaccttgctgaccaccctcatgttctttaataccaagtaagtgttctagaggctccactgctggcatctgtccagtgaagagtgtggaagctatccaagaggccttctgaattcctctgacatatatttgagaaactgggctactgaaagccctaaccccacttggctgcattttatttggtaaccagtgaggcaaacacccttgccagacccctaccatccatcttgatgtggttcctgcactggacactgcttgggtacgggcctgcccagatcttgggaatgtgggcagtggctcctctgaagcaccagtgggcagaggatgagtcatggtatcctcccggcacccctccctctgccttgcattttacttgtgatccaggtacttcctattgaagacagtggaccagcacatgaagctggccttctccaaggtcttgcgacagacaaagaagaacccctctaatcccaaggataaaagcacgagtatccggtacttgaaggcccttggaatacaccagactggccagaaaggtagggaaaggaggcagggatggcaaaaacaggtgctacttgtcctgccctgtcctgcccttgtgcctgtgaggctagtgataagtgtaaaggttgggatttgctggataaaattctccactcccttctccccagccaaaaattccaaactttcctcctagaagcagagaagccccagacagaatagctgcctcttcccttagtagtcactgcccatgcctcataccttccctcccccgaccctgtatttcctagttgggctggctgaaagcctaagtttcctgatctgggcctgaggtaaggcagtctgatgccaggtctgtggtggtggggatgtgtgttttatagttacagatgacatgtatgcagaacagacggaaaatccagagaatccattgagatgtcccatcaagctctatgatttctacctcttcaaatgcccccagagtgtgaaaggccggaatgacaccttttacctgacacctgagccagtggtggcccccaacagcccaatctggtactcagtccagcctatcagcagagagcagatgggacaaatgctgacgcggatcctggtgataagagaaattcaggaggccatcgcagtggccaatgcaagcactatgcactgagatgccttggccatggcacaagagaaaccagccaggaaaaaccagacagactttcacactaaagaagaggcctccatttttttttttcttttttttattggtgtagttacgaagcctttcaggctgcttctgtttaaaatataaaagaaaactttgccccctttgcatcttcataaacctgctgcggcagactcctcagccgatggtggctctgggtttccttgagtgtcatatgtcctagaaagttgctggctgactcttttttgtctggggcctggggaaagggcttggactgtgaaaagaaatgtggcccctttccatcttcaagagagatggaattaatgatggatggaccctggagggaatctccccagccgacttccactgggctgacagactttgctgaccacaggggaacgatgttcttttctttcttcatgatcagacataaacttagcatcttaatggaagaaaaatgaggggaacttcaattatgatttattaaagacaatttctattacaccctcctttatgacaagtgacattttagatgtaaaagtaaaaactttaccatgccttttttttttttgttggcctaacattgaggccttaaaacctgaggctcctgtgcctgatggaattcttgtaacatacacttgtgtatcatataaagataccactctgtttctctt

SEQ ID NO: 4460 - protein, 90 aa, Homo sapiens [sequence omitted]

SEQ ID NO: 4461 - DNA, 2545 bp, Homo sapiens
gtccctcgcagctgcaagcagctcagatccaggtgcagcacgtgcaagcagcccagcagatccaggctgcagaaatcccggaggagcacatcccacatcagcaaatccaggctcagctggtggctggccagtctcttgctggtggtcagcagatccaaatccagaccgtgggtgccctttccccaccaccatcccagcagggctcaccccgggaaggggagcggcgggttggcacggccagtgtcctccaaccagtgaagaagcgcaaagtggacatgcccatcactgtgtcctacgccatctcagggcagccggtggccaccgtgctggccattccacagggccagcagcagagttatgtgtctttgaggccagacttactgacagtagacagtgcccacctgtacagtgccactgggaccattactagccctacaggagaaacctggaccatccctgtttattctgcccagccccggggggaccctcagcagcagagcattacccacattgccattccccaggaagcctacaacgcagttcacgtcagtggctcacccacagccctggcagctgttaagctggaggatgacaaggagaagatggtgggcaccacatctgtagtgaaaaactcccatgaagaggtagtgcagacccttgcaaactctctctttccagcacagttcatgaatggcaacatccacattccagtggctgtgcaggctgtggcaggcacgtaccagaatacggctcaaactgtccatatatgggacccccaacagcagccgcagcagcaaactccccaggaacagacaccaccaccacagcagcagcagcagcaactccaagttacttgttcagctcaaactgtccaggttgctgaagttgaaccacagtcacagccacagccttccccagaacttctgcttccaaattctttgaagccagaagaagggcttgaagtatggaaaaactgggcccagaccaagaatgctgaactagagaaggatgctcagaacagattggcacccattgggaggcgccaactgctgcgattccaggaagatctcatctcctctgctgtggcagagttgaattatgggctctgtctaatgacacgggaagctcgaaatggagaaggtgaaccctatgacccagatgtgctctactatattttcctgtgtattcaaaagtatctttttgaaaatggaagggtagatgacattttctccgatctttattatgttcggttcacggagtggctacatgaagttctgaaggatgttcagccccgggtcactccacttggctatgtcttgcccagccacgtgactgaggagatgctatgggagtgcaagcagcttggggctcactccccctccaccttgctgaccaccctcatgttctttaataccaagtacttcctattgaagacagtggaccagcacatgaagctggccttctccaaggtcttgcgacagacaaagaagaacccctctaatcccaaggataaaagcacgagtatccggtacttgaaggcccttggaatacaccagactggccagaaagttacagatgacatgtatgcagaacagacggaaaatccagagaatccattgagatgtcccatcaagctctatgatttctacctcttcaaatgcccccagagtgtgaaaggccggaatgacaccttttacctgacacctgagccagtggtggcccccaacagcccaatctggtactcagtccagcctatcagcagagagcagatgggacaaatgctgacgcggatcctggtgataagagaaattcaggaggccatcgcagtggccaatgcaagcactatgcactgagatgccttggccatggcacaagagaaaccagccaggaaaaaccagacagactttcacactaaagaagaggcctccatttttttttttcttttttttattggtgtagttacgaagcctttcaggctgcttctgtttaaaatataaaagaaaactttgccccctttgcatcttcataaacctgctgcggcagactcctcagccgatggtggctctgggtttccttgagtgtcatatgtcctagaaagttgctggctgactcttttttgtctggggcctggggaaagggcttggactgtgaaaagaaatgtggcccctttccatcttcaagagagatggaattaatgatggatggaccctggagggaatctccccagccgacttccactgggctgacagactttgctgaccacaggggaacgatgttcttttctttcttcatgatcagacataaacttagcatcttaatggaagaaaaatgaggggaacttcaattatgatttattaaagacaatttctattacaccctcctttatgacaagtgacattttagatgtaaaagtaaaaactttaccatgccttttttttttttgttggcctaacattgaggccttaaaacctgaggctcctgtgcctgatggaattcttgtaacatacacttgtgtatcatataaagataccactctgtttctctt

SEQ ID NO: 4462 - protein, 525 aa, Homo sapiens [sequence omitted]

SEQ ID NO: 4463 - DNA, 2362 bp, Homo sapiens
agtagagacggggtttcaccatattggccaggatggtctcaatctcctgacctcgtgatccacccgcctcggccttccaaagtgctgggattacaggcatcagccactgcgcctggccggccttgctttttagagacagttgagatgagagaagacttggtaagggcaaacgggcgtgcatgccagttctttgggtcctggaccacctttgaaaatatgcaaagctctgtacactctcagagaattatgcatatatgcagagtttggtttatagttttctgtacttcactgtctctgagggcagtctttttgccctgtgttagccttggattagagggtaacaacaatcatgtaaggctgtggttctcaagtgtggtgttagaagtgctcatcatcaggttccacctcagaaacagattgggacccagctatctgtgttttaagaagctttccagatgatttttgccacactttagggagagtcccctgatgaaatttatactcctgtgtggtccttatgcttcacacatcccatattgtacctttgagagaccacctgccatcctcttgttgtgacagtactctattcctcctaggctatgtcttgcccagccacgtgactgaggagatgctatgggagtgcaagcagcttggggctcactccccctccaccttgctgaccaccctcatgttctttaataccaagtaagtgttctagaggctccactgctggcatctgtccagtgaagagtgtggaagctatccaagaggccttctgaattcctctgacatatatttgagaaactgggctactgaaagccctaaccccacttggctgcattttatttggtaaccagtgaggcaaacacccttgccagacccctaccatccatcttgatgtggttcctgcactggacactgcttgggtacgggcctgcccagatcttgggaatgtgggcagtggctcctctgaagcaccagtgggcagaggatgagtcatggtatcctcccggcacccctccctctgccttgcattttacttgtgatccaggtacttcctattgaagacagtggaccagcacatgaagctggccttctccaaggtcttgcgacagacaaagaagaacccctctaatcccaaggataaaagcacgagtatccggtacttgaaggcccttggaatacaccagactggccagaaaggtagggaaaggaggcagggatggcaaaaacaggtgctacttgtcctgccctgtcctgcccttgtgcctgtgaggctagtgataagtgtaaaggttgggatttgctggataaaattctccactcccttctccccagccaaaaattccaaactttcctcctagaagcagagaagccccagacagaatagctgcctcttcccttagtagtcactgcccatgcctcataccttccctcccccgaccctgtatttcctagttgggctggctgaaagcctaagtttcctgatctgggcctgaggtaaggcagtctgatgccaggtctgtggtggtggggatgtgtgttttatagttacagatgacatgtatgcagaacagacggaaaatccagagaatccattgagatgtcccatcaagctctatgatttctacctcttcaaatgcccccagagtgtgaaaggccggaatgacaccttttacctgacacctgagccagtggtggcccccaacagcccaatctggtactcagtccagcctatcagcagagagcagatgggacaaatgctgacgcggatcctggtgataagagaaattcaggaggccatcgcagtggccaatgcaagcactatgcactgagatgccttggccatggcacaagagaaaccagccaggaaaaaccagacagactttcacactaaagaagaggcctccatttttttttttcttttttttattggtgtagttacgaagcctttcaggctgcttctgtttaaaatataaaagaaaactttgccccctttgcatcttcataaacctgctgcggcagactcctcagccgatggtggctctgggtttccttgagtgtcatatgtcctagaaagttgctggctgactcttttttgtctggggcctggggaaagggcttggactgtgaaaagaaatgtggcccctttccatcttcaagagagatggaattaatgatggatggaccctggagggaatctccccagccgacttccactgggctgacagactttgctgaccacaggggaacgatgttcttttctttcttcatgatcagacataaacttagcatcttaatggaagaaaaatgaggggaacttcaattatgatttattaaagacaatttctattacaccctc

SEQ ID NO: 4464 - protein, 90 aa, Homo sapiens [sequence omitted]

SEQ ID NO: 4465 - DNA, 2380 bp, Homo sapiens
gtccctcgcagctgcaagcagctcagatccaggtgcagcacgtgcaagcagcccagcagatccaggctgcagaaatcccggaggagcacatcccacatcagcaaatccaggctcagctggtggctggccagtctcttgctggtggtcagcagatccaaatccagaccgtgggtgccctttccccaccaccatcccagcagggctcaccccgggaaggggagcggcgggttggcacggccagtgtcctccaaccagtgaagaagcgcaaagtggacatgcccatcactgtgtcctacgccatctcagggcagccggtggccaccgtgctggccattccacagggccagcagcagagttatgtgtctttgaggccagacttactgacagtagacagtgcccacctgtacagtgccactgggaccattactagccctacaggagaaacctggaccatccctgtttattctgcccagccccggggggaccctcagcagcagagcattacccacattgccattccccaggaagcctacaacgcagttcacgtcagtggctcacccacagccctggcagctgttaagctggaggatgacaaggagaagatggtgggcaccacatctgtagtgaaaaactcccatgaagaggtagtgcagacccttgcaaactctctctttccagcacagttcatgaatggcaacatccacattccagtggctgtgcaggctgtggcaggcacgtaccagaatacggctcaaactgtccatatatgggacccccaacagcagccgcagcagcaaactccccaggaacagacaccaccaccacagcagcagcagcagcaactccaagttacttgttcagctcaaactgtccaggttgctgaagttgaaccacagtcacagccacagccttccccagaacttctgcttccaaattctttgaagccagaagaagggcttgaagtatggaaaaactgggcccagaccaagaatgctgaactagagaaggatgctcagaacagattggcacccattgggaggcgccaactgctgcgattccaggaagatctcatctcctctgctgtggcagagttgaattatgggctctgtctaatgacacgggaagctcgaaatggagaaggtgaaccctatgacccagatgtgctctactatattttcctgtgtattcaaaagtatctttttgaaaatggaagggtagatgacattttctccgatctttattatgttcggttcacggagtggctacatgaagttctgaaggatgttcagccccgggtcactccacttggctatgtcttgcccagccacgtgactgaggagatgctatgggagtgcaagcagcttggggctcactccccctccaccttgctgaccaccctcatgttctttaataccaagtacttcctattgaagacagtggaccagcacatgaagctggccttctccaaggtcttgcgacagacaaagaagaacccctctaatcccaaggataaaagcacgagtatccggtacttgaaggcccttggaatacaccagactggccagaaagttacagatgacatgtatgcagaacagacggaaaatccagagaatccattgagatgtcccatcaagctctatgatttctacctcttcaaatgcccccagagtgtgaaaggccggaatgacaccttttacctgacacctgagccagtggtggcccccaacagcccaatctggtactcagtccagcctatcagcagagagcagatgggacaaatgctgacgcggatcctggtgataagagaaattcaggaggccatcgcagtggccaatgcaagcactatgcactgagatgccttggccatggcacaagagaaaccagccaggaaaaaccagacagactttcacactaaagaagaggcctccatttttttttttcttttttttattggtgtagttacgaagcctttcaggctgcttctgtttaaaatataaaagaaaactttgccccctttgcatcttcataaacctgctgcggcagactcctcagccgatggtggctctgggtttccttgagtgtcatatgtcctagaaagttgctggctgactcttttttgtctggggcctggggaaagggcttggactgtgaaaagaaatgtggcccctttccatcttcaagagagatggaattaatgatggatggaccctggagggaatctccccagccgacttccactgggctgacagactttgctgaccacaggggaacgatgttcttttctttcttcatgatcagacataaacttagcatcttaatggaagaaaaatgaggggaacttcaattatgatttattaaagacaatttctattacaccctc

SEQ ID NO: 4466 - protein, 525 aa, Homo sapiens [sequence omitted]

SEQ ID NO: 4467 - DNA, 3090 bp, Homo sapiens
gagggttgaatgtaagatggcgcccagggagctgtgaggagaaaaccctgtcggtcttggagcgacgacggcagaaccagggtccctggcggtgcggcggggccggcgggtgcagcggaggcggcggcggcggcggcagtgacgtcgccggaatattagaagtcttaagaactcaggacaagcagcagaaatacatgcaacatggtgactggaaccctaaggactctgcaatatgaataattccctagagaacaccatctcctttgaagagtacatccgagtaaaggcacggtctgtcccgcaacacaggatgaaggaatttctggactcactggcctctaaggggccagaagcccttcaggagttccagcagacagccaccactaccatggtgtaccaacagggtgggaactgcatatacacagacagcactgaagtggctgggtctttgcttgaacttgcctgtccagtcaccaccagtgttcagccacaaacccagcaagaacagcagatccaggttcagcagccgcagcaggttcaggtccaggtgcaggtacagcagtctccgcaacaggtctcggctcagctctccccacaactcaccgttcaccagcctactgagcaacccatccaggtccaggtgcagatccaaggccaggcaccacagtcagcagccccctccattcagaccccgtctctgcagagtcccagtccctcgcagctgcaagcagctcagatccaggtgcagcacgtgcaagcagcccagcagatccaggctgcagaaatcccggaggagcacatcccacatcagcaaatccaggctcagctggtggctggccagtctcttgctggtggtcagcagatccaaatccagaccgtgggtgccctttccccaccaccatcccagcagggctcaccccgggaaggggagcggcgggttggcacggccagtgtcctccaaccagtgaagaagcgcaaagtggacatgcccatcactgtgtcctacgccatctcagggcagccggtggccaccgtgctggccattccacagggccagcagcagagttatgtgtctttgaggccagacttactgacagtagacagtgcccacctgtacagtgccactgggaccattactagccctacaggagaaacctggaccatccctgtttattctgcccagccccggggggaccctcagcagcagagcattacccacattgccattccccaggaagcctacaacgcagttcacgtcagtggctcacccacagccctggcagctgttaagctggaggatgacaaggagaagatggtgggcaccacatctgtagtgaaaaactcccatgaagaggtagtgcagacccttgcaaactctctctttccagcacagttcatgaatggcaacatccacattccagtggctgtgcaggctgtggcaggcacgtaccagaatacggctcaaactgtccatatatgggacccccaacagcagccgcagcagcaaactccccaggaacagacaccaccaccacagcagcagcagcagcaactccaagttacttgttcagctcaaactgtccaggttgctgaagttgaaccacagtcacagccacagccttccccagaacttctgcttccaaattctttgaagccagaagaagggcttgaagtatggaaaaactgggcccagaccaagaatgctgaactagagaaggatgctcagaacagattggcacccattgggaggcgccaactgctgcgattccaggaagatctcatctcctctgctgtggcagagttgaattatgggctctgtctaatgacacgggaagctcgaaatggagaaggtgaaccctatgacccagatgtgctctactatattttcctgtgtattcaaaagtatctttttgaaaatggaagggtagatgacattttctccgatctttattatgttcggttcacggagtggctacatgaagttctgaaggatgttcagccccgggtcactccacttggctatgtcttgcccagccacgtgactgaggagatgctatgggagtgcaagcagcttggggctcactccccctccaccttgctgaccaccctcatgttctttaataccaagtacttcctattgaagacagtggaccagcacatgaagctggccttctccaaggtcttgcgacagacaaagaagaacccctctaatcccaaggataaaagcacgagtatccggtacttgaaggcccttggaatacaccagactggccagaaagttacagatgacatgtatgcagaacagacggaaaatccagagaatccattgagatgtcccatcaagctctatgatttctacctcttcaaatgcccccagagtgtgaaaggccggaatgacaccttttacctgacacctgagccagtggtggcccccaacagcccaatctggtactcagtccagcctatcagcagagagcagatgggacaaatgctgacgcggatcctggtgataagagaaattcaggaggccatcgcagtggccaatgcaagcactatgcactgagatgccttggccatggcacaagagaaaccagccaggaaaaaccagacagactttcacactaaagaagaggcctccatttttttttttcttttttttattggtgtagttacgaagcctttcaggctgcttctgtttaaaatataaaagaaaactttgccccctttgcatcttcataaacctgctgcggcagactcctcagccgatggtggctctgggtttccttgagtgtcatatgtcctagaaagttgctggctgactcttttttgtctggggcctggggaaagggcttggactgtgaaaagaaatgtggcccctttccatcttcaagagagatggaattaatgatggatggaccctggagggaatctccccagccgacttccactgggctgacagactttgctgaccacaggggaacgatgttcttttctttcttcatgatcagacataaacttagcatcttaatggaagaaaaatgaggggaacttcaattatgatttattaaagacaatttctattacaccctc

SEQ ID NO: 4468 - protein, 776 aa, Homo sapiens; identical to SEQ ID NO: 431

SEQ ID NO: 4469 - DNA, 988 bp, Homo sapiens
cagctctccccacaactcaccgttcaccagcctactgagcaacccatccaggtccaggtgcagatccaaggccaggcaccacagtcagcagccccctccattcagaccccgtctctgcagagtcccagtccctcgcagctgcaagcagctcagatccaggtgcagcacgtgcaagcagcccagcagatccaggctgcagaaatcccggaggagcacatcccacatcagcaaatccaggctcagctggtggctggccagtctcttgctggtggtcagcagatccaaatccagaccgtgggtgccctttccccaccaccatcccagcagggctcaccccgggaaggggagcggcgggttggcacggccagtgtcctccaaccagtgaagaagcgcaaagtggacatgcccatcactgtgtcctacgccatctcagggcagccggtggccaccgtgctggccattccacagggccagcagcagagttatgtgtctttgaggccagacttactgacagtagacagtgcccacctgtacagtgccactgggaccattactagccctacaggagaaacctggaccatccctgtttattctgcccagccccggggggaccctcagcagcagagcattacccacattgccattccccaggaagcctacaacgcagttcacgtcagtggctcacccacagccctggcagctgttaagctggaggatgacaaggagaagatggtgggcaccacatctgtagtgaaaaactcccatgaagaggtagtgcagacccttgcaaactctctctttccagcacagttcatgaatggcaacatccacattccagtggctgtgcaggctgtggcaggcacgtaccagaatacggctcaaactgtccatatatgggacccccaacagcagccgcagcagcaaactccccagtttctctcctataggctcaaactgtccaggttgctgaagttgaaccacagtcaca

SEQ ID NO: 4470 - protein, 194 aa, Homo sapiens
MPITVSYAISGQPVATVLAIPQGQQQSYVSLRPDLLTVDSAHLYSATGTITSPTGETWTIPVYSAQPRGDPQQQSITHIAIPQEAYNAVHVSGSPTALAAVKLEDDKEKMVGTTSVVKNSHEEVVQTLANSLFPAQFMNGNIHIPVAVQAVAGTYQNTAQTVHIWDPQQQPQQQTPQFLSYRLKLSRLLKLNHS

SEQ ID NO: 4471 - DNA, 1134 bp, Homo sapiens
gccaggcaccacagtcagcagccccctccattcagaccccgtctctgcagagtcccagtccctcgcagtggtggtcagcagatccaaatccagaccgtgggtgccctttccccaccaccatcccagcagggctcaccccgggaaggggagcggcgggttggcacggccagtgtcctccaaccagtgaagaagcgcaaagtggacatgcccatcactgtgtcctacgccatctcagggcagccggtggccaccgtgctggccattccacagggccagcagcagagttatgtgtctttgaggccagacttactgacagtagacagtgcccacctgtacagtgccactgggaccattactagccctacaggagaaacctggaccatccctgtttattctgcccagccccggggggaccctcagcagcagagcattacccacattgccattccccaggaagcctacaacgcagttcacgtcagtggctcacccacagccctggcagctgttaagctggaggatgacaaggagaagatggtgggcaccacatctgtagtgaaaaactcccatgaagaggtagtgcagacccttgcaaactctctctttccagcacagttcatgaatggcaacatccacattccagtggctgtgcaggctgtggcaggcacgtaccagaatacggctcaaactgtccatatatgggacccccaacagcagccgcagcagcaaactccccaggaacagacaccaccaccacagcagcagcagcagcaactccaagttacttgttcagtaagtgaagacttatcagtagggcaggcagcctggtccctcagggcccagtgcagcacagagcttgcctcgcaacctctggcttatttactgctgttactcttacagtgatgcagtatttagtatttgggagaagagggggagaaacatcacgtgaggctatgcaacagaaaaaagagtttatcctggtacctggaggtaaatgagatggccaggaattgctttggagttttggagacattttgggtttaagtaccatggacacttctttgtaatctcttctcaggaagagtaaagttacaggtgtagatgaatgggacacctcaagtgtgtcccagtgctgtt

SEQ ID NO: 4472 - protein, 231 aa, Homo sapiens
MPITVSYAISGQPVATVLAIPQGQQQSYVSLRPDLLTVDSAHLYSATGTITSPTGETWTIPVYSAQPRGDPQQQSITHIAIPQEAYNAVHVSGSPTALAAVKLEDDKEKMVGTTSVVKNSHEEVVQTLANSLFPAQFMNGNIHIPVAVQAVAGTYQNTAQTVHIWDPQQQPQQQTPQEQTPPPQQQQQQLQVTCSVSEDLSVGQAAWSLRAQCSTELASQPLAYLLLLLLQ

SEQ ID NO: 4473 - DNA, 2438 bp, Homo sapiens
cgagtgaatgccgacctgcagactggggcctaagtttcttttagtttccggtgtctctgcaatggcggctctagactccctgtcgctcttcactagcctcggcctgagcgagcagaaggcccgcgagacgctcaagaactcggctctgagcgcgcagctgcgcgaggccgctactcaggctcagcagaccctgggttccaccattgacaaagctaccgggatcctgttatatggcttggcctcccgactcagggatacccggcgtctctccttccttctgcccttgagtatgtgcggagtcaccccttggaccccatcgacactgtggacttcgagcgggaatgtggcgtgggtgtcattgtgaccccagagcagattgaggaggctgtggaggctgctattaacaggcaccggccccagctcctggtggaacgttaccatttcaacatggggctgctgatgggagaggctcgggctgtgctgaagtgggcagatggcaaaatgatcaagaatgaagtggacatgcaggtcctccaccttctgggccccaagttggaggctgatctggagaagaagttcaaggtggcaaaagctcggctagaagaaacagaccggaggacggcaaaggatgtggtggagaatggcgagactgctgaccagaccctgtctctgatggagcagctccggggggaggcccttaagttccacaagcctggtgagaactacaagaccccaggctatgtggtcactccacacaccatgaatctactaaagcagcacctggagattactggtgggcaggtacgtacccggttcccgccagaacccaatggaatcctgcatattggacatgccaaagccatcaatttcaactttggctatgccaaggccaacaatggcatctgttttctgcgttttgatgacaccaaccctgagaaggaggaagcaaagttcttcacggccatctgtgacatggtagcctggctaggctacacaccttacaaagtcacatatgcgtctgactattttgaccagctatatgcgtgggctgtggagctcatccgcaggggtctggcttatgtgtgccaccagcgaggagaggagctcaaaggccataatactctgccttcaccctggagagaccgtcccatggaggagtcactgctgctctttgaggcaatgcgcaagggcaagttttcagagggcgaggccacactacggatgaagctggtgatggaggatggcaagatggaccctgtagcctatcgagtcaagtatacaccacaccaccgcacaggggacaaatggtgcatctatcccacctacgactacacacactgcctctgtgactccatcgagcacatcactcactcactctgcaccaaggaattccaggcccgacgctcttcctacttctggctttgcaatgcactggacgtctattgccctgtgcagtgggagtatggccgcctcaacctgcactatgctgttgtctctaagaggaagatcctccagcttgtagcaactggtgctgtgcgggactgggatgacccacggctctttacactcacggccctgcgacggcggggcttcccacctgaggccatcaacaacttctgtgcccgggtgggagtgactgtggcacaaaccacaatggagccacatcttctagaagcctgtgtgcgtgatgtgctgaatgacacagccccacgagccatggctgtgctggagtcactacgggtcatcatcaccaactttcctgctgccaagtccttggacatccaggtgcccaacttcccagctgatgagaccaaaggcttccatcaggttccctttgcacccattgtcttcattgagaggactgacttcaaggaggagccagagccaggatttaagcgcctggcttggggccagcctgtgggcctgaggcatacaggctacgtcattgagctgcagcatgttgtcaagggccccagtggttgtgtagagagtctggaggtgacctgcagacgggcagatgctggagagaagccaaaggcctttattcactgggtgtcacagcctttgatgtgtgaggttcgcctctatgagcgactattccagcacaagaaccctgaagatcctactgaggtgcctggtggatttttaagtgacctgaacctggcatcactacacgtggtggatgcagcattagtggactgctctgtggccctggcaaaacccttcgacaagttccagtttgagcgtcttggatatttctccgtggatccagacagccatcagggaaagcttgtctttaaccgaactgtcacactgaaggaagacccaggaaaggtgtgagctggaagcactgaacctacctcatcctcctggagggtgtggctaccctcgccaccccaaattccatgtcaataaagaacagctaaattctcctagag

SEQ ID NO: 4474 - protein, 630 aa, Homo sapiens
MGLLMGEARAVLKWADGKMIKNEVDMQVLHLLGPKLEADLEKKFKVAKARLEETDRRTAKDVVENGETADQTLSLMEQLRGEALKFHKPGENYKTPGYVVTPHTMNLLKQHLEITGGQVRTRFPPEPNGILHIGHAKAINFNFGYAKANNGICFLRFDDTNPEKEEAKFFTAICDMVAWLGYTPYKVTYASDYFDQLYAWAVELIRRGLAYVCHQRGEELKGHNTLPSPWRDRPMEESLLLFEAMRKGKFSEGEATLRMKLVMEDGKMDPVAYRVKYTPHHRTGDKWCIYPTYDYTHCLCDSIEHITHSLCTKEFQARRSSYFWLCNALDVYCPVQWEYGRLNLHYAVVSKRKILQLVATGAVRDWDDPRLFTLTALRRRGFPPEAINNFCARVGVTVAQTTMEPHLLEACVRDVLNDTAPRAMAVLESLRVIITNFPAAKSLDIQVPNFPADETKGFHQVPFAPIVFIERTDFKEEPEPGFKRLAWGQPVGLRHTGYVIELQHVVKGPSGCVESLEVTCRRADAGEKPKAFIHWVSQPLMCEVRLYERLFQHKNPEDPTEVPGGFLSDLNLASLHVVDAALVDCSVALAKPFDKFQFERLGYFSVDPDSHQGKLVFNRTVTLKEDPGKV

SEQ ID NO: 4475 - DNA, 2822 bp, Homo sapiens
ctcgcatttgcccccgaggacaattactatattgagatggagttaccagggctgaagtagaaaagtcagagcaaaaccacgcctgtgtcttcctcctgcctcagggacgaacaccttccttccaggtccgtggcaaatatctccaaaagccctgccgcctgccaacaccccttcaagttcccagttccacggaggcggaagcaaagcccccggaaaggccggtttgtccgccctgtgttgtttaaaggggatagacgaccttggagcgccccgccccctcccgccaaggaaggaccccattggctctccccggaggcttcactctcattggtcagcgagtgaatgccgacctgcagactggggcctaagtttcttttagtttccggtgtctctgcaatggcggctctagactccctgtcgctcttcactagcctcggcctgagcgagcagaaggcccgcgagacgctcaagaactcggctctgagcgcgcagctgcgcgaggccgctactcaggctcagcagaccctgggttccaccattgacaaagctaccgggatcctgttatatggcttggcctcccgactcagggatacccggcgtctctccttccttgtaagctacatagccagtaagaagatccacactgagccccagctaagcgctgcccttgagtatgtgcggagtcaccccttggaccccatcgacactgtggacttcgagcgggaatgtggcgtgggtgtcattgtgaccccagagcagattgaggaggctgtggaggctgctattaacaggcaccggccccagctcctggtggaacgttaccatttcaacatggggctgctgatgggagaggctcgggctgtgctgaagtgggcagatggcaaaatgatcaagaatgaagtggacatgcaggtcctccaccttctgggccccaagttggaggctgatctggagaagaagttcaaggtggcaaaagctcggctagaagaaacagaccggaggacggcaaaggatgtggtggagaatggcgagactgctgaccagaccctgtctctgatggagcagctccggggggaggcccttaagttccacaagcctggtgagaactacaagaccccaggctatgtggtcactccacacaccatgaatctactaaagcagcacctggagattactggtgggcaggtacgtacccggttcccgccagaacccaatggaatcctgcatattggacatgccaaagccatcaatttcaactttggctatgccaaggccaacaatggcatctgttttctgcgttttgatgacaccaaccctgagaaggaggaagcaaagttcttcacggccatctgtgacatggtagcctggctaggctacacaccttacaaagtcacatatgcgtctgactattttgaccagctatatgcgtgggctgtggagctcatccgcaggggtctggcttatgtgtgccaccagcgaggagaggagctcaaaggccataatactctgccttcaccctggagagaccgtcccatggaggagtcactgctgctctttgaggcaatgcgcaagggcaagttttcagagggcgaggccacactacggatgaagctggtgatggaggatggcaagatggaccctgtagcctatcgagtcaagtatacaccacaccaccgcacaggggacaaatggtgcatctatcccacctacgactacacacactgcctctgtgactccatcgagcacatcactcactcactctgcaccaaggaattccaggcccgacgctcttcctacttctggctttgcaatgcactggacgtctattgccctgtgcagtgggagtatggccgcctcaacctgcactatgctgttgtctctaagaggaagatcctccagcttgtagcaactggtgctgtgcgggactgggatgacccacggctctttacactcacggccctgcgacggcggggcttcccacctgaggccatcaacaacttctgtgcccgggtgggagtgactgtggcacaaaccacaatggagccacatcttctagaagcctgtgtgcgtgatgtgctgaatgacacagccccacgagccatggctgtgctggagtcactacgggtcatcatcaccaactttcctgctgccaagtccttggacatccaggtgcccaacttcccagctgatgagaccaaaggcttccatcaggttccctttgcacccattgtcttcattgagaggactgacttcaaggaggagccagagccaggatttaagcgcctggcttggggccagcctgtgggcctgaggcatacaggctacgtcattgagctgcagcatgttgtcaagggccccagtggttgtgtagagagtctggaggtgacctgcagacgggcagatgctggagagaagccaaaggcctttattcactgggtgtcacagcctttgatgtgtgaggttcgcctctatgagcgactattccagcacaagaaccctgaagatcctactgaggtgcctggtggatttttaagtgacctgaacctggcatcactacacgtggtggatgcagcattagtggactgctctgtggccctggcaaaacccttcgacaagttccagtttgagcgtcttggatatttctccgtggatccagacagccatcagggaaagcttgtctttaaccgaactgtcacactgaaggaagacccaggaaaggtgtgagctggaagcactgaacctacctcatcctcctggagggtgtggctaccctcgccaccccaaattccatgtcaataaagaacagctaaattctcctagag

SEQ ID NO: 4476 - protein, 793 aa, Homo sapiens
MPTCRLGPKFLLVSGVSAMAALDSLSLFTSLGLSEQKARETLKNSALSAQLREAATQAQQTLGSTIDKATGILLYGLASRLRDTRRLSFLVSYIASKKIHTEPQLSAALEYVRSHPLDPIDTVDFERECGVGVIVTPEQIEEAVEAAINRHRPQLLVERYHFNMGLLMGEARAVLKWADGKMIKNEVDMQVLHLLGPKLEADLEKKFKVAKARLEETDRRTAKDVVENGETADQTLSLMEQLRGEALKFHKPGENYKTPGYVVTPHTMNLLKQHLEITGGQVRTRFPPEPNGILHIGHAKAINFNFGYAKANNGICFLRFDDTNPEKEEAKFFTAICDMVAWLGYTPYKVTYASDYFDQLYAWAVELIRRGLAYVCHQRGEELKGHNTLPSPWRDRPMEESLLLFEAMRKGKFSEGEATLRMKLVMEDGKMDPVAYRVKYTPHHRTGDKWCIYPTYDYTHCLCDSIEHITHSLCTKEFQARRSSYFWLCNALDVYCPVQWEYGRLNLHYAVVSKRKILQLVATGAVRDWDDPRLFTLTALRRRGFPPEAINNFCARVGVTVAQTTMEPHLLEACVRDVLNDTAPRAMAVLESLRVIITNFPAAKSLDIQVPNFPADETKGFHQVPFAPIVFIERTDFKEEPEPGFKRLAWGQPVGLRHTGYVIELQHVVKGPSGCVESLEVTCRRADAGEKPKAFIHWVSQPLMCEVRLYERLFQHKNPEDPTEVPGGFLSDLNLASLHVVDAALVDCSVALAKPFDKFQFERLGYFSVDPDSHQGKLVFNRTVTLKEDPGKV

SEQ ID NO: 4477 - DNA, 281 bp, Homo sapiens
cagggtggtgtgaagtggtgcaatcatagctcactgtggcctcaaactactgggctcaagctattctcctgccttagctgagactacatgtgcacactaccatgcctggctaattttaaaactttttgtagagcttgtctttaaccgaactgtcacactgaaggaagacccaggaaaggtgtgagctggaagcactgaacctacctcatcctcctggagggtgtggctaccctcgccaccccaaattccatgtcaataaagaacagctaaattctcctaga

SEQ ID NO: 4478 - protein, 56 aa, Homo sapiens
SGAIIAHCGLKLLGSSYSPALAETTCAHYHAWLILKLFVELVFNRTVTLKEDPGKV

SEQ ID NO: 4479 - DNA, 939 bp, Homo sapiens
accaaaggcttccatcaggttccctttgcacccattgtcttcattgagaggactgacttcaaggaggtaaattgtgggggtggagggtcccgtttgctgctgagtctggtactgggaacctttcatctcctcatctctgtcagtccatctacttcctgcttcagatgaaccaatctttgccagacacgggggtagggaagcttccccacttgtttgacccttgcagcctcatgtgtctaccccacttcctatctctaggagccagagccaggatttaagcgcctggcttggggccagcctgtgggcctgaggcatacaggctacgtcattgagctgcagcatgttgtcaaggtgagagccagctgcagccttcctactgcagtgcctgctggggccaagatgtgagtatagcctgcagtcctggttgtggttcccgggtctaattgctgctcccctccccccacttccagggccccagtggttgtgtagagagtctggaggtgacctgcagacgggcagatgctggagagaagccaaaggcctttattcactgggtgtcacagcctttgatgtgtgaggttcgcctctatgagcgactattccagcacaagaaccctgaagatcctactgaggtgcctggtggatttttaagtgacctgaacctggcatcactacacgtggtggatgcagcattagtggactgctctgtggccctggcaaaacccttcgacaagttccagtttgagcgtcttggatatttctccgtggatccagacagccatcagggaaagcttgtctttaaccgaactgtcacactgaaggaagacccaggaaaggtgtgagctggaagcactgaacctacctcatcctcctggagggtgtggctaccctcgccaccccaaattccatgtcaataaagaacagctaaattctcctaga

SEQ ID NO: 4480 - protein, 90 aa, Homo sapiens [sequence omitted]

SEQ ID NO: 4481 - DNA, 782 bp, Homo sapiens
catctctgtcagtccatctacttcctgcttcagatgaaccaatctttgccagacacgggggtagggaagcttccccacttgtttgacccttgcagcctcatgtgtctaccccacttcctatctctaggagccagagccaggatttaagcgcctggcttggggccagcctgtgggcctgaggcatacaggctacgtcattgagctgcagcatgttgtcaagggccccagtggttgtgtagagagtctggaggtgacctgcagacgggcagatgctggagagaagccaaaggcctttattcactgggtgtcacagcctttgatgtgtgaggttcgcctctatgagcgactgtgagtgaacagagctggggtgggggcaggtacaagatgcacattgcctgctatggctgcccagctgggggtatgaccttcactttggctgcagattccagcacaagaaccctgaagatcctactgaggtgcctggtggatttttaagtgacctgaacctggcatcactacacgtggtggatgcagcattagtggactgctctgtggccctggcaaaacccttcgacaagttccagtttgagcgtcttggatatttctccgtggatccagacagccatcagggaaagcttgtctttaaccgaactgtcacactgaaggaagacccaggaaaggtgtgagctggaagcactgaacctacctcatcctcctggagggtgtggctaccctcgccaccccaaattccatgtcaataaagaacagctaaattctcctag

SEQ ID NO: 4482 - protein, 37 aa, Homo sapiens
MNQSLPDTGVGKLPHLFDPCSLMCLPHFLSLGARARI

SEQ ID NO: 4483 - DNA, 812 bp, Homo sapiens
accaaaggcttccatcaggttccctttgcacccattgtcttcattgagaggactgacttcaaggaggtaaattgtgggggtggagggtcccgtttgctgctgagtctggtactgggaacctttcatctcctcatctctgtcagtccatctacttcctgcttcagatgaaccaatctttgccagacacgggggtagggaagcttccccacttgtttgacccttgcagcctcatgtgtctaccccacttcctatctctaggagccagagccaggatttaagcgcctggcttggggccagcctgtgggcctgaggcatacaggctacgtcattgagctgcagcatgttgtcaaggtgagagccagctgcagccttcctactgcagtgcctgctggggccaagatgtgagtatagcctgcagtcctggttgtggttcccgggtctaattgctgctcccctccccccacttccagggccccagtggttgtgtagagagtctggaggtgacctgcagacgggcagatgctggagagaagccaaaggcctttattcactgggtgtcacagcctttgatgtgtgaggttcgcctctatgagcgactattccagcacaagaaccctgaagatcctactgaggtgcctggtggatttttaagtgacctgaacctgcttgtctttaaccgaactgtcacactgaaggaagacccaggaaaggtgtgagctggaagcactgaacctacctcatcctcctggagggtgtggctaccctcgccaccccaaattccatgtcaataaagaacagctaaattctcctag

SEQ ID NO: 4484 - protein, 48 aa, Homo sapiens
MCEVRLYERLFQHKNPEDPTEVPGGFLSDLNLLVFNRTVTLKEDPGKV

SEQ ID NO: 4485 - DNA, 996 bp, Homo sapiens
gctgatgagaccaaaggcttccatcaggttccctttgcacccattgtcttcattgagaggactgacttcaaggaggtaaattgtgggggtggagggtcccgtttgctgctgagtctggtactgggaacctttcatctcctcatctctgtcagtccatctacttcctgcttcagatgaaccaatctttgccagacacgggggtagggaagcttccccacttgtttgacccttgcagcctcatgtgtctaccccacttcctatctctaggagccagagccaggatttaagcgcctggcttggggccagcctgtgggcctgaggcatacaggctacgtcattgagctgcagcatgttgtcaagggccccagtggttgtgtagagagtctggaggtgacctgcagacgggcagatgctggagagaagccaaaggcctttattcactgggtgtcacagcctttgatgtgtgaggttcgcctctatgagcgactgtgagtgaacagagctggggtgggggcaggtacaagatgcacattgcctgctatggctgcccagctgggggtatgaccttcactttggctgcagattccagcacaagaaccctgaagatcctactgaggtgcctggtggatttttaagtgacctgaacctggtaggttcatgaggtttggggtgagggaggtaggcctccctggttggatggttgcctgagttccctgcctgcaggcatcactacacgtggtggatgcagcattagtggactgctctgtggccctggcaaaacccttcgacaagttccagtttgagcgtcttggatatttctccgtggatccagacagccatcagggaaagcttgtctttaaccgaactgtcacactgaaggaagacccaggaaaggtgtgagctggaagcactgaacctacctcatcctcctggagggtgtggctaccctcgccaccccaaattccatgtcaataaagaacagctaaattctcctag

SEQ ID NO: 4486 - protein, 37 aa, Homo sapiens; identical to SEQ ID NO: 4482

SEQ ID NO: 4487 - DNA, 811 bp, Homo sapiens
agaaaagtcagagcaaaaccacgcctgtgtcttcctcctgcctcagggacgaacaccttccttccaggtccgtggcaaatatctccaaaagccctgccgcctgccaacaccccttcaagttcccagttccacggaggcggaagcaaagcccccggaaaggccggtttgtccgccctgtgttgtttaaaggggatagacgaccttggagcgccccgccccctcccgccaaggaaggaccccattggctctccccggaggcttcactctcattggtcagcgagtgaatgccgacctgcagactggggcctaagtttcttttagtttccggtgtctctgcaatggcggctctagactccctgtcgctcttcactagcctcggcctgagcgagcagaaggcccgcgagacgctcaagaactcggctctgagcgcgcagctgcgcgaggccgctactcaggctcagcagaccctgggttccaccattgacaaagctaccgggatcctgttatatggcttggcctcccgactcagggatacccggcgtctctccttccttgtaagctacatagccagtaagaagatccacactgagccccagctaagcgctgcccttgagtatgtgcggagtcaccccttggaccccatcgacactgtggacttcgagcgggaatgtggcgtgggtgtcattgtgaccccagagcagattgaggaggctgtggaggctgctattaacaggcaccggccccagctcctggtggaacgttaccatttcaacatggggctgctgatggtgacttaaagtggtctggctgg

SEQ ID NO: 4488 - protein, 170 aa, Homo sapiens
MPTCRLGPKFLLVSGVSAMAALDSLSLFTSLGLSEQKARETLKNSALSAQLREAATQAQQTLGSTIDKATGILLYGLASRLRDTRRLSFLVSYIASKKIHTEPQLSAALEYVRSHPLDPIDTVDFERECGVGVIVTPEQIEEAVEAAINRHRPQLLVERYHFNMGLLMVT

SEQ ID NO: 4489 - DNA, 602 bp, Homo sapiens
cttttagtttccggtgtctctgcaatggcggctctagactccctgtcgctcttcactagcctcggcctgagcgagcagaaggcccgcgagacgctcaagaactcggctctgagcgcgcagctgcgcgaggccgctactcaggctcagcagaccctgggttccaccattgacaaagctaccgggatcctgttatatggcttggcctcccgactcagggatacccggcgtctctccttccttgtaagctacatagccagtaagaagatccacactgagccccagctaagcgggtggtggtgccagggcttaacttttcaggaggccagactatccttggagtttcatgagattaggaccctgtctgtccacttcttggagcagagatgccacaaactcacgggctctttcttctcagctgcccttgagtatgtgcggagtcaccccttggaccccatcgacactgtggacttcgagcgggaatgtggcgtgggtgtcattgtgaccccagagcagattgaggaggctgtggaggctgctattaacaggcaccggccccagctcctggtggaacgttaccatttcaacatggggctgctgatggg

SEQ ID NO: 4490 - protein, 191 aa, Homo sapiens
MAALDSLSLFTSLGLSEQKARETLKNSALSAQLREAATQAQQTLGSTIDKATGILLYGLASRLRDTRRLSFLVSYIASKKIHTEPQLSGWWCQGLTFQEARLSLEFHEIRTLSVHFLEQRCHKLTGSFFSAALEYVRSHPLDPIDTVDFERECGVGVIVTPEQIEEAVEAAINRHRPQLLVERYHFNMGLL

SEQ ID NO: 4491 - DNA, 493 bp, Homo sapiens
cagggaatggacgccagtgtactgccaatggcacggaatgtaggagtggctgggttggcccgaacggaggcatcaccaactttgataactttgcctttgccatgcttactgtgtttcagtgcatcaccatggagggctggacagatgtgctctactgggtaaatgatgcgataggatgggaatggccatgggtgtattttgttagtctgatcatccttggctcatttttcgtccttaacctggttcttggtgtccttagtgggtaagcagtcggatccgtgttgcaccttctcctgctgccacgtgtgaggcaactctgcgtgtctcctagctgctccctgacagcttctctgcatgtgtttggactctgatgtcctctcagtgtgttgcttttggattgaactgtgattctttctgcctgtatctgtctgtgagattccgtgtttccaatgcttgccaaacactgttaatttaatgaaaacgttcccccaaa

SEQ ID NO: 4492 - protein, 54 aa, Homo sapiens
MLTVFQCITMEGWTDVLYWVNDAIGWEWPWVYFVSLIILGSFFVLNLVLGVLSG

SEQ ID NO: 4493 - DNA, 2221 bp, Homo sapiens
gtcagatggtacaagtttgtctctataattaagacttttccaccatcacaaactttaaacacaaagtctaaaatcttgggcagcatagaaaataggttctagctaagcaggagttttgtcctctaccaagacctttcctgaaaatcacttatcaagacagtttcctgtaagaaaaagccatatcccagctgattttccttcctggggccaaaatctgctattattcggcctgaaagccttgatgactctgtgtgtgtgtgtgtgtgtgtgtgtgtgtgtgtgtgtgtgtgtgtgtgtgtgtgtgtgtgtatggatgcttgtgtgtgtgtatggggaatatgtgattaatgtgtgttggctgctgttgtctctgatttggctactgttgtttctgatttaaatctaagtaaatgtttaattaaatgtatagaatgctgtctctaatgtgaccctctctccttattaaatcctcttattaacccactcctatgagaccatcttatttcttgcagatgaatgatgctatgggatttgaattgccctgggtgtattttgtcagtctcgtcatctttgggtcatttttcgtactaaatcttgtacttggtgtattgagcgggcacagtggctcacgcctataatcccagcactttcggaggccgaggcagctggaccacccgagatcaggagtttgagaccagcctgactaaggcagtgaaaccctgtctctactaaaaatacaaaaattagccaggcatggtggcgcatgcctgtaatcccagctacttgggaggctgaggcaggagaatcacttgaaccagggaggtggagattgcagtgagccaagactgcaccattgcattccagcctgggtgacaagagcaaaactccatctcaaaaaaaaaaaaaaaaaaaaaaaaaaaaaaaaaaaaagacttttctctcattcaacactttaccagcatctactgacagaaaatggacaattgaatttcctccaatatatatacctctgatatgtctgctttgtaaaagagtagtgtaattgcttacaacattgaaaaggttgttattggggtcctggggtagccaggatatcggcatgatttgtcaccatattcagaataaaactgtactgcaatagtgagttaattccatatcttggccaacagagaatttttggccagtggctactaaggcacacggaagtccagtctaaaagggacaggggaggactctttgtagatagttcttatgattaaaaaataacttcctatgtgttgtagtgatgattaagctgacagaatgctaaagacacccttaatgattacttgtagcaaagtacttccccacatttagctggatttgtctttggtttgaagaggctaatacgtgaaagatttgttcacagttggatgtccccttttctgaaccatgaagtaatattgtgaatggagttgaatgctgaggttagggtgccggaaagattcagggtccttcggtaccctcacatggcttggctttggtagaacaagaaactaagctctgatttggctttaaatgagagtgctaaatttcctttttctaataaagaacctagctaaacatttatatatacttttgaacactgaactttcttgttgcagagttaacagctgttgggggtagctgacagctggatcctggtgctgttggtaccatggtacctgaagtgcacaggctggtagccacacctgacattaacaagtgagtggtaacctctctgccgctggcttacagctactgtttccatagaaatggctgtcgggatcagtggaaacgaggtaagtgaaagttttcgctgatccttgtttccatcaagctgacgtctgtttccctggcaacagcagtggacagcagccaggcgctagcaacagattcagtagagctctcacttgtcagctgtggctatcatctgttcctgaccaagttctttttttttttttaataatgtacagaaagacctctgaggacccaggaggcacctctggccacatgtgccctcctggatgctcgttttgcagatggagagctgtgtgctgagttgacttctctgtccgcagttccccctccacctgtgctctgggttgttgatgtgcaggttagaagagggaggttgttgagggtattagtgttgcaggggaggctgttgaatctgttgatcccaaatcctaggggaagagaa

SEQ ID NO: 4494 - protein, 49 aa, Homo sapiens
MRPSYFLQMNDAMGFELPWVYFVSLVIFGSFFVLNLVLGVLSGHSGSRL

SEQ ID NO: 4495 - DNA, 2697 bp, Homo sapiens
ggtttcgctctcattgcccaggctggaatgcaatggcgtgatctcagttcaccacaacctctgcctcctgggttcaagtgattctcctgcctcagcctcccaagtagctgggattacagcacatgctcaccaaaatgcaataccatgctatggtcgctcattctgtccacaaagattgcagctttctatgcactctaactgcattctgccacctgcaccctgtggcccacttgaaatgaagtttgactacatgacctgcttctttagccaataaaatgtgagcagaagtgatgcacttccaggtgacagatttaagaactggcatactttgccacttgatttttttccactctacatagcaactgtaatgttcaagatgctggcttctccatcagcctgcatcccagaacggggaaaacaaagtggccctgggaaaaagatgaaaacacaacttttctatcaagcccaatagattgaagtcaagagagagcaacgcacgtcttgaaaagaactgagtgggctgggcgcggtggctcacgcttgtaatctcagcactttgggaggccgaggcgggtggatcacctgaggtccggagtttgagaccagcctgaccaacatggtgaaaccccgtctctactgaaaaaatacaaaaattagcttggcatggtggcgtgcgcctgtagtcgcagctactcgggaggctgaggcaggagaatggcgtgaacccaggaggcggagcttccagtgagccgagattgcgccactgcactccagcctgggcaacacagcgaaactccgtctcaaaaaaaaagaaaagaaaagaactgagtgtaactgtgggcacatgaagctgatcagaattaaatagataagaagccaattaagtttttgagagagttgtatagccagagaaatcaggagcctgaactagaaatatttacaactgttcaaaatttaaagctaccctgggccctccccctttccccaggcaggaggcaggctgagaaagctgttctgcccccaaggaggacatattcttcaatgctcactttagatgtgggcaaggaaaggtaaaggaaaatttgcagaagaaagaaccaaatggactgaggagcaacagaatgagaacactgtaggatagcacttcctggccccctatgggaggtggagccaagtcatctcttctaatggtgtgagtggaagtgatgggtccttctcatcttttctgatggtgtgagtggaagtgatgggtcattctcatctgttctgatggtgtgagtggaagggatgggtcgctctcatctcttctgatggcgtgagtggaagggatgggtcgctctcatctcttctgatggcgcgagtggaagtaatgggtcattcttgtctcttctgatggtgtgagtggaagtgatgggtccttctcatctcttctgatggcgtgagtggaagtgatgggtcattcttgtctcttctgatggtgtcagtggaagtattgggttgttctcatctcttctgatggtgtgaagggaagtgatgggtccttctcatctcttctgatggtgtgagtgcaagtgatgggtccttctcatctcttctgatggtgtgagtggaagtaataggtcattctcatctcttctgatggtgtgagtggaagggatgggtcactttcatttattctgatggtgtgagtggaagagatgggtcactttcatctattctgatggtgtgagtggaagggatgggttgctttcctgctgagtgtgtttcttactttccagtgagaggtcctgcagaacactttattccttctggcttaaagactttatcattctgccagactggatccttgagagcctatgataagtagagtgcccctgccagcccatgacagcatgctgtgtggacaagaaacaaactttcattgtattcagcttagatttgagggtcgtatgcttctgcattacctacttatcactgatacaccattggagcaaaaaatcccatctatgaagaaactccaatgatttaccctatatagttctttctctgaatatgtcgtatgccttacctagtgaatcctggggctaaaatggtattgaaatggtcagatccaatcctgagcccctagtcttatgaactaggcctcctctaacaggcagtgctaagcttccatcattcccagacagtggcccaagatgaaagaagacttctctttcccagcttagcttgaatcacaaagcaatccatttgttttggccaaggggatgtgctactcttttaactcagggtcgcaggctttagggtgcacgcgatggaaaagaactcacttgtaactgttgcaccttgagttcttcttgttccaaaaagctccagaaagaagctcagccccaaaaaaataaaaaccagatggatccagagatgcctgagttggagatgaactttggtgaactctcctcattaccatactaaaaatccagtccagagaggagtttatttgccattttctacacatgcaatgtatgaagaagcacgatgggtgactgcacctgtgtgtgttgcctttactccacctccacacacaatgactcagccaaccagctcaaaaaaagccctgtttcacctttgtttgtggaggcactgctttggggaactgtcgtgggtgtccttacttcttgcaagtaataaaatccccttgct

SEQ ID NO: 4496 - protein, 59 aa, Homo sapiens
MYEEARWVTAPVCVAFTPPPHTMTQPTSSKKALFHLCLWRHCFGELSWVSLLLASNKIP

SEQ ID NO: 4497 - DNA, 2913 bp, Homo sapiens
aataactttgaaatgagtttgttgcctacaacatgcctttctccaactggaagaaggtgtgggtcctgtcagaaaactccagagcccgtaatcaaagcgaaggatctatcagcccagcaagtgccagcttcactaaacaaaacctccctgaaagaaatctcaggggaaaggctgagctcgatccccgaagcatctgaatatgactggcgaaactatcagccaagccagatgagtgaatccgagttacagatgctagcaagcctacggtggcaacaaaatgaagaactggaggatgctgggacctcccatggcctgagtgcctcccaggtggacaactgtaatgtcagcataagtaccagcagtgacgacacaaccacctggaactcctgcctgccaccccctgtcaaccagggtcgccactatcagaaagaaatgaacccaccttctccttctaatccccgggactggttaaatatgttgagcccaccaatcgttcctcccagtcaacagccggctgagcagcgtccagattcctgtgaaagtttgagtgttcaaggatgatttaatcccagaaagctggagagcttggagacatccaagatgctgacaaatggaccaccgaagaaaaagcacttagcacatgcacatgctcaccaaaatgcaataccatgctatggtcgctcattctgtccacaaagattgcagctttctatgcactctaactgcattctgccacctgcaccctgtggcccacttgaaatgaagtttgactacatgacctgcttctttagccaataaaatgtgagcagaagtgatgcacttccaggtgacagatttaagaactggcatactttgccacttgatttttttccactctacatagcaactgtaatgttcaagatgctggcttctccatcagcctgcatcccagaacggggaaaacaaagtggccctgggaaaaagatgaaaacacaacttttctatcaagcccaatagattgaagtcaagagagagcaacgcacgtcttgaaaagaactgagtgggctgggcgcggtggctcacgcttgtaatctcagcactttgggaggccgaggcgggtggatcacctgaggtccggagtttgagaccagcctgaccaacatggtgaaaccccgtctctactgaaaaaatacaaaaattagcttggcatggtggcgtgcgcctgtagtcgcagctactcgggaggctgaggcaggagaatggcgtgaacccaggaggcggagcttccagtgagccgagattgcgccactgcactccagcctgggcaacacagcgaaactccgtctcaaaaaaaaagaaaagaaaagaactgagtgtaactgtgggcacatgaagctgatcagaattaaatagataagaagccaattaagtttttgagagagttgtatagccagagaaatcaggagcctgaactagaaatatttacaactgttcaaaatttaaagctaccctgggccctccccctttccccaggcaggaggcaggctgagaaagctgttctgcccccaaggaggacatattcttcaatgctcactttagatgtgggcaaggaaaggtaaaggaaaatttgcagaagaaagaaccaaatggactgaggagcaacagaatgagaacactgtaggatagcacttcctggccccctatgggaggtggagccaagtcatctcttctaatggtgtgagtggaagtgatgggtccttctcatcttttctgatggtgtgagtggaagtgatgggtcattctcatctgttctgatggtgtgagtggaagggatgggtcgctctcatctcttctgatggcgtgagtggaagggatgggtcgctctcatctcttctgatggcgcgagtggaagtaatgggtcattcttgtctcttctgatggtgtgagtggaagtgatgggtccttctcatctcttctgatggcgtgagtggaagtgatgggtcattcttgtctcttctgatggtgtcagtggaagtattgggttgttctcatctcttctgatggtgtgaagggaagtgatgggtccttctcatctcttctgatggtgtgagtgcaagtgatgggtccttctcatctcttctgatggtgtgagtggaagtaataggtcattctcatctcttctgatggtgtgagtggaagggatgggtcactttcatttattctgatggtgtgagtggaagagatgggtcactttcatctattctgatggtgtgagtggaagggatgggttgctttcctgctgagtgtgtttcttactttccagtgagaggtcctgcagaacactttattccttctggcttaaagactttatcattctgccagactggatccttgagagcctatgataagtagagtgcccctgccagcccatgacagcatgctgtgtggacaagaaacaaactttcattgtattcagcttagatttgagggtcgtatgcttctgcattacctacttatcactgatacaccattggagcaaaaaatcccatctatgaagaaactccaatgatttaccctatatagttctttctctgaatatgtcgtatgccttacctagtgaatcctggggctaaaatggtattgaaatggtcagatccaatcctgagcccctagtcttatgaactaggcctcctctaacaggcagtgctaagcttccatcattcccagacagtggcccaagatgaaagaagacttctctttcccagcttagcttgaatcacaaagcaatccatttgttttggccaaggggatgtgctactcttttaactcagggtcgcaggctttagggtgcacgcgatggaaaagaactcacttgtaactgttgcaccttgagttcttcttgttccaaaaagctccagaaagaagctcagcccc

SEQ ID NO: 4498 - protein, 182 aa, Homo sapiens
MSLLPTTCLSPTGRRCGSCQKTPEPVIKAKDLSAQQVPASLNKTSLKEISGERLSSIPEASEYDWRNYQPSQMSESELQMLASLRWQQNEELEDAGTSHGLSASQVDNCNVSISTSSDDTTTWNSCLPPPVNQGRHYQKEMNPPSPSNPRDWLNMLSPPIVPPSQQPAEQRPDSCESLSVQG

SEQ ID NO: 4499 - DNA, 2204 bp, Homo sapiens
aaaataaccgatcatgccagccgtccactgtagagaagtgtgttaatggtacagaaatgtcagccttgctgatacctgagtctgaggaacaaggaaataaagaaaatattcaccaaataaagcagactgtacctattcatgcagccaatctacatattatgcatccgcatccccctcaagaaccatcagcagataagaataataacagaagaagattacggttaaaaagtaccagcagagaaaggacagagacacccagcggtagctcttcaggaaataataggattgaagataaagcatcaactatcctcaccactgtgtcccaacaaggagcagagctgttgaactccggcactctaggaccccagtctcctgatcaatcagatgagtggatttttcctgaaaatgctgatcacatttcatatctggcatccagcagacagtctctacttctgggtgatgactcctgcaacccatcacacctgtggctggaagccagcaaagagagtgaacacgaccagcaggcagaggaatcccagagtgttccaaaggacattttcactttttcatcaagaccacgatcagcacctcatggaaagactcagactatgtccccagaggagctctcatttattttggatctaaaagaggataacagtgtgacaagcagagacacccaatcagaggatgatttttacggcggcgacagcagtgaagagggtaaccacagtatccagggttctcgaggcccaacaactggtccttcagagttaactcagttaacattagagagcctgctggggaaggctgcaaagcggacaagtaaggaatatctaaggagcgcctacacagaagcaggagcaacagaaagccaggattcctcgatggagcaaatagatagaaataactttgaaatgagtttgttgcctacaacatgcctttctccaactggaagaaggtgtgggtcctgtcagaaaactccagagcccgtaatcaaagcgaaggatctatcagcccagcaagtgccagcttcactaaacaaaacctccctgaaagaaatctcaggggaaaggctgagctcgatccccgaagcatctgaatatgactggcgaaactatcagccaagccagatgagtgaatccgagttacagatgctagcaagcctacggtggcaacaaaatgaagaactggaggatgctgggacctcccatggcctgagtgcctcccaggtggacaactgtaatgtcagcataagtaccagcagtgacgacacaaccacctggaactcctgcctgccaccccctgtcaaccagggtcgccactatcagaaagaaatgaacccaccttctccttctaatccccgggactggttaaatatgttgagcccaccaatcgttcctcccagtcaacagccggctgagcagcgtccagattcctgtgaaagtttgagtgttcaaggtgaagaagacctcagtgtggaagaggacgaggaagtactgactttgttgtatgacccttgtctgaactgttactttgacccccaaacagggaaatactatgagttggtataatgcctccttccggggcagagagcaggcactcccagctggagcagaatagcagttcagggtcgcttaaggagtcaccacaacttatgtgttgggtgaccacaaaatcaacagtaactgagagaaacgaattcattttgtaaataatgttcaacgttaagaatacctatattccttttgtagatgagtatgattttgaaactgaagaaattaatacagaggcaagattttaggagtttgaattggttcttgtttgttctcattctacatataattttgtttatttcagataattttatgtaaacaaattaagagttattcattcaaattttttgcagtgttaatctgtaaatgatggcttgatgtacagaaaatgtatttttgcttaaaagatgcctgggtaccttttattttatggcatttgtattaaaaataaagtatgatggtaagaagaatagcttttaaactgcttcttttcattcaccccactttcttttccagaatattcctatatgatactttccttctcttcgactcttagaaaaagaaacattgtgaactggtcagactttatgatcacattttattggcactggacccactatttccatttcattattgttcatccagagtttg

SEQ ID NO: 4500 - protein, 504 aa, Homo sapiens
MSALLIPESEEQGNKENIHQIKQTVPIHAANLHIMHPHPPQEPSADKNNNRRRLRLKSTSRERTETPSGSSSGNNRIEDKASTILTTVSQQGAELLNSGTLGPQSPDQSDEWIFPENADHISYLASSRQSLLLGDDSCNPSHLWLEASKESEHDQQAEESQSVPKDIFTFSSRPRSAPHGKTQTMSPEELSFILDLKEDNSVTSRDTQSEDDFYGGDSSEEGNHSIQGSRGPTTGPSELTQLTLESLLGKAAKRTSKEYLRSAYTEAGATESQDSSMEQIDRNNFEMSLLPTTCLSPTGRRCGSCQKTPEPVIKAKDLSAQQVPASLNKTSLKEISGERLSSIPEASEYDWRNYQPSQMSESELQMLASLRWQQNEELEDAGTSHGLSASQVDNCNVSISTSSDDTTTWNSCLPPPVNQGRHYQKEMNPPSPSNPRDWLNMLSPPIVPPSQQPAEQRPDSCESLSVQGEEDLSVEEDEEVLTLLYDPCLNCYFDPQTGKYYELV

SEQ ID NO: 4501 - DNA, 2730 bp, Homo sapiens
cctaggccagcgggcggttgtctgtggctccgcgactgggcgccccgtcacggaggtgcatttgttgaaattttcagtgctcaaggaaaaaatcctggagcaaaatggaagatccttggtagtccatctgtgatttggaaagagtttgataaagaagttaaaagttttgtgtttgtcctggaaggcagcagccaaacaaacaaaattcagttaccaaaggagaataagcaaagccttggattgatccagaggtttcttgtacttcagatttacgtacccctgggacaagacttctccactgaattgctaattactgatttagggaacatcaaaagaagattatatttatcaacggtccataaggaactatcctccacccctcttcatgcaaaaattccactcttcatgatcaaacgtaaaatttggtgcaatctatgcattgacttagtagcattcaccagtgaaatattcaagggggcagttttccagtcattggatggaattgttgtctcagctaactgtaagctacggaagatcttcaccttaaaatcaaagccacaagacactgctgataaggatgctgtctatggtgttcccttttcaacagatgagcctacagatattataccacgaagctgtcaactaatgacagatgttccacatgtcacacagctgctaaacatgactaaacttcgccaaactgaaataaaattcggaggccatcctctaagatcagcagaatcagatcagttcattaacagaggaacaagtattacacggaacagtaaaaatcaagatgtttgtcatatcgcatttggatccaaagttcttgggccacctccactctctggcagaaggaataacatgaagatatccagcgagacagtgagatccgttgggtccaaaaataaccgatcatgccagccgtccactgtagagaagtgtgttaatggtacagaaatgtcagccttgctgatacctgagtctgaggaacaaggaaataaagaaaatattcaccaaataaagcagactgtacctattcatgcagccaatctacatattatgcatccgcatccccctcaagaaccatcagcagataagaataataacagaagaagattacggttaaaaagtaccagcagagaaaggacagagacacccagcggtagctcttcaggaaataataggattgaagataaagcatcaactatcctcaccactgtgtcccaacaaggagcagagctgttgaactccggcactctaggaccccagtctcctgatcaatcagatgagtggatttttcctgaaaatgctgatcacatttcatatctggcatccagcagacagtctctacttctgggtgatgactcctgcaacccatcacacctgtggctggaagccagcaaagagagtgaacacgaccagcaggcagaggaatcccagagtgttccaaaggacattttcactttttcatcaagaccacgatcagcacctcatggaaagactcagactatgtccccagaggagctctcatttattttggatctaaaagaggataacagtgtgacaagcagagacacccaatcagaggatgatttttacggcggcgacagcagtgaagaggaatatgactggcgaaactatcagccaagccagatgagtgaatccgagttacagatgctagcaagcctacggtggcaacaaaatgaagaactggaggatgctgggacctcccatggcctgagtgcctcccaggtggacaactgtaatgtcagcataagtaccagcagtgacgacacaaccacctggaactcctgcctgccaccccctgtcaaccagggtcgccactatcagaaagaaatgaacccaccttctccttctaatccccgggactggttaaatatgttgagcccaccaatcgttcctcccagtcaacagccggctgagcagcgtccagattcctgtgaaagtttgagtgttcaaggtgaagaagacctcagtgtggaagaggacgaggaagtactgactttgttgtatgacccttgtctgaactgttactttgacccccaaacagggaaatactatgagttggtataatgcctccttccggggcagagagcaggcactcccagctggagcagaatagcagttcagggtcgcttaaggagtcaccacaacttatgtgttgggtgaccacaaaatcaacagtaactgagagaaacgaattcattttgtaaataatgttcaacgttaagaatacctatattccttttgtagatgagtatgattttgaaactgaagaaattaatacagaggcaagattttaggagtttgaattggttcttgtttgttctcattctacatataattttgtttatttcagataattttatgtaaacaaattaagagttattcattcaaattttttgcagtgttaatctgtaaatgatggcttgatgtacagaaaatgtatttttgcttaaaagatgcctgggtaccttttattttatggcatttgtattaaaaataaagtatgatggtaagaagaatagcttttaaactgcttcttttcattcaccccactttcttttccagaatattcctatatgatactttccttctcttcgactcttagaaaaagaaacattgtgaactggtcagactttatgatcacattttattggcactggacccactatttccatttcattattgttcatccagagtttg

SEQ ID NO: 4502 - protein, 563 aa, Homo sapiens; identical to SEQ ID NO: 439

SEQ ID NO: 4503 - DNA, 2739 bp, Homo sapiens
gcggtttgattctggggtggggcggcagcgggagcgcgcccgcttttcctaggccagcgggcggttgtctgtggctccgcgactgggcgccccgtcacgtaggttacacacacaatcactccccagggacggcccggagtccgtccaggcagctgcgccctccccagacccgggcaccgcggaggctggagccgcaatggtgctgatggagggcgggagatggagctgaccaggggccggaggggctgagaagagcctgcccaagtctgggccaagcacgaagccctttcccacccgtcgggctcctgggttcccgccagccgatttccagccgtcagggtcacgccactcgctggaaaccctgaactctgtgccccccaagccctgggccccctgcgggaatgttcaaaaatgagtaccagggaggtgcatttgttgaaattttcagtgctcaaggaaaaaatcctggagcaaaatggaagatccttggtagtccatctgtgatttggaaagagtttgataaagaagttaaaagttttgtgtttgtcctggaaggcagcagccaaacaaacaaaattcagttaccaaaggagaataagcaaagccttggattgatccagaggtttcttgtacttcagatttacgtacccctgggacaagacttctccactgaattgctaattactgatttagggaacatcaaaagaagattatatttatcaacggtccataaggaactatcctccacccctcttcatgcaaaaattccactcttcatgatcaaacgtaaaatttggtgcaatctatgcattgacttagtagcattcaccagtgaaatattcaagggggcagttttccagtcattggatggaattgttgtctcagctaactgtaagctacggaagatcttcaccttaaaatcaaagccacaagacactgctgataaggatgctgtctatggtgttcccttttcaacagatgagcctacagatattataccacgaagctgtcaactaatgacagatgttccacatgtcacacagctgctaaacatgactaaacttcgccaaactgaaataaaattcggaggccatcctctaagatcagcagaatcagatcagttcattaacagaggaacaagtattacacggaacagtaaaaatcaagatgtttgtcatatcgcatttggatccaaagttcttgggccacctccactctctggcagaaggaataacatgaagatatccagcgagacagtgagatccgttgggtccaaaaataaccgatcatgccagccgtccactgtagagaagtgtgttaatggtacagaaatgtcagccttgctgatacctgagtctgaggaacaaggaaataaagaaaatattcaccaaataaagcagactgtacctattcatgcagccaatctacatattatgcatccgcatccccctcaagaaccatcagcagataagaataataacagaagaagattacggttaaaaagtaccagcagagaaaggacagagacacccagcggtagctcttcaggaaataataggattgaagataaagcatcaactatcctcaccactgtgtcccaacaaggagcagagctgttgaactccggcactctaggaccccagtctcctgatcaatcagatgagtggatttttcctgaaaatgctgatcacatttcatatctggcatccagcagacagtctctacttctgggtgatgactcctgcaacccatcacacctgtggctggaagccagcaaagagagtgaacacgaccagcaggcagaggaatcccagagtgttccaaaggacattttcactttttcatcaagaccacgatcagcacctcatggaaagactcagactatgtccccagaggagctctcatttattttggatctaaaagaggataacagtgtgacaagcagagacacccaatcagaggatgatttttacggcggcgacagcagtgaagagggtaaccacagtatccagggttctcgaggcccaacaactggtccttcagagttaactcagttaacattagagagcctgctggggaaggctgcaaagcggacaagtaaggaatatctaaggagcgcctacacagaagcaggagcaacagaaagccaggattcctcgatggagcaaatagatagaaataactttgaaatgagtttgttgcctacaacatgcctttctccaactggaagaaggtgtgggtcctgtcagaaaactccagagcccgtaatcaaagcgaaggatctatcagcccagcaagtgccagcttcactaaacaaaacctccctgaaagaaatctcaggggaaaggctgagctcgatccccgaagcatctgaatatgactggcgaaactatcagccaagccagatgagtgaatccgagttacagatgctagcaagcctacggtggcaacaaaatgaagaactggaggatgctgggacctcccatggcctgagtgcctcccaggtggacaactgtaatgtcagcataagtaccagcagtgacgacacaaccacctggaactcctgcctgccacccggactggttaaatatgttgagcccaccaatcgttcctcccagtcaacagccggctgagcagcgtccagattcctgtgaaagtttgagtgttcaaggtgggactatgaaaaacgatatgcataagaaaataaaaataatttactataaatagagagaatccatc

SEQ ID NO: 4504 - protein, 743 aa, Homo sapiens
MFKNEYQGGAFVEIFSAQGKNPGAKWKILGSPSVIWKEFDKEVKSFVFVLEGSSQTNKIQLPKENKQSLGLIQRFLVLQIYVPLGQDFSTELLITDLGNIKRRLYLSTVHKELSSTPLHAKIPLFMIKRKIWCNLCIDLVAFTSEIFKGAVFQSLDGIVVSANCKLRKIFTLKSKPQDTADKDAVYGVPFSTDEPTDIIPRSCQLMTDVPHVTQLLNMTKLRQTEIKFGGHPLRSAESDQFINRGTSITRNSKNQDVCHIAFGSKVLGPPPLSGRRNNMKISSETVRSVGSKNNRSCQPSTVEKCVNGTEMSALLIPESEEQGNKENIHQIKQTVPIHAANLHIMHPHPPQEPSADKNNNRRRLRLKSTSRERTETPSGSSSGNNRIEDKASTILTTVSQQGAELLNSGTLGPQSPDQSDEWIFPENADHISYLASSRQSLLLGDDSCNPSHLWLEASKESEHDQQAEESQSVPKDIFTFSSRPRSAPHGKTQTMSPEELSFILDLKEDNSVTSRDTQSEDDFYGGDSSEEGNHSIQGSRGPTTGPSELTQLTLESLLGKAAKRTSKEYLRSAYTEAGATESQDSSMEQIDRNNFEMSLLPTTCLSPTGRRCGSCQKTPEPVIKAKDLSAQQVPASLNKTSLKEISGERLSSIPEASEYDWRNYQPSQMSESELQMLASLRWQQNEELEDAGTSHGLSASQVDNCNVSISTSSDDTTTWNSCLPPGLVKYVEPTNRSSQSTAG

SEQ ID NO: 4505 - DNA, 427 bp, Homo sapiens
agcataagtaccagcagtgacgacacaaccacctggaactcctgcctgccaccccctgtcaaccagggtcgccactatcagaaagaaatgaacccaccttctccttctaatccccgcctttaggtcctttgccatccattaagacaaatcagatgcaatttggtgctcaggacaagaaaatgctgttggatgtttggtgtaggcatgggaaaaaaaaactatattctgaaacaagactggttagaaggcagcttcccacattttgagggactggttaaatatgttgagcccaccaatcgttcctcccagtcaacagccggctgagcagcgtccagattcctgtgaaagtttgagtgttcaaggtgggactatgaaaaacgatatgcataagaaaataaaaataatttactataaatagagagaatcc

SEQ ID NO: 4506 - protein, 44 aa, Homo sapiens
MFGVGMGKKNYILKQDWLEGSFPHFEGLVKYVEPTNRSSQSTAG

SEQ ID NO: 4507 - DNA, 715 bp, Homo sapiens
tgcaaagcggacaagtaaggaatatctaaggagcgcctacacagaagcaggagcaacagaaagccaggattcctcgatggagcaaatagatagaaataactttgaaatgagtttgttgcctacaacatgcctttctccaactggaagaaggtgtgggtcctgtcagaaaactccagagcccgtaatcaaagcgaaggatctatcagcccagcaagtgccagcttcactaaacaaaacctccctgaaagaaatctcaggggaaaggctgagctcgatccccgaagcatctgaatatgactggcgaaactatcagccaagccagatgagtgaatccgagttacagatgctagcaagcctacggtggcaacaaaatgaagaactggaggatgctgggacctcccatggcctgagtgcctcccaggtggacaactgtaatgtcagcataagtaccagcagtgacgacacaaccacctggaactcctgcctgccaccccctgtcaaccagggtcgccactatcagaaagaaatgaacccaccttctccttctaatccccgggactggttaaatatgttgagcccaccaatcgttcctcccagtcaacagccggctgagcagcgtccagattcctgtgaaagtttgagtgttcaaggtgggactatgaaaaacgatatgcataagaaaataaaaataatttactataaatagagagaatcc

SEQ ID NO: 4508 - protein, 209 aa, Homo sapiens
MEQIDRNNFEMSLLPTTCLSPTGRRCGSCQKTPEPVIKAKDLSAQQVPASLNKTSLKEISGERLSSIPEASEYDWRNYQPSQMSESELQMLASLRWQQNEELEDAGTSHGLSASQVDNCNVSISTSSDDTTTWNSCLPPPVNQGRHYQKEMNPPSPSNPRDWLNMLSPPIVPPSQQPAEQRPDSCESLSVQGGTMKNDMHKKIKIIYYK

SEQ ID NO: 4509 - DNA, 2203 bp, Homo sapiens
agctttgcttttccatgatcaagctgctagagattttggggtgagggagcgaaatgaaggctaaataaaagaaccggagataagataatcctgccatgttaaaagggggaaatctgaacaaagacagacggagaggatgctgtgcgacaatggaagcagagattggagtgatacacctacaaacaaaggaatccgaaagactgctggcaattgccagagactaggacagagggatggtacagattctccctcagtgcctccagaaggaaccaatcctgccgaaaccttgattttggactttcagcttccagaaacagaattttgaaattgcctggtggactagaaatgaagcaaaacacagaaaaacctgagatgaaagatggagagtgcttaaggggaactagtactggcttccatgcccagctgcatcactgccccttgagcttcccgtgacatcccaaaaaacttgcgattgaagctcccgctgtgctttaattcactccagttgatgtggtgaacagaaatgagtccaaatgacactagtcccaccccacaactttcgcaactttactgctaaaaattaactcaagtgccttttggcaaatggaatatacactgctgattctgatattgtaatctttagtgacctatgacatggttccatcaccgagctgaggagaaacaaacaaaacaaaaaaccctacatccattttttggttgttgttggataccagaaaagtctcatacatcctccttacaattttttaaattccaggttaaacagctattactgtttacttgtgagagtatcagttaggactcttttatgtcaaaagttaatagaaaatccaacttgagctagttcacctaaatggaatgctcacattattggaaaccacagaggtagggcaggcttcaggaatgattgattcggcagctcaaagctgtcatcaatgacccaatttctttgtttctccctttctgccatctggtgtcagctctgtcctcatggtcacaggacgggtgccagctacaaacagagtgcagcccagtctagcatcccaaacaagagtcataaaagtcactcaattggcccagcataggtcagattcccattcctaaaagaataatgtggctaaataaatgaaatgcactaattgacctatcaatcaaagcccactccaggggctagagtgtgatccattttactagacacacataggctgcactggccaggggagatacccaaacaaagatcagataatttttggaggagaaacatgtggcaaactatgctaggtagacaactaataaatgtctaccacacttggttcttccatgtgttactagaaaataactttaaaattccactttattttgtaaccattacagtaataattagttcaggcaagaatcatcatgctaaactggtgaatgagagcttaatgaggaagaagatatttataaagtctcaaattatatccccacaaatgactcaactaatattaaagtaaaaacatagtaactttactatgagaaaacctggtagagaccaccttaaccaagtgattgaagttaacatcagctgtaaacatcataagcctcctgataaactgcactgagaaggacacaacatcactttatagtacatttcaccaaagatgcataacatgaatctaatcctaagaaaacatcagacaaactcaattaaggggcattctacaaaataactgacctgtacttttcagcagtgtcactgatgtgaaagacacagaaaggctgaggaaacattacaaattaatggagacaagtgaaaactaaaggtagtgtgtaattctggatcaaaaacataattgctatgaaggacagtatgtctatatcatagatagtagtactgcatcaatgttaaatggttttgaaaattgtactgtggtcatgtagtgaacgtctttgtccttagtaaatatacactgaagtgtttaataaaggagtatgaagtgtgcaacatactctcaaatagcttgaggaaaaaaatgtgtatacacacacacacacaatcacacacatacagaaaaactgtaaaggcaaatgtggcaaaatgttaataattggtgaatatgcgtgaaaggtatatggtagttctttgtactatttttgtaacttttctttaagtttgaaattacttcaaaataaaaagtttttt

SEQ ID NO: 4510 - protein, 62 aa, Homo sapiens
MLCDNGSRDWSDTPTNKGIRKTAGNCQRLGQRDGTDSPSVPPEGTNPAETLILDFQLPETEF

SEQ ID NO: 4511 - DNA, 1230 bp, Homo sapiens
ctctgtccggtcacaggactttttgccctctgttcccgggtccctcaggcggccacccagtgggcacactcccaggcggcgctccggccccgcgctccctccctctgcctttcattcccagctgtcaacatcctggaagctttgaagctcaggaaagaagagaaatccactgagaacagtctgtaaaggtccgtagtgctatctacatccagacggtggaagggagagaaagagaaagaaggtatcctaggaatacctgcctgcttagaccctctataaaagctctgtgcatcctgccactgaggactccgaagaggtagcagtcttctgaaagacttcaactgtgaggacatgtcgttcagatttggccaacatctcatcaagccctctgtagtgtttctcaaaacagaactgtccttcgctcttgtgaataggaaacctgtggtaccaggacatgtccttgtgtgcccgctgcggccagtggagcgcttccatgacctgcgtcctgatgaagtggccgatttgtttcagacgacccagagagtcgggacagtggtggaaaaacatttccatgggacctctctcaccttttccatgcaggatggccccgaagccggacagactgtgaagcacgttcacgtccatgttcttcccaggaaggctggagactttcacaggaatgacagcatctatgaggagctccagaaacatgacaaggaggactttcctgcctcttggagatcagaggaggaaatggcagcagaagccgcagctctgcgggtctactttcagtgacacagatcctgaattccagcaaaagagctattgccaaccagtttgaagaccgccccccgcctctccccaagaggaactgaatcagcatgaaaatgcagtttcttcatctcaccatcctgtattcttcaaccagtgatcccccacctcggtcactccaactcccttaaaatacctagacctaaacggctcagacaggcagatttgaggtttccccctgtctccttattcggcagccttatgattaaacttccttctctgctgcaaccctgtgtctcggtgtattgacttgccatgaattaggcaacaaacctattacagttacagttacttttttaaaggaaattcaatcgttggattggtccacctgcttatttcttcccttttcaaaaaaaatgtctacatattgaatttttatacattaagtggttcatgaaa

SEQ ID NO: 4512 - protein, 147 aa, Homo sapiens; identical to SEQ ID NO: 441

SEQ ID NO: 4513 - DNA, 1068 bp, Homo sapiens
tccccgctctgctctgtccggtcacaggactttttgccctctgttcccgggtccctcaggcggccacccagtgggcacactcccaggcggcgctccggccccgcgctccctccctctgcctttcattcccagctgtcaacatcctggaagctttgaagctcaggaaagaagagaaatccactgagaacagtctgtaaaggtccgtagtgctatctacatccagacggtggaagggagagaaagagaaagaaggtatcctaggaatacctgcctgcttagaccctctataaaagctctgtgcatcctgccactgaggactccgaagaggtagcagtcttctgaaagacttcaactgtgaggacatgtcgttcagatttggccaacatctcatcaagccctctgtagtgtttctcaaaacagaactgtccttcgctcttgtgaataggaaacctgtggtaccaggacatgtccttgtgtgcccgctgcggccagtggagcgcttccatgacctgcgtcctgatgaagtggccgatttgtttcagacgacccagagagtcgggacagtggtggaaaaacatttccatgggacctctctcaccttttccatgcaggatggccccgaagccggacagactgtgaagcacgttcacgtccatgttcttcccaggaaggctggagactttcacaggaatgacagcatctatgaggagctccagaaacatgacaaggaggactttcctgcctcttggagatcagaggaggaaatggcagcagaagccgcagctctgcgggtctactttcagtgacacagatcctgaattccagcaaaagagctattgccaaccagtttgaagaccgccccccgcctctccccaagaggaactgaatcagcatgaaaatgcagtttcttcatctcaccatcctgtattcttcaaccagtgatcccccacctcggtcactccaactcccttaaaatacctagacctaaacggctcagacaggcagatttgaggtttccccctgtctccttattcggcagccttatgattaaacttccttctctgctgc

SEQ ID NO: 4514 - protein, 147 aa, Homo sapiens; identical to SEQ ID NO: 441

SEQ ID NO: 4515 - DNA, 561 bp, Homo sapiens
ttgaagctcaggaaagaagagaaatccactgagaacagtctgtaaaggtccgtagtgctatctacatccagacggtggaagggagagaaagagaaagaaggtatcctaggaatacctgcctgcttagaccctctataaaagctctgtgcatcctgccactgaggactccgaagaggtagcagtcttctgaaagacttcaactgtgaggacatgtcgttcagatttggccaacatctcatcaagccctctgtagtgtttctcaaaacagaactgtccttcgctcttgtgaataggaaacctgtggtaccaggacatgtccttgtgtgcccgctgcggccagtggagcgcttccatgacctgcgtcctgatgaagtggccgatttgtttcagacgacccagagagtcgggacagtggtggaaaaacatttccatgggacctctctcaccttttccatgcaggatggccccgaagccggacagactgtgaaggtgagtgcttattatgtgcatacaaattaataagaggcgattatgagaactaataaaaaatcacaacgagtc

SEQ ID NO: 4516 - protein, 102 aa, Homo sapiens
MSFRFGQHLIKPSVVFLKTELSFALVNRKPVVPGHVLVCPLRPVERFHDLRPDEVADLFQTTQRVGTVVEKHFHGTSLTFSMQDGPEAGQTVKVSAYYVHTN

SEQ ID NO: 4517 - DNA, 1795 bp, Homo sapiens
ctctgtccggtcacaggactttttgccctctgttcccgggtccctcaggcggccacccagtgggcacactcccaggcggcgctccggccccgcgctccctccctctgcctttcattcccagctgtcaacatcctggaagctttgaagctcaggaaagaagagaaatccactgagaacagtctgtaaagagtgagaagtggaccttggaccaccctgtctggagtcattccctgggcttctccagcccctgaagaaaatagtctcactcttgtcacccaggctggagtgcaatggctcgatctcagctcactgcaacctctgactcctgggttcaagatattctcctgcctcagtctcccgagtagctggtattacaggcatgcgccaccacacctggctaatttttgtatttttagtagagacagagattcaccatgttggccaggctggtcttgaactgctgaccttgggtgatctgtccacctcagcctcccaaagtgctgggattacaggtatcctaggaatacctgcctgcttagaccctctataaaagctctgtgcatcctgccactgaggactccgaagaggtagcagtcttctgaaagacttcaactgtgaggacatgtcgttcagatttggccaacatctcatcaagccctctgtagtgtttctcaaaacagaactgtccttcgctcttgtgaataggaaacctgtggtaccaggacgtatcctttctttttttttttggagagggaaaataaaagtcttctgagcctaaccagccaaatgaatataaatacaagattggcctccagtctgtccaaaaaggtaaataaagaatccatctccctcccacttcggagacaccaggtaagatgttactcatatttattctgaatccagttggtggcaccagtaatatgcttgatcaatgttgcagaacttctgaggagagttgcttagcaaccgtggctttggaggtgaatttttgcttgaccttttcactaccatagctgagtaaataaataggtgcttctaaaatgagcccagtgaatatcacgggcacttggttttcagcttatctgttgtgaattttaatagtagattgagtggtgcctttgtgatgtggaagtaagatatgtgaggatttgagactgactttgttgctttacctcttggagatcattcaagttgtgcgttttaattaaatttatattatagatatacttacaaattttttttaaaaaatattaggacctgaaatagcattttctcttgggaaaaataccagcttgcagatcattgaccagtgtcattggtggagttgttttatttccctctgaccactgagttgtagtctttcctcctatagacttcaataggagctttattcttttgcagtgggaataacaagtattggtgaaatgcttgggaagttatctttatgttgttaaaagtttcactcctgattgtgtgcatatgaattttgtacggactcttcaggatgtttttctctttcctccttcacttagtttgccatgcagaaggcaacagaataaaatttgatattttcagataataagtattttccacgctgagacatgattttgctttgaaatgaatttcttagtaattctgaatgtacaaatatgccaagaggtttttcagagtaagctacattttttttccagtgaaaatgtggaaagtgcctgagaactttatgaacaagcttcttttctagccacgtaactattgtatgctaaaaaaaaaaaaaatacaaataagaaaaacatgt

SEQ ID NO: 4518 - protein, 56 aa, Homo sapiens
MRHHTWLIFVFLVETEIHHVGQAGLELLTLGDLSTSASQSAGITGILGIPACLDPL

SEQ ID NO: 4519 - DNA, 606 bp, Homo sapiens
gctctgtccggtcacaggactttttgccctctgttcccgggtccctcaggcggccacccagtgggcacactcccaggcggcgctccggccccgcgctccctccctctgcctttcattcccagctgtcaacatcctggaagctttgaagctcaggaaagaagagaaatccactgagaacagtctgtaaaggtccgtagtgctatctacatccagacggtggaagggagagaaagagaaagaaggtatcctaggaatacctgcctgcttagaccctctataaaagctctgtgcatcctgccactgaggactccgaagaggtagcagtcttctgaaagcattctgtgtgctgaaatgggaagtatgcagaaagaactgctgctgtgtactgacatatcatggttgtctcaaggaaaagcacttgtgagactgggtagtgaaatgaaccagctaccttttatatggaacactatttttctgcatgaaagaagcattgaaagacaaactataattatgcaaactcaagtatttaacatattttctttaaaatgcacaaagtgagtctgttgctttaagtaaaccgttggccagtatttgttgatagtgata

SEQ ID NO: 4520 - protein, 68 aa, Homo sapiens
MGSMQKELLLCTDISWLSQGKALVRLGSEMNQLPFIWNTIFLHERSIERQTIIMQTQVFNIFSLKCTK

SEQ ID NO: 4521 - DNA, 763 bp, Homo sapiens
ctctgtccggtcacaggactttttgccctctgttcccgggtccctcaggcggccacccagtgggcacactcccaggcggcgctccggccccgcgctccctccctctgcctttcattcccagctgtcaacatcctggaagctttgaagctcaggaaagaagagaaatccactgagaacagtctgtaaaggtccgtagtgctatctacatccagacggtggaagggagagaaagagaaagaaggtatcctaggaatacctgcctgcttagaccctctataaaagctctgtgcatcctgccactgaggactccgaagaggtagcagtcttctgaaaggtaggtttacttaattttgatttttttttcaaagagtttgaaataattgacctgctgtgagtatccttataatagtagtaatgttcctatgtacttgtaaaatagaacttttaaaatggtaaaatttcagggctagattcccttggagaatttaccctctttcgacttctatttgtagctgccattttaaaaattggggtataaatattatgtcagttaaataaaagaatgatgacttcactttctgaagaaagcattccccttcttttccatgaaatgtagcttacctgttacctgactgacatgccattatattatcctccccccagcagttacacatatttaataatttttacgtgtaaaaagtaaggttaaacagttacaaagtcaggttgttatgttttgcatgactttgagaagctagtggaa

SEQ ID NO: 4522 - protein, 61 aa, Homo sapiens
LCPVTGLFALCSRVPQAATQWAHSQAALRPRAPSLCLSFPAVNILEALKLRKEEKSTENSL

SEQ ID NO: 4523 - DNA, 492 bp, Homo sapiens
ctctgtccggtcacaggactttttgccctctgttcccgggtccctcaggcggccacccagtgggcacactcccaggcggcgctccggccccgcgctccctccctctgcctttcattcccagctgtcaacatcctggaagctttgaagctcaggaaagaagagaaatccactgagaacagtctgtaaaggtccgtagtgctatctacatccagacggtggaagggagagaaagagaaagaagaaagaaaatttaaaagggatcttcagctcaggatgtgtcaggaggaagtgggagatactgacactgaccccagaagaaatttgaattggaatttgatgcgtagaattctactataatctttgtattcctatgttgaatgtgtagcggctttcccttgtatcctcgccaccttgctgccttttgaaacactcaggaaatatagttggctaaaactgaacaaacaataaaccttaggcattgaatggagttgg

SEQ ID NO: 4524 - protein, 61 aa, Homo sapiens; identical to SEQ ID NO: 4522

SEQ ID NO: 4525 - DNA, 558 bp, Homo sapiens
ctctgtccggtcacaggactttttgccctctgttcccgggtccctcaggcggccacccagtgggcacactcccaggcggcgctccggccccgcgctccctccctctgcctttcattcccagctgtcaacatcctggaagctttgaagctcaggaaagaagagaaatccactgagaacagtctgtaaaggtccgtagtgctatctacatccagacggtggaagggagagaaagagaaagaaggtaaaaccatttcttaaaatacttaacagaattggcacatatgccactggctaaagtcacctggccacacaagcgggtctgttcaaaaataataaatatttagaaggagagatatatgaatttttggtaaacagccttcagttctcacattatactgcactatactttcaagaactacacaaagattttgaaattctcacttttttcattattatcataattacttttgttatatctttaaggtattgttctggttcataacatgcattttattagctcaaaagaattactgctttccaagtaagggcattgaggga

SEQ ID NO: 4526 - protein, 61 aa, Homo sapiens; identical to SEQ ID NO: 4522

SEQ ID NO: 4527 - DNA, 921 bp, Homo sapiens
ctgggaattgcagtccccgctctgctctgtccggtcacaggactttttgccctctgttcccgggtccctcaggcggccacccagtgggcacactcccaggcggcgctccggccccgcgctccctccctctgcctttcattcccagctgtcaacatcctggaagctttgaagctcaggaaagaagagaaatccactgagaacagtctgtaaagagtgagaagtggaccttggaccaccctgtctggagtcattccctgggcttctccagcccctgaagaaaatagtctcactcttgtcacccaggctggagtgcaatggctcgatctcagctcactgcaacctctgactcctgggttcaagatattctcctgcctcagtctcccgagtagctggtattacaggcatgcgccaccacacctggctaatttttgtatttttagtagagacagagattcaccatgttggccaggctggtcttgaactgctgaccttgggtgatctgtccacctcagcctcccaaagtgctgggattacaggtatgagccactgtgcccagcctgtcagtcaattttctaggcaatttatagacattactcaaaattttttgaacaggcaaaaaacaagtaactctattaaaagatgggcaaaagatatgaacagacacttcccaaaagaagacatacaagtggccaacaaacatatgagaaaatgctcatcatcactaatcatcagagaaatgcaaatcaaaaccacagtgagataccatctcacactgtcagaatggctattattaaaaagtctaaaaacaacacatgttggtgaggctgtggggaaaaaggatgcttataaactgttgtcgagaatgtaaattaggtcagccactgtggaaagcagtttggagatttctcaaagaacttaaaa

SEQ ID NO: 4528 - protein, 154 aa, Homo sapiens [sequence omitted]

SEQ ID NO: 4529 - DNA, 457 bp, Homo sapiens
ctctgtccggtcacaggactttttgccctctgttcccgggtccctcaggcggccacccagtgggcacactcccaggcggcgctccggccccgcgctccctccctctgcctttcattcccagctgtcaacatcctggaagctgattctaaagtgcatctaagattgaaaaccactgattctaataacacagcattgtggaatgattcgcagctgattctaaagtgcatttaacattgaaaaccactgattctaataacacagcatcgtggaatgaatcaggaactgactcagcacaggaggacagctttgactccctgtgatttcatctccaattcgaccgatcagcactccccactgcctggcccgctacccaccaaattatccttaaaaaatcccagtctctgaaatgttccagggagactgatctcagtaataataaaactctggtctcctgttc

SEQ ID NO: 4530 - protein, 44 aa, Homo sapiens
MNQELTQHRRTALTPCDFISNSTDQHSPLPGPLPTKLSLKNPSL

SEQ ID NO: 4531 - DNA, 412 bp, Homo sapiens
caggggcgggaaacactgaccacagaagacaagttgagctgtatattctttgagatacttgagatctttctggttcatgccctcatctggaaaatggaaataataacatctctgcatggagatgacaaagtgtgggtacaatgcctaccacactgtagctactcaagaaatggaagtcacaatcattctcatgccaccagcctactgagcagatcaatgttctggtgatgttctgcatccagaccatctttcaagaactgaatggttactaccctgggtcttctaccgaaagaaagaacatgggtgtgggcattcaagtatagcctctaaaaaaagaacacataagtggttgctgggtgctgttatataatcacacacatacaaggcttaaatcatgaatatttcctttttg

SEQ ID NO: 4532 - protein, 44 aa, Homo sapiens
MEIITSLHGDDKVWVQCLPHCSYSRNGSHNHSHATSLLSRSMFW

SEQ ID NO: 4533 - DNA, 370 bp, Homo sapiens
aggcaatgggttaatggagactctagacatttgtttcctcaccagtgaaaattaaatgaagacccaggaatcactacagctatagggatgagaaggacatttcagcagctagagtgtggtggcctccttagcagcttctttttccatcaagaaaatatttctggacaaaaacaaacccatagctggttggaagcagggcattgggcccagtgttaaagatttgaataagaaagatgcagaagatattaatcataggcttatcaatgcccctaggagatctgtccccctgattgaagcaactctggcctttggaagttcatacccaagaagtatgatatcaatcttatttttaaataaagtaaaaatttga

SEQ ID NO: 4534 - protein, 42 aa, Homo sapiens
MRRTFQQLECGGLLSSFFFHQENISGQKQTHSWLEAGHWAQC

SEQ ID NO: 4535 - DNA, 3567 bp, Homo sapiens
cgagctggagctcggtgtgccggcacccagtgactgctggcggcctgggctgctggggccgacgcctgggtggctgccgccgccgcacctgctgcgagatagtgatcttcgtcgcggaagggtgagggcgcccactgcaggaggaggtgcaggtgccgcggccgcctggctgccgggagccgaaagcttcgcgcctgggttgtgagctccttgaaacagggaatcgtgtcttactcatctttgtatctccagtgtctagcagttcctgatacatagttttagctgaattttggaacatggccactgcctcaccaaagtcagatactactaataaccacagtggaaggttgcagttacaggtaactgtttctagtgccaaacttaagagaagaaagaactggttcggaacagcaatatatacagaagtagttgtagatgaggaaattaggaaaacagcaaaatccagtagttcttctaatctaaaatgggatgaacagctaactgtaaatgttacgccacagactacattggaatttcgagtttggagtcatcacactttaaaagcagatgcttaattaggaaatgcaacgacagatctgaaacaagctctgttgatacacaatagaaaactggaaagagtgaaagaacaattaaaactttccttagaaaacaagaatggcatagcacaaactggtgaattgacagttgtgcttgatggattggtgattgagcaagaaaatataacaaactgcagctcaactccagccatagaaatacagcaaaatggtgatgccttacatgaaaatggagagccttcagcaaggacaactgccaggttggctattgaaggcacgaatggaatagataatcatgtacctacaagcactctagtccaaaactcatgctgctcgtatgtagttaatggagacaacataccttcatctccatctcaggttgctgccagacccaaaaatacaccagccccaaaactactcacatctgagcctgccgatgacactgttaatggagaatcatcctcatttgcaccaactgataatgcttctgtcatgggtattccagtagtgtctgaagaaaatgccttgtctccaaattgcactagtactactgttgaagatcctccagttcaagaaatactgacttcctcagaaaacaatgaatgcattccttctaccagtgcagaattgggatctgaatctagaagtatattagaccctgacacctctaattctggaagtagttctgcttttgaaacagccaaatcaagacagccagatgggtgtatggatccagtatagcaggagtctgggaatgccaacacagaaaccttgccatcagggtgggaacaaagaaaatatcctcatggtagaacctattatgtggatcataatactcaaactaccacacgggagagaccacaacctttaccttcaggttgggaaagaagagttgatgatcgtggaagagcttattatgtggatcataacaccagaagaacaacatggcagcggcctaccatggaatgggtcagaaattttgaacagtggcaatctcagcagaaccaacctcagggagctatgcaacagtttaaccaatgatacctctattcagcttcaatgttagccgcagaaaatgaccctcatggacctttgccaccaggccgggaaaaaagagtggattcaacagacagggtttactttgtgaatcgtaatacaaaaacaacccagtgggaagatccaagaactcaaggcttacagaatgaagaacctctgccagaaggctgggaaataagatatactcgtgaaggtgtaaggtactttgttaatcacaatgcaagaacaacaacattcaaagatccttgcaatgggaagtcatccataactaaaggtggtccacaaattgattatgaacacagctttaggcggaaacttgctcacttccgttatttgtgccagtctaatgcactacccagtcatgtaaagatcaatgtgtcccggcagacattgtttgaagattccttccaacagattatggcattaaaaccttatgacttgaggaggtgcttatatgtaatatttagaggagaagaaggacttgattatggtggcctagcaagagaatggcttttcttgctttcacatgaagttttgaacccaatgtaatgcttatttgagtatgtggggaagaacaactattctctgcagataaatccagcatcaaccattaatccagaccatctttcatactactgtttcattggtcgttttattgccatggcactatttcatggaaagcttatagatactggtttctctttaccattctacaagcatatgttaagtaaaaaacttactattaaggatttggaatctattgatactgaattttataactcccttatctggataagagataacaacattgaagaatgtggcttagaactgtacttttctgttgacatggagagttggggaaaagttacttcacatgacctgaagttgggagtttccaatattctggtgactgaggagaacaaagatgaatatattggtttaatgacagaatggcatttttctcgaggagtacaagaacagaccaaagctttccttgatggttttaatggagttgttcctcatcagtggctacagtacttcaatgaaaaagaattagaggttacgttgtgtggcacacagcaggttgacttggcagattggcagagaaatactgtttatcaacattatacaagaaacagcaagcaaatcattcggttctggcagtttgtgaaagagacagacaatgaagtaagaatgctactattgcagttcgtcactggaacctgccgtttatctctaggaggatttgctgagctcatgggaagtaatgggcctcaaaagttttgcattgaaaaagttggcaaagatacttggttaccaagaagccatacatgttttaatctcttggatctaccaccatataagagttatgaacaactaaaggaaaaacttctttttgcaatagaagagacagagggatgtggacaagaatgaatgtggcttcttattttggaggatctcttgcattcaaataccccagccaagaaaaattgcacatagtgtatataagctgttcattctgtacagtgaattttctgaacctctcaaagtatgttttccattcttccacagcaatatgcaaaacatatttcatccttttctactttatttgttgtcctttgaaatgattgaccaggaaaaagatcatccttaaattttgaagcaagtgagagactttattaaaaatacatatgtatctatataagcatatgtgatagtggctctagttttatagagttgcaagtgtattaaacatgacagctgttcattcataaagatctggatttgctttaccttgttaatattatctaggcgaaaaagtgcaaattgctccatgttcttctctcccttgtgtaacatctcctgagggtgtttatttgtatgtctgttcaggaaggtattaagggcttaggccaaatcttactttgagtatgtt

SEQ ID NO: 4536 - protein, 257 aa, Homo sapiens [sequence omitted]

SEQ ID NO: 4537 - DNA, 671 bp, Homo sapiens
gcgggagcacagccgaacccctacctttcgggcggggcggacaccagccgcgcgccctcgccgggcgccgggaccggaaaatcaccgcgaagggagggacgaggaaaggcggcgggtggcttcaggacaaggactttgtgattacattgggcccatccagatcatccaggatcatcttcccatctcaagattcttcacttaatcacatctgcaaaattccttttgctgtctgtgagatatcggtgggcgaggatgtgatgcctgaagatgtggcatctaccttgaaacagtcaaggacctgaggatgaagccagcatctgaggaagacagacagaaaggatctggatacatcatgagcctgaaaagtatcttgcatacacaactggcagcacagaatcctgacaaacctctcatcagaaatcaaccacagactctttatgctcttaccaaaatgctggctttgagaactaattatgaatgaaaattactgatgtgattttcagtctagggaagaatatcaagttaaactttatgaagtccaagacaatgggaaaagaagaggtgttcctgtccaggccctcttccagttagaaggtgatggtttccagaagtctgcacctgtatttcaattacctataatggagtttataggactaaactatattcactat

SEQ ID NO: 4538 - protein, 58 aa, Homo sapiens [sequence omitted]

SEQ ID NO: 4539 - DNA, 524 bp, Homo sapiens
cgcgcgccctcgccgggcgccgggaccggaaaatcaccgcgaagggagggacgaggaaaggcggcgggtggcttcaggacaagctgtgagatatcggtgggcgaggatgtgatgcctgaagatgtggcatctaccttgaaacagtcaaggacctgaggatgaagccagcatctgaggaagacagacagaaaggatctggatacatcatgagcctgaaaagtatcttgcatacacaactggcagcacagaatcctgacaaacctctcatcagaaatcaaccacagactctttatgctcttaccaaaatgctggctttgagaactaattatgaatgaaaattactgatgtgattttcagtctagggaagaatatcaagttaaactttatgaagtccaagacaatgggaaaagaagaggtgttcctgtccaggccctcttccagttagaaggtgatggtttccagaagtctgcacctgtatttcaattacctataatggagtttataggactaaactatattcacta

SEQ ID NO: 4540 - protein, 58 aa, Homo sapiens [sequence omitted]

SEQ ID NO: 4541 - DNA, 1028 bp, Homo sapiens
atggtgcaggaagaggaaggcccctggtcagatacaaaagtttgtggcagtaaaaaggagcgacgaccgcagaggcgcaccgggctccgagacctgaggggccgctgctccagccggctgctgcctctctcgcggcgcctgccacatcgggccgcagaagcccgaggccggcagaaaccaaaggaaggtggcgcgggccaggggcggcgcgggcacgattccttccccgcggatctggcgggggagcagaggagggagcagccctgcccggagtctcaggctcccgccagccccaatcccgggcgactgcgccgagcgcctccggagtcgcgggaagctcctcctgctccgcggctggcgccagttgcacggtggccgcccccaaattcgaggaggaaggtgcaaagtggtgggaggctgcgggtctcccggagggtgaggcgttggggaccaggcgggagcacagccgaacccctacctttcgggcggggcggacaccagccgcgcgccctcgccgggcgccgggaccggaaaatcaccgcgaagggagggacgaggaaaggcggcgggtggcttcaggacaaggactttgtgattacattgggcccatccagatcatccaggatcatcttcccatctcaagattcttcacttaatcacatctgcaaaattccttttgctgtctgtgagatatcggtgggcgaggatgtgatgcctgaagatgtggcatctaccttgaaacagtcaaggacctgaggatgaagccagcatctgaggaagacagacagaaaggatctggatacatcatgagcctgaaaagtatcttgcatacacaactggcagcacagaatcctgacaaacctctcatcagaaatcaaccacagactctttatgctcttaccaaaatgctggctttgagaactaattatgaatgaaaattactgatgtgattttcaggtgagagaccctattagacaaaattttggattcatttttttctcttgagtaaaacatggggaaaaaatctt

SEQ ID NO: 4542 - protein, 251 aa, Homo sapiens
MVQEEEGPWSDTKVCGSKKERRPQRRTGLRDLRGRCSSRLLPLSRRLPHRAAEARGRQKPKEGGAGQGRRGHDSFPADLAGEQRREQPCPESQAPASPNPGRLRRAPPESREAPPAPRLAPVARWPPPNSRRKVQSGGRLRVSRRVRRWGPGGSTAEPLPFGRGGHQPRALAGRRDRKITAKGGTRKGGGWLQDKDFVITLGPSRSSRIIFPSQDSSLNHICKIPFAVCEISVGEDVMPEDVASTLKQSRT

SEQ ID NO: 4543 - DNA, 1504 bp, Homo sapiens
gtcagtccgcggcgccacaagcctcagtgtttacttctgccgcctgccagccgggcggggaaggggagtacccggccacccctcactttagctcctgcagctttccaaacaaaccagggcgggatgggagtgtcttcttggctgtggaaatcgatcctcctaccttgtcctgaagccacccgccgcctttcctcgtccctcccttcgcggtgattttccggtcccggcgcccggcgagggcgcgcggctggtgtccgccccgcccgaaaggtgagccagccatgagagggtatcttgtggccatattcctgagtgctgtcttcctctattatgtactgcattgcatattatggggaacgaatgtctattgggtggcacctgtggaaatgaaacggagaaataagatccagccttgtttatcaaagccagcttttgcctctctgctgaggtttcatcagtttcacccttttctgtgtgcggctgattttagaaagattgcttccttgtatggtagcgataagtttgatttgccctatgggatgagaacatcagcggaatattttcgacttgctctttcaaaactgcagagttgtgatctctttgatgagtttgacaacataccctgtaaaaagtgtgtggtggttggtaatggaggagttttgaagaataagacattaggagaaaaaatcgactcctatgatgtaataataagaatgaataatggtcctgttttaggacatgaagaagaagttgggagaaggacaaccttccgacttttttatccagaatctgttttttcagatcctattcacaatgaccctaatacgacagtgattctcactgcttttaagccacatgatttaaggtggctgttggaattgttgatgggtgacaaaataaacactaatggtttttggaagaaaccagccttaaacctgatttataaaccttatcaaatccgaatattagatcctttcattatcagaacagcagcttatgaactgcttcattttccaaaagtgtttcccaaaaatcagaaacctaaacacccaacaacaggaattattgccatcacattggcgttttacatatgtcacgaagttcacctagctggttttaaatacaacttttctgacctcaagagtcctttgcactactatgggaatgccaccatgtctttgatgaataagaacgcgtatcacaatgtgactgcagagcagctctttttgaaggacattatagaaaaaaacctcgtaatcaacttgactcaagattgactctacagactcagaagatgatgctaacagtgttagttttatttttgtactgcaatttttagtttaaaatatgttggatgcactcgtcaaataattatgtatactgtctgttgctgcctggtgattcataaccaccagcttaatttctgtgaatactgtatatttaacttatgaaaaccaagaaatgtaaagataacaggaaaataagttttgattgcattgttttt

SEQ ID NO: 4544 - protein, 331 aa, Homo sapiens; identical to SEQ ID NO: 444

SEQ ID NO: 4545 - DNA, 2033 bp, Homo sapiens
gccagccgggcggggaaggggagtacccggccacccctcactttagctcctgcagctttccaaacaaaccagggcgggatgggagtgtcttcttggctgtggaaatcgatcctcctaccttgtcctgaagccacccgccgcctttcctcgtccctcccttcgcggtgattttccggtcccggcgcccggcgagggcgcgcggctggtgtccgccccgcccgaaaggtgagccagccatgagagggtatcttgtggccatattcctgagtgctgtcttcctctattatgtactgcattgcatattatggggaacgaatgtctattgggtggcacctgtggaaatgaaacggagaaataagatccagccttgtttatcaaagccagcttttgcctctctgctgagtcagagctctgcatatattttaagaaaaggcattgaggaactcaatcaaaccagtattcttttcacacaggtttcatcagtttcacccttttctgtgtgcggctgattttagaaagattgcttccttgtatggtagcgataagtttgatttgccctatgggatgagaacatcagcggaatattttcgacttgctctttcaaaactgcagagttgtgatctctttgatgagtttgacaacataccctgtaaaaagtgtgtggtggttggtaatggaggagttttgaagaataagacattaggagaaaaaatcgactcctatgatgtaataataagaatgaataatggtcctgttttaggacatgaagaagaagttgggagaaggacaaccttccgacttttttatccagaatctgttttttcagatcctattcacaatgaccctaatacgacagtgattctcactgcttttaagccacatgatttaaggtggctgttggaattgttgatgggtgacaaaataaacactaatggtttttggaagaaaccagccttaaacctgatttataaaccttatcaaatccgaatattagatcctttcattatcagaacagcagcttatgaactgcttcattttccaaaagtgtttcccaaaaatcagaaacctaaacacccaacaacaggaattattgccatcacattggcgttttacatatgtcacgaagttcacctagctggttttaaatacaacttttctgacctcaagagtcctttgcactactatgggaatgccaccatgtctttgatgaataagaacgcgtatcacaatgtgactgcagagcagctctttttgaaggacattatagaaaaaaacctcgtaatcaacttgactcaagattgactctacagactcagaagatgatgctaacagtgttagttttatttttgtactgcaatttttagtttaaaatatgttggatgcactcgtcaaataattatgtatactgtctgttgctgcctggtgattcataaccaccagcttaatttctgtgaatactgtatatttaacttatgaaaaccaagaaatgtaaagataacaggaaaataagttttgattgcattgtttttaaaataagctagttttctgaggtgttttcacacgtctttttatagttacttcatcttagatttttgaagggatatgacttcctactaaggatttagtttaccacaacaattctgactacaataagacattttgaggaggatatttggctactgtaaacatggctggtggaaaatcacgattgtggcttgatgtggcaagccgaaaccacttggctctggaaatctaagttcatactggtttaattaagctctctcctgacaacccccagaattaaatgaaccatgattgtgaagagtaatttggtacaatgaaggcagtgtttgtttttaagttaaaggaaatgggctaaacataaagttcttattagataagtaaataactaaagaaagaatacaattactaaactctgatggctttgtattattttaaagaaatgaagtttaactttatacagtgaagctaagctaggcaagctcaagaaggaaaaaaaaatcttgaacatt

SEQ ID NO: 4546 - protein, 245 aa, Homo sapiens
MRTSAEYFRLALSKLQSCDLFDEFDNIPCKKCVVVGNGGVLKNKTLGEKIDSYDVIIRMNNGPVLGHEEEVGRRTTFRLFYPESVFSDPIHNDPNTTVILTAFKPHDLRWLLELLMGDKINTNGFWKKPALNLIYKPYQIRILDPFIIRTAAYELLHFPKVFPKNQKPKHPTTGIIAITLAFYICHEVHLAGFKYNFSDLKSPLHYYGNATMSLMNKNAYHNVTAEQLFLKDIIEKNLVINLTQD

SEQ ID NO: 4547 - DNA, 2786 bp, Homo sapiens
ggcggggaaggggagtacccggccacccctcactttagctcctgcagctttccaaacaaaccagggcgggatgggagtgtcttcttggctgtggaaatcgatcctcctaccttgtcctgaagccacccgccgcctttcctcgtccctcccttcgcggtgattttccggtcccggcgcccggcgagggcgcgcggctggtgtccgccccgcccgaaaggtgagccagccatgagagggtatcttgtggccatattcctgagtgctgtcttcctctattatgtactgcattgcatattatggggaacgaatgtctattgggtggcacctgtggaaatgaaacggagaaataagatccagccttgtttatcaaagccagcttttgcctctctgctgagtcagagctctgcatatattttaagaaaaggcattgaggaactcaatcaaaccagtattcttttcacacaggtttcatcagtttcacccttttctgtgtgcggctgattttagaaagattgcttccttgtatggtagcgataagtttgatttgccctatgggatgagaacatcagcggaatattttcgacttgctctttcaaaactgcagagttgtgatctctttgatgagtttgacaacataccctgtaaaaagtgtgtggtggttggtaatggaggagttttgaagaataagacattaggagaaaaaatcgactcctatgatgtaataataagaatgaataatggtcctgttttaggacatgaagaagaagttgggagaaggacaaccttccgacttttttatccagaatctgttttttcagatcctattcacaatgaccctaatacgacagtgattctcactgcttttaagccacatgatttaaggtggctgttggaattgttgatgggtgacaaaataaacactaatggtttttggaagaaaccagccttaaacctgatttataaaccttatcaaatccgaatattagatcctttcattatcagaacagcagcttatgaactgcttcattttccaaaagtgtttcccaaaaatcagaaacctaaacacccaacaacaggaattattgccatcacattggcgttttacatatgtcacgaagttcacctagctggttttaaatacaacttttctgacctcaagagtcctttgcactactatgggaatgccaccatgtctttgatgaataagaacgcgtatcacaatgtgactgcagagcagctctttttgaaggacattatagaaaaaaacctcgtaatcaacttgactcaagattgactctacagactcagaagatgatgctaacagtgttagttttatttttgtactgcaatttttagtttaaaatatgttggatgcactcgtcaaataattatgtatactgtctgttgctgcctggtgattcataaccaccagcttaatttctgtgaatactgtatatttaacttatgaaaaccaagaaatgtaaagataacaggaaaataagttttgattgcattgtttttaaaataagctagttttctgaggtgttttcacacgtctttttatagttacttcatcttagatttttgaagggatatgacttcctactaaggatttagtttaccacaacaattctgactacaataagacattttgaggaggatatttggctactgtaaacatggctggtggaaaatcacgattgtggcttgatgtggcaagccgaaaccacttggctctggaaatctaagttcatactggtttaattaagctctctcctgacaacccccagaattaaatgaaccatgattgtgaagagtaatttggtacaatgaaggcagtgtttgtttttaagttaaaggaaatgggctaaacataaagttcttattagataagtaaataactaaagaaagaatacaattactaaactctgatggctttgtattattttaaagaaatgaagtttaactttatacagtgaagctaagctaggcaagctcaagaaggaaaaaaaaatcttgaacattatttttttttgcctgacttacttattcattaaattttgaaggttttccacttgaagtaaattaggaaaggtaaagaagataacagaacaagtaaacacttaagaaaagtcaagctgaggccgggcagggtggctcacacctgtaatcctaacaaacactttgggaggccgagggaggcagctggattgcctgaactcaggagttcaagaccagcctggccaacatggtgaaacctcatctctactaaaatacaaaataattagctgggcgtggtggtatgcgctgtagtcccaggtactcgggaggctgaggcacgagaattgcttgagcccgggaggcagaggttgcagtgagccaagatcgcgccactgcacttcagcctgggtgacagagtgaggctgtcttctaaaaaatataaaaagtgaagttgggatttttggatttaaatggtacaaaaagaatatctcattttcccatgattaaagctaatcttcagatggaaagcttgcctggctacctagggtgcaccagagaatctgatccaatgcaagccagtcaatcctacaaatgtggtgagctagtcttccttcctatattttaataaatgtaaccaaaggccatctggaggtaggggaatgagaggtgaagaaacagaaaaatagaggttataaggatggaactaaaagttgtcagaagaggtatgagctgaagaaagaattactctcttttgaccaataaatacaattgggaaacactggaaa

SEQ ID NO: 4548 - protein, 245 aa, Homo sapiens; identical to SEQ ID NO: 4546

SEQ ID NO: 4549 - DNA, 3282 bp, Homo sapiens
ggcggggaaggggagtacccggccacccctcactttagctcctgcagctttccaaacaaaccagggcgggatgggagtgtcttcttggctgtggaaatcgatcctcctaccttgtcctgaagccacccgccgcctttcctcgtccctcccttcgcggtgattttccggtcccggcgcccggcgagggcgcgcggctggtgtccgccccgcccgaaaggtgagccagccatgagagggtatcttgtggccatattcctgagtgctgtcttcctctattatgtactgcattgcatattatggggaacgaatgtctattgggtggcacctgtggaaatgaaacggagaaataagatccagccttgtttatcaaagccagcttttgcctctctgctgagtcagagctctgcatatattttaagaaaaggcattgaggaactcaatcaaaccagtattcttttcacacaggtttcatcagtttcacccttttctgtgtgcggctgattttagaaagattgcttccttgtatggtagcgataagtttgatttgccctatgggatgagaacatcagcggaatattttcgacttgctctttcaaaactgcagagttgtgatctctttgatgagtttgacaaaatgaataatggtcctgttttaggacatgaagaagaagttgggagaaggacaaccttccgacttttttatccagaatctgttttttcagatcctattcacaatgaccctaatacgacagtgattctcactgcttttaagccacatgatttaaggtggctgttggaattgttgatgggtgacaaaataaacactaatggtttttggaagaaaccagccttaaacctgatttataaaccttatcaaatccgaatattagatcctttcattatcagaacagcagcttatgaactgcttcattttccaaaagtgtttcccaaaaatcagaaacctaaacacccaacaacaggaattattgccatcacattggcgttttacatatgtcacgaagttcacctagctggttttaaatacaacttttctgacctcaagagtcctttgcactactatgggaatgccaccatgtctttgatgaataagaacgcgtatcacaatgtgactgcagagcagctctttttgaaggacattatagaaaaaaacctcgtaatcaacttgactcaagattgactctacagactcagaagatgatgctaacagtgttagttttatttttgtactgcaatttttagtttaaaatatgttggatgcactcgtcaaataattatgtatactgtctgttgctgcctggtgattcataaccaccagcttaatttctgtgaatactgtatatttaacttatgaaaaccaagaaatgtaaagataacaggaaaataagttttgattgcattgtttttaaaataagctagttttctgaggtgttttcacacgtctttttatagttacttcatcttagatttttgaagggatatgacttcctactaaggatttagtttaccacaacaattctgactacaataagacattttgaggaggatatttggctactgtaaacatggctggtggaaaatcacgattgtggcttgatgtggcaagccgaaaccacttggctctggaaatctaagttcatactggtttaattaagctctctcctgacaacccccagaattaaatgaaccatgattgtgaagagtaatttggtacaatgaaggcagtgtttgtttttaagttaaaggaaatgggctaaacataaagttcttattagataagtaaataactaaagaaagaatacaattactaaactctgatggctttgtattattttaaagaaatgaagtttaactttatacagtgaagctaagctaggcaagctcaagaaggaaaaaaaaatcttgaacattatttttttttgcctgacttacttattcattaaattttgaaggttttccacttgaagtaaattaggaaaggtaaagaagataacagaacaagtaaacacttaagaaaagtcaagctgaggccgggcagggtggctcacacctgtaatcctaacaaacactttgggaggccgagggaggcagctggattgcctgaactcaggagttcaagaccagcctggccaacatggtgaaacctcatctctactaaaatacaaaataattagctgggcgtggtggtatgcgctgtagtcccaggtactcgggaggctgaggcacgagaattgcttgagcccgggaggcagaggttgcagtgagccaagatcgcgccactgcacttcagcctgggtgacagagtgaggctgtcttctaaaaaatataaaaagtgaagttgggatttttggatttaaatggtacaaaaagaatatctcattttcccatgattaaagctaatcttcagatggaaagcttgcctggctacctagggtgcaccagagaatctgatccaatgcaagccagtcaatcctacaaatgtggtgagctagtcttccttcctatattttaataaatgtaaccaaaggccatctggaggtaggggaatgagaggtgaagaaacagaaaaatagaggttataaggatggaactaaaagttgtcagaagaggtatgagctgaagaaagaattactctcttttgaccaataaatacaattgggaaacactggaaaaccatggcttgattactgacaaccaacctgcctctctaaagagggtgtataaagggtgaaatacattagatttggctcagaaacagaatgcggtacttataaagcagaataaaggggagaacagtagtagttgatctaacccagattagacatgaataccagcatatgtttgcagagtcccacagttttgattcctcttataactttttgaggtgcaaaaggaaggtaccagaactggaatcacatgtaatcaatcagtgtgattttcccctcataccacacagccataggctgcagtgtggctgctgaagttcaattgatataaagtaaatcaggcttcaaaaagaatggtgctgtgggtacacaaggacataaagatgggaacgatagacactgaggactgcggcggggggagcgaggggagcggggagggcaagggctgaaagactatgtattgggtactatgctcacaacctggatgatgggatcattcataccacaaacctcagtatcacacaatatacccatgtaacaacctgcactctgcacatgtacccttagaatctaaaataaaagttgaaattattttttt

SEQ ID NO: 4550 - protein, 213 aa, Homo sapiens
MRTSAEYFRLALSKLQSCDLFDEFDKMNNGPVLGHEEEVGRRTTFRLFYPESVFSDPIHNDPNTTVILTAFKPHDLRWLLELLMGDKINTNGFWKKPALNLIYKPYQIRILDPFIIRTAAYELLHFPKVFPKNQKPKHPTTGIIAITLAFYICHEVHLAGFKYNFSDLKSPLHYYGNATMSLMNKNAYHNVTAEQLFLKDIIEKNLVINLTQD

SEQ ID NO: 4551 - DNA, 1146 bp, Homo sapiens
gggcgggatgggagtgtcttcttggctgtggaaatcgatcctcctaccttgtcctgaagccacccgccgcctttcctcgtccctcccttcgcggtgattttccggtcccggcgcccggcgagggcgcgcggctggtgtccgccccgcccgaaaggtttcatcagtttcacccttttctgtgtgcggctgattttagaaagattgcttccttgtatggtagcgataagtttgatttgccctatgggatgagaacatcagcataccctgtaaaaagtgtgtggtggttggtaatggaggagttttgaagaataagacattaggagaaaaaatcgactcctatgatgtaataataagaatgaataatggtcctgttttaggacatgaagaagaagttgggagaaggacaaccttccgacttttttatccagaatctgttttttcagatcctattcacaatgaccctaatacgacagtgattctcactgcttttaagccacatgatttaaggtggctgttggaattgttgatgggtgacaaaataaacactaatggtttttggaagaaaccagccttaaacctgatttataaaccttatcaaatccgaatattagatcctttcattatcagaacagcagcttatgaactgcttcattttccaaaagtgtttcccaaaaatcagaaacctaaacacccaacaacaggaattattgccatcacattggcgttttacatatgtcacgaagttcacctagctggttttaaatacaacttttctgacctcaagagtcctttgcactactatgggaatgccaccatgtctttgatgaataagaacgcgtatcacaatgtgactgcagagcagctctttttgaaggacattatagaaaaaaacctcgtaatcaacttgactcaagattgactctacagactcagaagatgatgctaacagtgttagttttatttttgtactgcaatttttagtttaaaatatgttggatgcactcgtcaaataattatgtatactgtctgttgctgcctggtgattcataaccaccagcttaatttctgtgaatactgtatatttaacttatgaaaaccaagaaatgtaaagataacaggaaaataagttttgattgcattgttttt

SEQ ID NO: 4552 - protein, 187 aa, Homo sapiens
MNNGPVLGHEEEVGRRTTFRLFYPESVFSDPIHNDPNTTVILTAFKPHDLRWLLELLMGDKINTNGFWKKPALNLIYKPYQIRILDPFIIRTAAYELLHFPKVFPKNQKPKHPTTGIIAITLAFYICHEVHLAGFKYNFSDLKSPLHYYGNATMSLMNKNAYHNVTAEQLFLKDIIEKNLVINLTQD

SEQ ID NO: 4553 - DNA, 1556 bp, Homo sapiens
gggcgggatgggagtgtcttcttggctgtggaaatcgatcctcctaccttgtcctgaagccacccgccgcctttcctcgtccctcccttcgcggtgattttccggtcccggcgcccggcgagggcgcgcggctggtgtccgccccgcccgaaaggtttcatcagtttcacccttttctgtgtgcggctgattttagaaagattgcttccttgtatggtagcgataagtttgatttgccctatgggatgagaacatcagcataccctgtaaaaagtgtgtggtggttggtaatggaggagttttgaagaataagacattaggagaaaaaatcgactcctatgatgtaataataagaatgaataatggtcctgttttaggacatgaagaagaagttgggagaaggacaaccttccgacttttttatccagaatctgttttttcagatcctattcacaatgaccctaatacgacagtgattctcactgcttttaagccacatgatttaaggtggctgttggaattgttgatgggtgacaaaataaacactaatggtttttggaagaaaccagccttaaacctgatttataaaccttatcaaatccgaatattagatcctttcattatcagaacagcagcttatgaactgcttcattttccaaaagtgtttcccaaaaatcagaaacctaaacacccaacaacaggaattattgccatcacattggcgttttacatatgtcacgaagttcacctagctggttttaaatacaacttttctgacctcaagagtcctttgcactactatgggaatgccaccatgtctttgatgaataagaacgcgtatcacaatgtgactgcagagcagctctttttgaaggacattatagaaaaaaacctcgtaatcaacttgactcaagattgactctacagactcagaagatgatgctaacagtgttagttttatttttgtactgcaatttttagtttaaaatatgttggatgcactcgtcaaataattatgtatactgtctgttgctgcctggtgattcataaccaccagcttaatttctgtgaatactgtatatttaacttatgaaaaccaagaaatgtaaagataacaggaaaataagttttgattgcattgtttttaaaataagctagttttctgaggtgttttcacacgtctttttatagttacttcatcttagatttttgaagggatatgacttcctactaaggatttagtttaccacaacaattctgactacaataagacattttgaggaggatatttggctactgtaaacatggctggtggaaaatcacgattgtggcttgatgtggcaagccgaaaccacttggctctggaaatctaagttcatactggtttaattaagctctctcctgacaacccccagaattaaatgaaccatgattgtgaagagtaatttggtacaatgaaggcagtgtttgtttttaagttaaaggaaatgggctaaacataaagttcttattagataagtaaataactaaagaaagaatacaattactaaactctg

SEQ ID NO: 4554 - protein, 187 aa, Homo sapiens; identical to SEQ ID NO: 4552

SEQ ID NO: 4555 - DNA, 1650 bp, Homo sapiens
gggcgggatgggagtgtcttcttggctgtggaaatcgatcctcctaccttgtcctgaagccacccgccgcctttcctcgtccctcccttcgcggtgattttccggtcccggcgcccggcgagggcgcgcggctggtgtccgccccgcccgaaaggtttcatcagtttcacccttttctgtgtgcggctgattttagaaagattgcttccttgtatggtagcgataagtttgatttgccctatgggatgagaacatcagcataccctgtaaaaagtgtgtggtggttggtaatggaggagttttgaagaataagacattaggagaaaaaatcgactcctatgatgtaataataagaatgaataatggtcctgttttaggacatgaagaagaagttgggagaaggacaaccttccgacttttttatccagaatctgttttttcagatcctattcacaatgaccctaatacgacagtgattctcactgcttttaagccacatgatttaaggtggctgttggaattgttgatgggtgacaaaataaacactaatggtttttggaagaaaccagccttaaacctgatttataaaccttatcaaatccgaatattagatcctttcattatcagaacagcagcttatgaactgcttcattttccaaaagtgtttcccaaaaatcagaaacctaaacacccaacaacaggaattattgccatcacattggcgttttacatatgtcacgaagttcacctagctggttttaaatacaacttttctgacctcaagagtcctttgcactactatgggaatgccaccatgtctttgatgaataagaacgcgtatcacaatgtgactgcagagcagctctttttgaaggacattatagaaaaaaacctcgtaatcaacttgactcaagattgactctacagactcagaagatgatgctaacagtgttagttttatttttgtactgcaatttttagtttaaaatatgttggatgcactcgtcaaataattatgtatactgtctgttgctgcctggtgattcataaccaccagcttaatttctgtgaatactgtatatttaacttatgaaaaccaagaaatgtaaagataacaggaaaataagttttgattgcattgtttttaaaataagctagttttctgaggtgttttcacacgtctttttatagttacttcatcttagatttttgaagggatatgacttcctactaaggatttagtttaccacaacaattctgactacaataagacattttgaggaggatatttggctactgtaaacatggctggtggaaaatcacgattgtggcttgatgtggcaagccgaaaccacttggctctggaaatctaagttcatactggtttaattaagctctctcctgacaacccccagaattaaatgaaccatgattgtgaagagtaatttggtacaatgaaggcagtgtttgtttttaagttaaaggaaatgggctaaacataaagttcttattagataagtaaataactaaagaaagaatacaattactaaactctgatggctttgtattattttaaagaaatgaagtttaactttatacagtgaagctaagctaggcaagctcaagaaggaaaaaaaaatcttgaacatt

SEQ ID NO: 4556 - protein, 187 aa, Homo sapiens; identical to SEQ ID NO: 4552

SEQ ID NO: 4557 - DNA, 2411 bp, Homo sapiens
gggcgggatgggagtgtcttcttggctgtggaaatcgatcctcctaccttgtcctgaagccacccgccgcctttcctcgtccctcccttcgcggtgattttccggtcccggcgcccggcgagggcgcgcggctggtgtccgccccgcccgaaaggtttcatcagtttcacccttttctgtgtgcggctgattttagaaagattgcttccttgtatggtagcgataagtttgatttgccctatgggatgagaacatcagcataccctgtaaaaagtgtgtggtggttggtaatggaggagttttgaagaataagacattaggagaaaaaatcgactcctatgatgtaataataagaatgaataatggtcctgttttaggacatgaagaagaagttgggagaaggacaaccttccgacttttttatccagaatctgttttttcagatcctattcacaatgaccctaatacgacagtgattctcactgcttttaagccacatgatttaaggtggctgttggaattgttgatgggtgacaaaataaacactaatggtttttggaagaaaccagccttaaacctgatttataaaccttatcaaatccgaatattagatcctttcattatcagaacagcagcttatgaactgcttcattttccaaaagtgtttcccaaaaatcagaaacctaaacacccaacaacaggaattattgccatcacattggcgttttacatatgtcacgaagttcacctagctggttttaaatacaacttttctgacctcaagagtcctttgcactactatgggaatgccaccatgtctttgatgaataagaacgcgtatcacaatgtgactgcagagcagctctttttgaaggacattatagaaaaaaacctcgtaatcaacttgactcaagattgactctacagactcagaagatgatgctaacagtgttagttttatttttgtactgcaatttttagtttaaaatatgttggatgcactcgtcaaataattatgtatactgtctgttgctgcctggtgattcataaccaccagcttaatttctgtgaatactgtatatttaacttatgaaaaccaagaaatgtaaagataacaggaaaataagttttgattgcattgtttttaaaataagctagttttctgaggtgttttcacacgtctttttatagttacttcatcttagatttttgaagggatatgacttcctactaaggatttagtttaccacaacaattctgactacaataagacattttgaggaggatatttggctactgtaaacatggctggtggaaaatcacgattgtggcttgatgtggcaagccgaaaccacttggctctggaaatctaagttcatactggtttaattaagctctctcctgacaacccccagaattaaatgaaccatgattgtgaagagtaatttggtacaatgaaggcagtgtttgtttttaagttaaaggaaatgggctaaacataaagttcttattagataagtaaataactaaagaaagaatacaattactaaactctgatggctttgtattattttaaagaaatgaagtttaactttatacagtgaagctaagctaggcaagctcaagaaggaaaaaaaaatcttgaacattatttttttttgcctgacttacttattcattaaattttgaaggttttccacttgaagtaaattaggaaaggtaaagaagataacagaacaagtaaacacttaagaaaagtcaagctgaggccgggcagggtggctcacacctgtaatcctaacaaacactttgggaggccgagggaggcagctggattgcctgaactcaggagttcaagaccagcctggccaacatggtgaaacctcatctctactaaaatacaaaataattagctgggcgtggtggtatgcgctgtagtcccaggtactcgggaggctgaggcacgagaattgcttgagcccgggaggcagaggttgcagtgagccaagatcgcgccactgcacttcagcctgggtgacagagtgaggctgtcttctaaaaaatataaaaagtgaagttgggatttttggatttaaatggtacaaaaagaatatctcattttcccatgattaaagctaatcttcagatggaaagcttgcctggctacctagggtgcaccagagaatctgatccaatgcaagccagtcaatcctacaaatgtggtgagctagtcttccttcctatattttaataaatgtaaccaaaggccatctggaggtaggggaatgagaggtgaagaaacagaaaaatagaggttataaggatggaactaaaagttgtcagaagaggtatgagctgaagaaagaattactctcttttgaccaataaatacaattgggaaacactggaaa

SEQ ID NO: 4558 - protein, 187 aa, Homo sapiens; identical to SEQ ID NO: 4552

SEQ ID NO: 4559 - DNA, 1742 bp, Homo sapiens
gcgcggctggtgtccgccccgcccgaaaggtaggggttcggctgtgctcccgcctggtccccaacgcctcaccctccgggagacccgcagcctcccaccactttgcaccttcctcctcgaatttgggggcggccaccgtgcaactggcgccagccgcggagcaggaggagcttcccgcgactccggaggcgctcggcgcagtcgcccgggattggggctggcgggagcctgagactccgggcagggctgctccctcctctgctcccccgccagatccgcggggaaggaatcgtgcccgcgccgcccctggcccgcgccaccttcctttggtttctgccggcctcgggcttctgcggcccgatgtggcaggcgccgcgagagaggcagcagccggctggagcagcggcccctcaggtctcggagcccggtgcgcctctgcggtcgtcgctcctgggcctcggcgggtcactcttgccggccggcttcgctgcgggtttgcactgcccgggtgagccagccatgagagggtatcttgtggccatattcctgagtgctgtcttcctctattatgtactgcattgcatattatggggaacgaatgtctattgggtggcacctgtggaaatgaaacggagaaataagatccagccttgtttatcaaagccagcttttgcctctctgctgaggtttcatcagtttcacccttttctgtgtgcggctgattttagaaagattgcttccttgtatggtagcgataagtttgatttgccctatgggatgagaacatcagcggaatattttcgacttgctctttcaaaactgcagagttgtgatctctttgatgagtttgacaacataccctgtaaaaagtgtgtggtggttggtaatggaggagttttgaagaataagacattaggagaaaaaatcgactcctatgatgtaataataagaatgaataatggtcctgttttaggacatgaagaagaagttgggagaaggacaaccttccgacttttttatccagaatctgttttttcagatcctattcacaatgaccctaatacgacagtgattctcactgcttttaagccacatgatttaaggtggctgttggaattgttgatgggtgacaaaataaacactaatggtttttggaagaaaccagccttaaacctgatttataaaccttatcaaatccgaatattagatcctttcattatcagaacagcagcttatgaactgcttcattttccaaaagtgtttcccaaaaatcagaaacctaaacacccaacaacaggaattattgccatcacattggcgttttacatatgtcacgaagttcacctagctggttttaaatacaacttttctgacctcaagagtcctttgcactactatgggaatgccaccatgtctttgatgaataagaacgcgtatcacaatgtgactgcagagcagctctttttgaaggacattatagaaaaaaacctcgtaatcaacttgactcaagattgactctacagactcagaagatgatgctaacagtgttagttttatttttgtactgcaatttttagtttaaaatatgttggatgcactcgtcaaataattatgtatactgtctgttgctgcctggtgattcataaccaccagcttaatttctgtgaatactgtatatttaacttatgaaaaccaagaaatgtaaagataacaggaaaataagttttgattgcattgttttt

SEQ ID NO: 4560 - protein, 384 aa, Homo sapiens
MWQAPRERQQPAGAAAPQVSEPGAPLRSSLLGLGGSLLPAGFAAGLHCPGEPAMRGYLVAIFLSAVFLYYVLHCILWGTNVYWVAPVEMKRRNKIQPCLSKPAFASLLRFHQFHPFLCAADFRKIASLYGSDKFDLPYGMRTSAEYFRLALSKLQSCDLFDEFDNIPCKKCVVVGNGGVLKNKTLGEKIDSYDVIIRMNNGPVLGHEEEVGRRTTFRLFYPESVFSDPIHNDPNTTVILTAFKPHDLRWLLELLMGDKINTNGFWKKPALNLIYKPYQIRILDPFIIRTAAYELLHFPKVFPKNQKPKHPTTGIIAITLAFYICHEVHLAGFKYNFSDLKSPLHYYGNATMSLMNKNAYHNVTAEQLFLKDIIEKNLVINLTQD

SEQ ID NO: 4561 - DNA, 2324 bp, Homo sapiens
gcgcggctggtgtccgccccgcccgaaaggtaggggttcggctgtgctcccgcctggtccccaacgcctcaccctccgggagacccgcagcctcccaccactttgcaccttcctcctcgaatttgggggcggccaccgtgcaactggcgccagccgcggagcaggaggagcttcccgcgactccggaggcgctcggcgcagtcgcccgggattggggctggcgggagcctgagactccgggcagggctgctccctcctctgctcccccgccagatccgcggggaaggaatcgtgcccgcgccgcccctggcccgcgccaccttcctttggtttctgccggcctcgggcttctgcggcccgatgtggcaggcgccgcgagagaggcagcagccggctggagcagcggcccctcaggtctcggagcccggtgcgcctctgcggtcgtcgctcctgggcctcggcgggtcactcttgccggccggcttcgctgcgggtttgcactgcccggcatttgcaagtgaggaagcagcacaaccctgggttttagataatttctaacagagaggccccagcaattcagcaggcagcgtcctgagtctttggcagcctggtccctctttcgcaaattctccacctttgcgaacagagggtctttaggacacagattcttaaaagtgcaggtgagccagccatgagagggtatcttgtggccatattcctgagtgctgtcttcctctattatgtactgcattgcatattatggggaacgaatgtctattgggtggcacctgtggaaatgaaacggagaaataagatccagccttgtttatcaaagccagcttttgcctctctgctgaggtttcatcagtttcacccttttctgtgtgcggctgattttagaaagattgcttccttgtatggtagcgataagtttgatttgccctatgggatgagaacatcagcggaatattttcgacttgctctttcaaaactgcagagttgtgatctctttgatgagtttgacaacataccctgtaaaaagtgtgtggtggttggtaatggaggagttttgaagaataagacattaggagaaaaaatcgactcctatgatgtaataataagaatgaataatggtcctgttttaggacatgaagaagaagttgggagaaggacaaccttccgacttttttatccagaatctgttttttcagatcctattcacaatgaccctaatacgacagtgattctcactgcttttaagccacatgatttaaggtggctgttggaattgttgatgggtgacaaaataaacactaatggtttttggaagaaaccagccttaaacctgatttataaaccttatcaaatccgaatattagatcctttcattatcagaacagcagcttatgaactgcttcattttccaaaagtgtttcccaaaaatcagaaacctaaacacccaacaacaggaattattgccatcacattggcgttttacatatgtcacgaagttcacctagctggttttaaatacaacttttctgacctcaagagtcctttgcactactatgggaatgccaccatgtctttgatgaataagaacgcgtatcacaatgtgactgcagagcagctctttttgaaggacattatagaaaaaaacctcgtaatcaacttgactcaagattgactctacagactcagaagatgatgctaacagtgttagttttatttttgtactgcaatttttagtttaaaatatgttggatgcactcgtcaaataattatgtatactgtctgttgctgcctggtgattcataaccaccagcttaatttctgtgaatactgtatatttaacttatgaaaaccaagaaatgtaaagataacaggaaaataagttttgattgcattgtttttaaaataagctagttttctgaggtgttttcacacgtctttttatagttacttcatcttagatttttgaagggatatgacttcctactaaggatttagtttaccacaacaattctgactacaataagacattttgaggaggatatttggctactgtaaacatggctggtggaaaatcacgattgtggcttgatgtggcaagccgaaaccacttggctctggaaatctaagttcatactggtttaattaagctctctcctgacaacccccagaattaaatgaaccatgattgtgaagagtaatttggtacaatgaaggcagtgtttgtttttaagttaaaggaaatgggctaaacataaagttcttattagataagtaaataactaaagaaagaatacaattactaaactctg

SEQ ID NO: 4562 - protein, 331 aa, Homo sapiens; identical to SEQ ID NO: 444

SEQ ID NO: 4563 - DNA, 862 bp, Homo sapiens
aaaaaaatctagacattaatgcatggctagagttggaggttctgttgtagatttgctcatgtaggcatgtgactgcagattataatcacaaattgagtaataagtacaaagaggaaggaaggcaggatgtgaaatctgttggccatgttccacacagtctggagtgtatgtcagtgtgagctgaagaccagcagagactaggatggatgacggcctgtccaggggctgaatggacacaggtgtcagcagggccacctggtaaaggtatggaggtgagccagccatgagagggtatcttgtggccatattcctgagtgctgtcttcctctattatgtactgcattgcatattatggggaacgaatgtctattgggtggcacctgtggaaatgaaacggagaaataagatccagccttgtttatcaaagccagcttttgcctctctgctgaggtttcatcagtttcacccttttctgtgtgcggctgattttagaaagattgcttccttgtatggtagcgataagtttgatttgccctatgggatgagaacatcagcggaatattttcgacttgctctttcaaaactgcagagttgtgatctctttgatgagtttgacaaaaacagagagcccaggaccatgaggcttccgcctgctggacagcaaggacttccagtagcttctcagctgttttcccagtcactttcagaagcaaggctgctatagctaattgatgtatgcaagatgtaattacagccattgatagggaaaatatcagcaatatgatgcccttggaagctcagaaaaaagtcaaaaggctgtaccatgactctcacaatagccagatctgaatataaaatctag

SEQ ID NO: 4564 - protein, 146 aa, Homo sapiens
MRGYLVAIFLSAVFLYYVLHCILWGTNVYWVAPVEMKRRNKIQPCLSKPAFASLLRFHQFHPFLCAADFRKIASLYGSDKFDLPYGMRTSAEYFRLALSKLQSCDLFDEFDKNREPRTMRLPPAGQQGLPVASQLFSQSLSEARLL

SEQ ID NO: 4565 - DNA, 2134 bp, Homo sapiens
aaaaaaatctagacattaatgcatggctagagttggaggttctgttgtagatttgctcatgtaggcatgtgactgcagattataatcacaaattgagtaataagtacaaagaggaaggaaggcaggatgtgaaatctgttggccatgttccacacagtctggagtgtatgtcagtgtgagctgaagaccagcagagactaggatggatgacggcctgtccaggggctgaatggacacaggtgtcagcagggccacctggtaaaggtatggaggtgagccagccatgagagggtatcttgtggccatattcctgagtgctgtcttcctctattatgtactgcattgcatattatggggaacgaatgtctattgggtggcacctgtggaaatgaaacggagaaataagatccagccttgtttatcaaagccagcttttgcctctctgctgagtcagagctctgcatatattttaagaaaaggcattgaggaactcaatcaaaccagtattcttttcacacaggtttcatcagtttcacccttttctgtgtgcggctgattttagaaagattgcttccttgtatggtagcgataagtttgatttgccctatgggatgagaacatcagcggaatattttcgacttgctctttcaaaactgcagagttgtgatctctttgatgagtttgacaaaaacagagagcccaggaccatgaggcttccgcctgctggacagcaaggacttccagtagcttctcagctgttttcccagtcactttcagaagcaaggctgctatagctaattgatgtatgcaagatgtaattacagccattgatagggaaaatatcagcaatatgatgcccttggaagctcagaaaaaagtcaaaaggctgtaccatgactctcacaatagccagatctgaatataaaatctagtctcttctggtgatggagaaaaggaagtgtcatccatacaagatgaatttacactctgaaccccaggaggtcctgcacgtaggaagtgcctacaatccaagtaccatgctctttactgcctctcctgcttccagcactgtccctggggtcatccaaaccagtacagtaacccagctggcctctcttctgaaaacatctccaacttcaacaatactttgagataccatattgctggtatttcaaaaactgctgccagcagggaggaggccaatggcgtgtccatagatcatgttcagcctccaagtggtctcataatcaacaaagaatctgaagtttacaagatgcttcaggagaaacaggagttgaatgaacccctgaaacagtctacctctttcctgattttgcaggaaatcctggagtctgagataaaaggggatctcaacaaccctcaggattcagaagtgttactcagctcagtctattactcagtggctgcatcaattggaaatgctcagaaggtgcccatgtgtgacaaatgtggtcctggcattgtaggcatgtttgtaaagctgcggggaccatcatcccctccctgaatgttacgtgtgcactgattgtgacactcacccgaaagagaagggctttttttttttttttttccatcaaatctactgtgaagagcatgcccaggagcaagtcacaccacttgagggtacgatgtggtcatcatgttccccaagtgatccagcagacctgcactgaccaccgttctccagccagcctctgctgcagctagttctctaaatgttctggccttgtctcttgaaagttctgtacttattcccccaccccacaacccgcttaccttggttttatccctgctcattgaaccttgagtcccttgtcttggttaactgactcacactgactgtgtggtgcccgcccacttttacaatgaatggcaaactgtttttgttcagtgtccccttgccggcaacactgtgtaccttcctcccctcagttcttctctgctgcaaatggacatcagccacatttgaaccaaatcaaatataatatgtctgacattgatttcatttttgctccatctatagactcccagaaaaaagaaataaaaaaaatgcaaagaaaatttaaatgaacaaacagacccttctggaacctactgtgacatgagatgtgtc

SEQ ID NO: 4566 - protein, 90 aa, Homo sapiens
MRGYLVAIFLSAVFLYYVLHCILWGTNVYWVAPVEMKRRNKIQPCLSKPAFASLLSQSSAYILRKGIEELNQTSILFTQVSSVSPFSVCG

SEQ ID NO: 4567 - DNA, 1158 bp, Homo sapiens
ggccactttctcagaaacagaaaagccagcagcaatttggagaagctcttctgggaaacctggagcttttatcttcagtgttataaagagaacatcttcccttataattaggcttgggtgtggatttcagctgtcatttatgggatagtgaccccagacttgtcatagctgatacaacttcacatatatggtttcatcagtttcacccttttctgtgtgcggctgattttagaaagattgcttccttgtatggtagcgataagtttgatttgccctatgggatgagaacatcagtgattggccctatatagcattaagttctagatttttgagggatcataaaagcccaaggtgacaagccttcaacattcggaatattttcgacttgctctttcaaaactgcagagttgtgatctctttgatgagtttgacaaaacgcgtatcacaatgtgactgcagagcagctctttttgaaggacattatagaaaaaaacctcgtaatcaacttgactcaagattgactctacagactcagaagatgatgctaacagtgttagttttatttttgtactgcaatttttagtttaaaatatgttggatgcactcgtcaaataattatgtatactgtctgttgctgcctggtgattcataaccaccagcttaatttctgtgaatactgtatatttaacttatgaaaaccaagaaatgtaaagataacaggaaaataagttttgattgcattgtttttaaaataagctagttttctgaggtgttttcacacgtctttttatagttacttcatcttagatttttgaagggatatgacttcctactaaggatttagtttaccacaacaattctgactacaataagacattttgaggaggatatttggctactgtaaacatggctggtggaaaatcacgattgtggcttgatgtggcaagccgaaaccacttggctctggaaatctaagttcatactggtttaattaagctctctcctgacaacccccagaattaaatgaaccatgattgtgaagagtaatttggtacaatgaaggcagtgtttgtttttaagttaaaggaaatgggctaaacataaagttcttattagataagtaaataactaaagaaagaatacaattactaaactctg

SEQ ID NO: 4568 - protein, 53 aa, Homo sapiens
MSLTKRVSQCDCRAALFEGHYRKKPRNQLDSRLTLQTQKMMLTVLVLFLYCNF

SEQ ID NO: 4569 - DNA, 1252 bp, Homo sapiens
ggccactttctcagaaacagaaaagccagcagcaatttggagaagctcttctgggaaacctggagcttttatcttcagtgttataaagagaacatcttcccttataattaggcttgggtgtggatttcagctgtcatttatgggatagtgaccccagacttgtcatagctgatacaacttcacatatatggtttcatcagtttcacccttttctgtgtgcggctgattttagaaagattgcttccttgtatggtagcgataagtttgatttgccctatgggatgagaacatcagtgattggccctatatagcattaagttctagatttttgagggatcataaaagcccaaggtgacaagccttcaacattcggaatattttcgacttgctctttcaaaactgcagagttgtgatctctttgatgagtttgacaaaacgcgtatcacaatgtgactgcagagcagctctttttgaaggacattatagaaaaaaacctcgtaatcaacttgactcaagattgactctacagactcagaagatgatgctaacagtgttagttttatttttgtactgcaatttttagtttaaaatatgttggatgcactcgtcaaataattatgtatactgtctgttgctgcctggtgattcataaccaccagcttaatttctgtgaatactgtatatttaacttatgaaaaccaagaaatgtaaagataacaggaaaataagttttgattgcattgtttttaaaataagctagttttctgaggtgttttcacacgtctttttatagttacttcatcttagatttttgaagggatatgacttcctactaaggatttagtttaccacaacaattctgactacaataagacattttgaggaggatatttggctactgtaaacatggctggtggaaaatcacgattgtggcttgatgtggcaagccgaaaccacttggctctggaaatctaagttcatactggtttaattaagctctctcctgacaacccccagaattaaatgaaccatgattgtgaagagtaatttggtacaatgaaggcagtgtttgtttttaagttaaaggaaatgggctaaacataaagttcttattagataagtaaataactaaagaaagaatacaattactaaactctgatggctttgtattattttaaagaaatgaagtttaactttatacagtgaagctaagctaggcaagctcaagaaggaaaaaaaaatcttgaacatt

SEQ ID NO: 4570 - protein, 53 aa, Homo sapiens; identical to SEQ ID NO: 4568

SEQ ID NO: 4571 - DNA, 2013 bp, Homo sapiens
ggccactttctcagaaacagaaaagccagcagcaatttggagaagctcttctgggaaacctggagcttttatcttcagtgttataaagagaacatcttcccttataattaggcttgggtgtggatttcagctgtcatttatgggatagtgaccccagacttgtcatagctgatacaacttcacatatatggtttcatcagtttcacccttttctgtgtgcggctgattttagaaagattgcttccttgtatggtagcgataagtttgatttgccctatgggatgagaacatcagtgattggccctatatagcattaagttctagatttttgagggatcataaaagcccaaggtgacaagccttcaacattcggaatattttcgacttgctctttcaaaactgcagagttgtgatctctttgatgagtttgacaaaacgcgtatcacaatgtgactgcagagcagctctttttgaaggacattatagaaaaaaacctcgtaatcaacttgactcaagattgactctacagactcagaagatgatgctaacagtgttagttttatttttgtactgcaatttttagtttaaaatatgttggatgcactcgtcaaataattatgtatactgtctgttgctgcctggtgattcataaccaccagcttaatttctgtgaatactgtatatttaacttatgaaaaccaagaaatgtaaagataacaggaaaataagttttgattgcattgtttttaaaataagctagttttctgaggtgttttcacacgtctttttatagttacttcatcttagatttttgaagggatatgacttcctactaaggatttagtttaccacaacaattctgactacaataagacattttgaggaggatatttggctactgtaaacatggctggtggaaaatcacgattgtggcttgatgtggcaagccgaaaccacttggctctggaaatctaagttcatactggtttaattaagctctctcctgacaacccccagaattaaatgaaccatgattgtgaagagtaatttggtacaatgaaggcagtgtttgtttttaagttaaaggaaatgggctaaacataaagttcttattagataagtaaataactaaagaaagaatacaattactaaactctgatggctttgtattattttaaagaaatgaagtttaactttatacagtgaagctaagctaggcaagctcaagaaggaaaaaaaaatcttgaacattatttttttttgcctgacttacttattcattaaattttgaaggttttccacttgaagtaaattaggaaaggtaaagaagataacagaacaagtaaacacttaagaaaagtcaagctgaggccgggcagggtggctcacacctgtaatcctaacaaacactttgggaggccgagggaggcagctggattgcctgaactcaggagttcaagaccagcctggccaacatggtgaaacctcatctctactaaaatacaaaataattagctgggcgtggtggtatgcgctgtagtcccaggtactcgggaggctgaggcacgagaattgcttgagcccgggaggcagaggttgcagtgagccaagatcgcgccactgcacttcagcctgggtgacagagtgaggctgtcttctaaaaaatataaaaagtgaagttgggatttttggatttaaatggtacaaaaagaatatctcattttcccatgattaaagctaatcttcagatggaaagcttgcctggctacctagggtgcaccagagaatctgatccaatgcaagccagtcaatcctacaaatgtggtgagctagtcttccttcctatattttaataaatgtaaccaaaggccatctggaggtaggggaatgagaggtgaagaaacagaaaaatagaggttataaggatggaactaaaagttgtcagaagaggtatgagctgaagaaagaattactctcttttgaccaataaatacaattgggaaacactggaaa

SEQ ID NO: 4572 - protein, 53 aa, Homo sapiens; identical to SEQ ID NO: 4568

SEQ ID NO: 4573 - DNA, 2982 bp, Homo sapiens
ccatttaatgtatagtttatttctaggttttccttctgtgtttttagacactgaaatgcctaaatattgatttgtttattattttgtttctttatttttccagctcccggtaaaacacaatttatttctctgaaacctaaaatccctctcagcccagaagtgacacacaccaaacctgctcccaagcagacaccacgtgctcctcctaagccaaaaacatcaccacgcccaagaatcccacaaacacaaccagttcctaaggtgccccagcgtgttactgcaaaaccaaaaacgtcaccaagtccagaagtgtcatacaccacacctgctcctctagagacacgaggcatcccttttatacccatgatttccccaagtcctagtcaagaggaactacagaccactctggaagaaacagaccaatccacccaagaacctttcacaactaagattccacgaacaactgaactagcaaagacaactcaggcgccacacagattttatactactgtgaggcccagaacatctgacaagccacacatcagacctgttctgaataggacaactacaagacctactaggcccaaacccagtgggatgcccagtgggaatggagtgggaacaggggtcaagcaagcacccaggccatcaggtgctgatagaaatgtatcagtggactctacccaccccactaaaaagccagggactcgccgcccacccttgccacccagacctacacacccacgaagaaaacctttaccaccaaataatgtcactggaaagccaggaagtgcaggaatcatttcatcaggcccaataactacaccacccctgaggtcaacacccaggcctactggaactcccttggagagaatagagacagatataaagcaaccaacagttcctgcctctggagaagaactggaaaatataactgactttagctcaagcccaacaagagaaactgatcctcttgggaagccaagattcaaaggacctcatgtgcgatacatccaaaagcctgacaacagtccctgctccattactgactctgtcaaacggttccccaaagaggaggccacagaggggaatgccaccagcccaccacagaacccacccaccaacctcactgtggtcaccgtggaagggtgcccctcatttgtcatcttggactgggaaaagccactaaatgacactgtcactgaatatgaagttatatccagagaaaatgggtcattcagtgggaagaacaagtccattcaaatgacaaatcagacattttccacagtagaaaatctgaaaccaaacacgagttatgaattccaggtgaaacccaaaaacccgcttggtgaaggcccggtcagcaacacagtggcattcagtactgaatcagcggacccaagagtgagtgagccagtttctgcaggaagagatgccatctggactgaaagaccctttaattcagactcttactcagagtgtaagggcaaacaatatgtcaaaaggacatggtataaaaaatttgtaggagtgcagctgtgcaactctctcagatacaagatttacttgagcgactccctcacaggaaaattttataacataggtgatcagaggggccatggagaagatcactgccagtttgtggattcatttttagatggacgcactgggcagcaactcacttctgaccagttaccaatcaaagaaggttatttcagagcagttcgccaggaacctgtccaatttggagaaataggtggtcacacccaaatcaattatgttcagtggtatgaatgtgggactacaattcctggaaaatggtagatgctgcacaaagttaccttctgtttcatcattgcaaacaaaaatcattgaaaatactatgccgcattcatttaaagctattttgtttactatgtataaaagtctacaatctaattaatagcaatactagatgtttattattagaaaagattgctgagagtatttatcaggttttacaaagtcattttaagaaagcaagatactgatgttaacagaataacatttttggggaagctggctccctattcatggtattttaagagatcatttgtatattatttatcacactgttgtaatgatgttttgagatacttttataacaaaattaacatcaaaaaggtatatactttttaaaaaaaatttacttttattgatgtgtactcttcctattgatgagttaattccataaatctctacttagtttaacttattggatcaaattatcttcagcatgtatatctggggaaaaaaggtccgaattttcacatttatatttaaacttcaattttttatatttaaacttcaattttttagcaacagctgaatagctttgcggaggagtttaatagttacacattcatgctaatatacatttcctttaaacatccacaaattcttaaaaagattgaatcagtaaatttcatttcagctaaaaatggagtctaatatattgtttcaaaagatacatttttacccaccataaatgttacaatatctgaatatgctttgtcaaactatccctttatgcaatcgtcttcatattgtttttatgattctaatcaagctgtatgtagagactgaatgtgaagtcaagtctgagcacaaaaagataatgcacgatgagattgcctaccattttataggatatttactatgtatttatacgttaagacctctatgaatgaatgtatcagagaatgtctttgtaactgtttaattcaatctgtaataaaaatctaactaactaactcatttatttctattaaaaaggtattgtcctttaggcggggaatgggaatccttgctgcactgttgcagtcattctgaaaggacctttccctgtacttacctttcaacatgcttcaatcttatcaacgctacattttgtatttttcaaacaagtataaattctgcaataaagagatgtagttttttttt

SEQ ID NO: 4574 - protein, 486 aa, Homo sapiens
MISPSPSQEELQTTLEETDQSTQEPFTTKIPRTTELAKTTQAPHRFYTTVRPRTSDKPHIRPVLNRTTTRPTRPKPSGMPSGNGVGTGVKQAPRPSGADRNVSVDSTHPTKKPGTRRPPLPPRPTHPRRKPLPPNNVTGKPGSAGIISSGPITTPPLRSTPRPTGTPLERIETDIKQPTVPASGEELENITDFSSSPTRETDPLGKPRFKGPHVRYIQKPDNSPCSITDSVKRFPKEEATEGNATSPPQNPPTNLTVVTVEGCPSFVILDWEKPLNDTVTEYEVISRENGSFSGKNKSIQMTNQTFSTVENLKPNTSYEFQVKPKNPLGEGPVSNTVAFSTESADPRVSEPVSAGRDAIWTERPFNSDSYSECKGKQYVKRTWYKKFVGVQLCNSLRYKIYLSDSLTGKFYNIGDQRGHGEDHCQFVDSFLDGRTGQQLTSDQLPIKEGYFRAVRQEPVQFGEIGGHTQINYVQWYECGTTIPGKW

SEQ ID NO: 4575 - DNA, 4469 bp, Homo sapiens
gcagccgcccgcctctgtcactgggagacagtccacttaaatgcagctccagggttgcgaggcacccaccagcatcattccccatgcgaggtggcaaatgcaacatgctctccagtttggggtgtctacttctctgtggaagtattacactagccctgggaaatgcacagaaattgccaaaaggtaaaaggccaaacctcaaagtccacatcaataccacaagtgactccatcctcttgaagttcttgcgtccaagtccaaatgtaaagcttgaaggtcttctcctgggatatggcagcaatgtatcaccaaaccagtacttccctcttcccgctgaagggaaattcacagaagctatagttgatgcagagccgaaatatctgatagttgtgcgacctgctccacctccaagtcaaaagaagtcatgttcaggtaaaactcgttctcgcaaacctctgcagctggtggttggcactctgacaccgagctcggtcttcctgtcctggggtttcctcatcaacccacaccatgactggacattgccaagtcactgtcccaatgacagattttatacaattcgctatcgagaaaaggataaagaaaagaagtggatttttcaaatctgtccagccactgaaacaattgtggaaaacctaaagcccaacacagtttatgaatttggagtgaaagacaatgtggaaggtggaatttggagtaagattttcaatcacaagactgttgttggaagtaaaaaagtaaatgggaaaatccaaagtacctatgaccaagaccacacagtgccagcatatgtcccaaggaaactaatcccaataacaatcatcaagcaagtgattcagaatgttactcacaaggattcagctaaatccccagaaaaagctccactgggaggagtgatactagtccaccttattattccaggtcttaatgaaactactgtaaaacttcctgcatccctaatgtttgagatttcagatgcactcaagacacaattagctaagaatgaaaccttggcattacctgccgaatctaaaacaccagaggttgaaaaaatctcagcacgacccacaacagtgactcctgaaacagttccaagaagcactaaacccactacgtctagtgcattagatgtttcagaaacaacactggcttcaagtgaaaagccatggattgtgcctacagctaaaatatctgaagattccaaagttctgcagcctcaaactgcaacttatgatgttttctcaagccctacaacatcagatgagcctgagatatcagattcctacacagcaacaagtgatcgtattctggattctatcccacctaaaacttctagaactcttgaacagccaagggcaacactggctccaagtgaaacaccatttgttcctcaaaaactggaaatctttaccagtccagaaatgcagcctacgacacctgctccccagcaaactacatctatcccttctacacctaaacgacgcccccggcccaaaccgccaagaaccaaacctgaaagaaccacaagtgccggaacaattacacctaaaatttctaaaagccctgaacctacatggacaacaccggctcccggtaaaacacaatttatttctctgaaacctaaaatccctctcagcccagaagtgacacacaccaaacctgctcccaagcagacaccacgtgctcctcctaagccaaaaacatcaccacgcccaagaatcccacaaacacaaccagttcctaaggtgccccagcgtgttactgcaaaaccaaaaacgtcaccaagtccagaagtgtcatacaccacacctgctccaaaagatgtgctccttcctcataaaccataccctgaggtctctcagagcgaacctgctcctctagagacacgaggcatcccttttatacccatgatttccccaagtcctagtcaagaggaactacagaccactctggaagaaacagaccaatccacccaagaacctttcacaactaagattccacgaacaactgaactagcaaagacaactcaggcgccacacagattttatactactgtgaggcccagaacatctgacaagccacacatcagacctggggtcaagcaagcacccaggccatcaggtgctgatagaaatgtatcagtggactctacccaccccactaaaaagccagggactcgccgcccacccttgccacccagacctacacacccacgaagaaaacctttaccaccaaataatgtcactggaaagccaggaagtgcaggaatcatttcatcaggcccaataactacaccacccctgaggtcaacacccaggcctactggaactcccttggagagaatagagacagatataaagcaaccaacagttcctgcctctggagaagaactggaaaatataactgactttagctcaagcccaacaagagaaactgatcctcttgggaagccaagattcaaaggacctcatgtgcgatacatccaaaagcctgacaacagtccctgctccattactgactctgtcaaacggttccccaaagaggaggccacagaggggaatgccaccagcccaccacagaacccacccaccaacctcactgtggtcaccgtggaagggtgcccctcatttgtcatcttggactgggaaaagccactaaatgacactgtcactgaatatgaagttatatccagagaaaatgggtcattcagtgggaagaacaagtccattcaaatgacaaatcagacattttccacagtagaaaatctgaaaccaaacacgagttatgaattccaggtgaaacccaaaaacccgcttggtgaaggcccggtcagcaacacagtggcattcagtactgaatcagcggacccaagagtgagtgagccagtttctgcaggaagagatgccatctggactgaaagaccctttaattcagactcttactcagagtgtaagggcaaacaatatgtcaaaaggacatggtataaaaaatttgtaggagtgcagctgtgcaactctctcagatacaagatttacttgagcgactccctcacaggaaaattttataacataggtgatcagaggggccatggagaagatcactgccagtttgtggattcatttttagatggacgcactgggcagcaactcacttctgaccagttaccaatcaaagaaggttatttcagagcagttcgccaggaacctgtccaatttggagaaataggtggtcacacccaaatcaattatgttcagtggtatgaatgtgggactacaattcctggaaaatggtagatgctgcacaaagttaccttctgtttcatcattgcaaacaaaaatcattgaaaatactatgccgcattcatttaaagctattttgtttactatgtataaaagtctacaatctaattaatagcaatactagatgtttattattagaaaagattgctgagagtatttatcaggttttacaaagtcattttaagaaagcaagatactgatgttaacagaataacatttttggggaagctggctccctattcatggtattttaagagatcatttgtatattatttatcacactgttgtaatgatgttttgagatacttttataacaaaattaacatcaaaaaggtatatactttttaaaaaaaatttacttttattgatgtgtactcttcctattgatgagttaattccataaatctctacttagtttaacttattggatcaaattatcttcagcatgtatatctggggaaaaaaggtccgaattttcacatttatatttaaacttcaattttttatatttaaacttcaattttttagcaacagctgaatagctttgcggaggagtttaatagttacacattcatgctaatatacatttcctttaaacatccacaaattcttaaaaagattgaatcagtaaatttcatttcagctaaaaatggagtctaatatattgtttcaaaagatacatttttacccaccataaatgttacaatatctgaatatgctttgtcaaactatccctttatgcaatcgtcttcatattgtttttatgattctaatcaagctgtatgtagagactgaatgtgaagtcaagtctgagcacaaaaagataatgcacgatgagattgcctaccattttataggatatttactatgtatttatacgttaagacctctatgaatgaatgtatcagagaatgtctttgtaactgtttaattcaatctgtaataaaaatctaactaactaactcatttatttctattaaaaaggtattgtcctttaggcggggaatgggaatccttgctgcactgttgcagtcattctgaaaggacctttccctgtacttacctttcaacatgcttcaatcttatcaacgctacattttgtatttttcaaacaagtataaattctgcaataaagagatgtagttttttttt

SEQ ID NO: 4576 - protein, 1075 aa, Homo sapiens; identical to SEQ ID NO: 446

SEQ ID NO: 4577 - DNA, 3749 bp, Homo sapiens
gcagccgcccgcctctgtcactgggagacagtccacttaaatgcagctccagggttgcgaggcacccaccagcatcattccccatgcgaggtggcaaatgcaacatgctctccagtttggggtgtctacttctctgtggaagtattacactagccctgggaaatgcacagaaattgccaaaaggtaaaaggccaaacctcaaagtccacatcaataccacaagtgactccatcctcttgaagttcttgcgtccaagtccaaatgtaaagcttgaaggtcttctcctgggatatggcagcaatgtatcaccaaaccagtacttccctcttcccgctgaagggaaattcacagaagctatagttgatgcagagccgaaatatctgatagttgtgcgacctgctccacctccaagtcaaaagaagtcatgttcaggtaaaactcgttctcgcaaacctctgcagctggtggttggcactctgacaccgagctcggtcttcctgtcctggggtttcctcatcaacccacaccatgactggacattgccaagtcactgtcccaatgacagattttatacaattcgctatcgagaaaaggataaagaaaagaagtggatttttcaaatctgtccagccactgaaacaattgtggaaaacctaaagcccaacacagtttatgaatttggagtgaaagacaatgtggaaggtggaatttggagtaagattttcaatcacaagactgttgttggaagtaaaaaagtaaatgggaaaatccaaagtacctatgaccaagaccacacagtgccagcatatgtcccaaggaaactaatcccaataacaatcatcaagcaagtgattcagaatgttactcacaaggattcagctaaatccccagaaaaagctccactgggaggagtgatactagtccaccttattattccaggtcttaatgaaactactgtaaaacttcctgcatccctaatgtttgagatttcagatgcactcaagacacaattagctaagaatgaaaccttggcattacctgccgaatctaaaacaccagaggttgaaaaaatctcagcacgacccacaacagtgactcctgaaacagttccaagaagcactaaacccactacgtctagtgcattagatgtttcagaaacaacactggttctcagcaaaaggaccccggaaacattgcaaactattctaatacctcagtttgaattgccactgagcactctagctccaaaaagccttccagaatttcctgaggcaaaaacacccttcccttttgagaaacctaggggcacattggcttcaagtgaaaagccatggattgtgcctacagctaaaatatctgaagattccaaagttctgcagcctcaaactgcaacttatgatgttttctcaagccctacaacatcagatgagcctgagatatcagattcctacacagcaacaagtgatcgtattctggattctatcccacctaaaacttctagaactcttgaacagccaagggcaacactggctccaagtgaaacaccatttgttcctcaaaaactggaaatctttaccagtccagaaatgcagcctacgacacctgctccccagcaaactacatctatcccttctacacctaaacgacgcccccggcccaaaccgccaagaaccaaacctgaaagaaccacaagtgccggaacaattacacctaaaatttctaaaagccctgaacctacatggacaacaccggctcccggtaaaacacaatttatttctctgaaacctaaaatccctctcagcccagaagtgacacacaccaaacctgccccagaacctcagactctactgccatcacagtcaacaataggacctgaaacaccaggaaccaaaccttcaacaacattagcaccacgaaagaccaaaagaccaggtcgtcgcccccgcccccgtccccgccctaaaaccacacctagtccagaagtgcccaagtccaaacccgctctggaacctgccacgatacaaccggagcccttggtgcccacaactgcctcaaaaccatctgagagacctaaaaccacacacagaccagatgcacctcaaattcagcctggttcaaaaccaccaaaacaattacttcctaaaccccaaaccacagcagaaccagacatgccaccaactaaatccgtctctgagcctgttccatttgaaactgaagctccctcaatgaccatagttcccaccacagacattgagcctgtaactgtgagaactgaggctacagtgacaacattagctccaaaaacatcgcaacgaacaagaacacgtcgtccacgtcccaaacataaaaccacgccacgcccagagacactgcagaccaaactagactttggacctattactcctgggacatcttcagctccaacaacaacaacaaaaagaacccgtcgtccacatcccaaacctaaaaccacgccccatccagaagtacctcaaactaaactggctaccaaaacatcaaaaagaacccgccctccacgtcccagacctaaaactacaccgagccctcaggcacctgagaccaaacctgttcctgctacagtcctagaacctgtcactcttagacctgaggcctcaacaacattagcttccaaaacatcacaacggacacgtcgtccacgtctcagaacaaaaaccacaccacgtcctgaagcacctgaatccaaaccagttcctactgcggagctcaaacctgttacactcagaactgagacttgggtgacaacacaagctcctaaaacatcacaacgaactcgtcgtccacgtcccaaaactaaaaccacaccaagtcctgaggttcctcaaaccaaactggttccttctacagatcttgaacctggtactctcagaactgaagctccaaaaaccatggttgttactacagtccttgaacctgacacttttagaaccaagtttccagaaacaacgttagctcctaaaacacaacggacacgtcgtccccgtcccagacccaaaactacatcaagtcctgaagtacctcagaacaaatcgggtaaatgtatgaatccttggcttaagtagccaaggaacctgaaccctggcaggctgtcccaataaagtcctaaagaaatgcctatgacgggaagtaacagtcatcatgttttctaagaatcaaattatttaacatgggtagcaactgcttctcgtacagagctatccaggagaacatggcttggagccacttgtgtgcctgatctcctaaatgacttggtttggatgacgttcttggtccctctttaaagatgtgtttacagcgagattagcatactcatgggtatttattgctatatctgcattgaaacatgtgatccatttgttatgattacataaacaggcatttattttcaacttccaagaaaagcaacaagttactttcatatatatttctctctgtattttcgtatctgttgcctaaacaaatttccaaagccaaatatccatactagttagaaaaccaaatacctaggaaaacctcatgtggataatatcaagatatgtaacagagttcaaaggttgtaactaccttctttgatgaattgttctagctagtgtggccaaatcttccaaaagcaactatatgctgcctatcaattcaaaagttttaaaaaattgtgtatcatttgaaactcatgttttaaaataaaaattgaggattttttttaaaaagtc

SEQ ID NO: 4578 - protein, 1005 aa, Homo sapiens
MRGGKCNMLSSLGCLLLCGSITLALGNAQKLPKGKRPNLKVHINTTSDSILLKFLRPSPNVKLEGLLLGYGSNVSPNQYFPLPAEGKFTEAIVDAEPKYLIVVRPAPPPSQKKSCSGKTRSRKPLQLVVGTLTPSSVFLSWGFLINPHHDWTLPSHCPNDRFYTIRYREKDKEKKWIFQICPATETIVENLKPNTVYEFGVKDNVEGGIWSKIFNHKTVVGSKKVNGKIQSTYDQDHTVPAYVPRKLIPITIIKQVIQNVTHKDSAKSPEKAPLGGVILVHLIIPGLNETTVKLPASLMFEISDALKTQLAKNETLALPAESKTPEVEKISARPTTVTPETVPRSTKPTTSSALDVSETTLVLSKRTPETLQTILIPQFELPLSTLAPKSLPEFPEAKTPFPFEKPRGTLASSEKPWIVPTAKISEDSKVLQPQTATYDVFSSPTTSDEPEISDSYTATSDRILDSIPPKTSRTLEQPRATLAPSETPFVPQKLEIFTSPEMQPTTPAPQQTTSIPSTPKRRPRPKPPRTKPERTTSAGTITPKISKSPEPTWTTPAPGKTQFISLKPKIPLSPEVTHTKPAPEPQTLLPSQSTIGPETPGTKPSTTLAPRKTKRPGRRPRPRPRPKTTPSPEVPKSKPALEPATIQPEPLVPTTASKPSERPKTTHRPDAPQIQPGSKPPKQLLPKPQTTAEPDMPPTKSVSEPVPFETEAPSMTIVPTTDIEPVTVRTEATVTTLAPKTSQRTRTRRPRPKHKTTPRPETLQTKLDFGPITPGTSSAPTTTTKRTRRPHPKPKTTPHPEVPQTKLATKTSKRTRPPRPRPKTTPSPQAPETKPVPATVLEPVTLRPEASTTLASKTSQRTRRPRLRTKTTPRPEAPESKPVPTAELKPVTLRTETWVTTQAPKTSQRTRRPRPKTKTTPSPEVPQTKLVPSTDLEPGTLRTEAPKTMVVTTVLEPDTFRTKFPETTLAPKTQRTRRPRPRPKTTSSPEVPQNKSGKCMNPWLK

SEQ ID NO: 4579 - DNA, 247 bp, Homo sapiens
gagaaacctaggggcacattggcttcaagtgaaaagccatggattgtgcctacagctaaaatatctgaagattccaaagttctgcagcctcaaactgcaacaagtgatcgtattctggattctatcccacctaaaacttctagaactcttgaacagccaagggcaacactggctccaagtgaaacaccatttgttcctcaaaaactggaaatctttaccagtccagaaatgcagcctacgacacctg

SEQ ID NO: 4580 - protein, 81 aa, Homo sapiens
RNLGAHWLQVKSHGLCLQLKYLKIPKFCSLKLQQVIVFWILSHLKLLELLNSQGQHWLQVKHHLFLKNWKSLPVQKCSLRH

SEQ ID NO: 4581 - DNA, 3568 bp, Homo sapiens
gcagccgcccgcctctgtcactgggagacagtccacttaaatgcagctccagggttgcgaggcacccaccagcatcattccccatgcgaggtggcaaatgcaacatgctctccagtttggggtgtctacttctctgtggaagtattacactagccctgggaaatgcacagaaattgccaaaaggtaaaaggccaaacctcaaagtccacatcaataccacaagtgactccatcctcttgaagttcttgcgtccaagtccaaatgtaaagcttgaaggtcttctcctgggatatggcagcaatgtatcaccaaaccagtacttccctcttcccgctgaagggaaattcacagaagctatagttgatgcagagccgaaatatctgatagttgtgcgacctgctccacctccaagtcaaaagaagtcatgttcaggtaaaactcgttctcgcaaacctctgcagctggtggttggcactctgacaccgagctcggtcttcctgtcctggggtttcctcatcaacccacaccatgactggacattgccaagtcactgtcccaatgacagattttatacaattcgctatcgagaaaaggataaagaaaagaagtggatttttcaaatctgtccagccactgaaacaattgtggaaaacctaaagcccaacacagtttatgaatttggagtgaaagacaatgtggaaggtggaatttggagtaagattttcaatcacaagactgttgttggaagtaaaaaagtaaatgggaaaatccaaagtacctatgaccaagaccacacagtgccagcatatgtcccaaggaaactaatcccaataacaatcatcaagcaagtgattcagaatgttactcacaaggattcagctaaatccccagaaaaagctccactgggaggagtgatactagtccaccttattattccaggtcttaatgaaactactgtaaaacttcctgcatccctaatgtttgagatttcagatgcactcaagacacaattagctaagaatgaaaccttggcattacctgccgaatctaaaacaccagaggttgaaaaaatctcagcacgacccacaacagtgactcctgaaacagttccaagaagcactaaacccactacgtctagtgcattagatgtttcagaaacaacactgggtaattctaagaactttttttttttctaaaaaaacaaaagtaacaacgaaataactcccaggactcacagaaaagaaacctggtgccttaacttctctctccctccccactttctccttttccttccttcctggcagtggttaaccttcctctttcttggacagattccactgaagagttaaccacatggctgatcctggtgactgaacttctgggcaaatctggatgctaattgctaactaaatgccctttttaaccagtctctgggttatacagacagaataccagccttttaactcccaaatcttgggggagaatgaaggaaacctggaagtcttgactctgtgctttctgcttagagtggctttgggaagtcttgtgcatactaaatttgggaagaatccccaaaagtgtcatgcttttaaacaagaatttcatggcacccatgtttgttgtttcttagcccaagagaatctaacttgctttgttgttctctttcccctgaagaaaaggagcagcatgtgttttgttctgtaatttgatgttgatcttctcagccacaccactgccctttgaatgtacaccttcatattttaacagctatgtaacttttccagggaaggttatttccattaaaggtattggctgctctgtgtgcaagagtctgttacaaagcttgctgtgcatgatcatggttaagccacaacatcaaaacccaagtccaggagttgctaactgcactcttttttattgtagttctcagcaaaaggaccccggaaacattgcaaactattctaatacctcagtttgaattgccactgagcactctaggtaaaaaataataaatactgcagctttattattaccttggatattgtatgcatgcttcaaagaagtcttttgaattaattacgctaatttatacccaatcccttaaaggtgacacagtcttcaagtttaggatcccaaagaggctctccctatgacaaattgtttggttgggttgtttttcttttaagtggtcatattttaatattatgtttgattcttttaattcagaatcaatatgtcactgaacaaattgatcatttctgtattttttgtaaatgtgtttactctattgtctctcttaacagagaagatatatttatgatatttctgcagactgcttcttataattcttagaattcttctgagtgaagtatgagaaaaatgagggcagggtgcagcggctcatgcctgtaagcccaacactttgggaggctgaggcaggtggattgcctgaggtcagtagttcaagaccaccctggccaacctggtgaaaccccgtctctattaaaaatacaaaaattagactggcatggtggcatgcgcctgtaatcccagctacccaggaggctgagacaggagaatcgcttgaacccaggaggtggaggttgcagtgagccaagatcgtgccacgcactgcaacctgggtgacagagcgagactccatctcaaaaaaaaaaaagaggttgggggaggagcttacatataaagccacgtagttaccaaaactctatttttaaaagctttcagatggacattttctagttcagatgtgtttgcttggtttaaatttaaatgaaatatatttaagaacacacataaacatagctgaagaaatcagcaaactggtttaataagggtggaaagaagagtccaaatacagtagcttaaatttagtcacttaactataaaaaactgaaaaagaaactttcttatattcaacattgaaacatagatgtaagaaatactactaatggtctcttaacatgatttgcctttttgtgtttgcttttgtttttgcaagcttaaaattttaaaaatctttcctgttactttcacctcaggtcgtaactttctttatgtgtttcattacagctccaaaaagccttccagaatttcctgaggcaaaaacacccttcccttttgagaaacctaggggcacattgggtaataagagtaccttaaatttaatattaaggctgtgggtggtgattgcttaattctgcaggacacatttactgcatcttatttctggaaacctcatgaactgatagttaggcaaacaaatggttgatttgatttttttttaataaatctatttggattttctgcaaattcggtaaaacccatcagtcttaattccacataatccacttagctttttgtccttaaaaatgctgacagtctgacaccaaactctggtctctctctgaccactaatcaaatgttctctggatggatacatactgatttcttactgatatataatgactttttattgtattggtatactgcaggcttctggtagccacttaaccataccagcaacctatttctgtctcgttctcctgtt

SEQ ID NO: 4582 - protein, 370 aa, Homo sapiens
MRGGKCNMLSSLGCLLLCGSITLALGNAQKLPKGKRPNLKVHINTTSDSILLKFLRPSPNVKLEGLLLGYGSNVSPNQYFPLPAEGKFTEAIVDAEPKYLIVVRPAPPPSQKKSCSGKTRSRKPLQLVVGTLTPSSVFLSWGFLINPHHDWTLPSHCPNDRFYTIRYREKDKEKKWIFQICPATETIVENLKPNTVYEFGVKDNVEGGIWSKIFNHKTVVGSKKVNGKIQSTYDQDHTVPAYVPRKLIPITIIKQVIQNVTHKDSAKSPEKAPLGGVILVHLIIPGLNETTVKLPASLMFEISDALKTQLAKNETLALPAESKTPEVEKISARPTTVTPETVPRSTKPTTSSALDVSETTLGNSKNFFFF

SEQ ID NO: 4583 - DNA, 338 bp, Homo sapiens
gtgagaagcagcccctcattggcccgctatagagaaatcataaagctcaactggcaagagattgggcagggaaaatgtcttctaattagaattctaccatacaacaagaagtaatagtattaacaatactttacacgtggaatcttttgcatctatctacaaatctgcaaggaagacataaagtattatttgagatgtcaggattgatggctgtgaattcatgattatgtccctaggagactacatgctacatctctgtaccacacccccatgatgagcatagagtcctacaccaaagaacttcaccacgttatgtgtgcaataaattttaaagcgct

SEQ ID NO: 4584 - protein, 37 aa, Homo sapiens
VRSSPSLARYREIIKLNWQEIGQGKCLLIRILPYNKK

SEQ ID NO: 4585 - DNA, 418 bp, Homo sapiens
caggacaaaatagattcatcttcaacattccctgcatattatcagagctgatataaacgggaagagggaagtactggtttggtgatacattgctgccatatcccaggagaagaccttcaagctttacatttggacttggacgcaagaacttcaagaggatggagtcacttgtggtattgatgtggactttgaggtttggccttttacctaacaatgggaatgaaaacatcgatggctgttacttcccctttttagcatcctacccaacttcccagcaagtgttggtggctagaggcattgttcttgaaaaacatgttgtctactttgctactcagtattacagcacacacccaaacgcccaaaatgaagctaaataacatagagcagcctagaataaaaagtatatcttactgttcaa

SEQ ID NO: 4586 - protein, 72 aa, Homo sapiens [sequence omitted]

SEQ ID NO: 4587 - DNA, 2507 bp, Homo sapiens
aggctctgtggtaggtgaacctcggcggccggcgtgggctgagggagccgccactgagggtgcgggcgccgcggccggctctgccagccgttctctggagcagcgaggcggttggttgtgcgagcgagtgccgaggactttggctggaaacttttcgccgcgcccggggcgaggccctggaagggccaggccagcgaatgctgagccggcggcccgctgccctcccccgcggccgcgcgggtcgccgtgcggatggccgagggttggcgatggtgcttcgtgcgccgaactccgggtttgctccggggaccgttacttcctcgctcattctctgggaaccctcgtgccttagctggaccaattattgtggagccacatgtcacagcagtatggggaaagaatgtttcattaaagtgtttaattgaagtaaatgaaaccataacacagatttcatgggagaagatacatggcaaaagttcacagactgttgcagttcaccatccccaatatggattctctgttcaaggagaatatcagggaagagtcttgtttaaaaattactcacttaatgatgcaacaattactctgcataacataggattctctgattctggaaaatacatctgcaaagctgttacattcccgcttggaaatgcccagtcctctacaactgtaactgtgttagttgaacccactgtgagcctgataaaagggccagattctttaattgatggaggaaatgaaacagtagcagccatttgcatcgcagccactggaaaacccgttgcacatattgactgggaaggtgatcttggtgaaatggaatccactacaacttcttttccaaatgaaacggcaacgattatcagccagtacaagctatttccaaccagatttgctagaggaaggcgaattacttgtgttgtaaaacatccagccttggaaaaggacatccgatactctttcatattagacatacagtatgctcctgaagtttcggtaacaggatatgatggaaattggtttgtaggaagaaaaggtgttaatctcaaatgtaatgctgatgcaaatccaccacccttcaaatctgtgtggagcaggttggatggacaatggcctgatggtttattggcttcagacaatactcttcattttgtccatccattgactttcaattattctggtgtttatatctgtaaagtgaccaattcccttggtcaaagaagtgaccaaaaagtcatctacatttcagatgttccatttaagcagacctcttccatagctgtagctggagcggtaattggagctgttcttgcccttttcatcattgctatctttgtgactgtgctgctgactcctcgaaaaaaaagaccatcctatcttgacaaagtgattgaccttccacccacacataaaccacctcctctgtatgaagaacgatccccacctttgcctcagaaagacctatttcagcctgaacacttgcctttgcagactcagttcaaagaaagagaagttggcaatcttcagcactctaatggactaaatagcaggagttttgactatgaagatgagaatccagttggggaagatggcattcagcagatgtaccccctttacaatcaaatgtgctaccaagaccggagccctggcaaacatcatcaaaataacgaccctaagagagtctacatcgacccacgagaacattatgtgtgatttttctctttttccaatgggcgttctaacaaatgtttattcttagattggggagagaagctaaggccaatagttattttactgtctctcatataagaacagtcccactctaagggtattggaagtcttaatgaatgacgtaaagccaatagcaaatttcttttcttcattaagcgtttcttaaccaccagctgtgtttgtgaacttgactatagctttgtgtgtttctgtgatgatggtatttaactgctaacatttggcctacaatggcattttcatttaacagtacagcatctgcctgtgataactgcagtgattctccagaaagaaaggccccagctgatactattaacctcgttgggtctcaggcatgctagcctgttcatctgtaattcacacaggcataaaaatgagttcagaatctatttcactaattatttagctgggatttggatttccctgacatgcttaatacaattacaatacctgtgtacaaacagaggcctgaggaaagaggcaaaatttgcttttcatccaaacagcaacaaaaggcagttgaaaccttcaagcctgttggttgcttttaaacctttgtgttattatgatatatattctttgttgagcactgaggtcctgagggatacatatctcttgctgttttctgcctacttttgactagctgtatgtaacaaaggctctacttttgctctgtcactgttcctacagtcctgttctttactagctagattagcctattttgcacctattaaattctaaaaaccttgtttaaa

SEQ ID NO: 4588 - protein, 487 aa, Homo sapiens
MAEGWRWCFVRRTPGLLRGPLLPRSFSGNPRALAGPIIVEPHVTAVWGKNVSLKCLIEVNETITQISWEKIHGKSSQTVAVHHPQYGFSVQGEYQGRVLFKNYSLNDATITLHNIGFSDSGKYICKAVTFPLGNAQSSTTVTVLVEPTVSLIKGPDSLIDGGNETVAAICIAATGKPVAHIDWEGDLGEMESTTTSFPNETATIISQYKLFPTRFARGRRITCVVKHPALEKDIRYSFILDIQYAPEVSVTGYDGNWFVGRKGVNLKCNADANPPPFKSVWSRLDGQWPDGLLASDNTLHFVHPLTFNYSGVYICKVTNSLGQRSDQKVIYISDVPFKQTSSIAVAGAVIGAVLALFIIAIFVTVLLTPRKKRPSYLDKVIDLPPTHKPPPLYEERSPPLPQKDLFQPEHLPLQTQFKEREVGNLQHSNGLNSRSFDYEDENPVGEDGIQQMYPLYNQMCYQDRSPGKHHQNNDPKRVYIDPREHYV

SEQ ID NO: 4589 - DNA, 734 bp, Homo sapiens
cctcactcaccaagggccgcgccggggttctgcactgtcactgcgctgcggttccccgccttagggattctcacacggttccacggctccaggcccggcggcaccgcagccatcatgcgaggcggggggacttacgaaaggcggagctacgcgagagcacgtccagcgaccggagtctggaacagttcctcgttctttctctggctctggatctgcgtccctgacagtcttaaagaggacagacctttcattcatgaggatgaccctcaacttggcccagtccatgtttcctcagactcaagccttgcattcctggcagaaagactgaagaaatgatgctgtgctcttctcagtgcttcgcgtcaggaggctctactctctcaaccggccccactattgggcatcttgagacaatgttctgcctacacaaaattctaaactgagaggagtggctcagaagctctactaacatggaatcacatgtgggttgcaggaggctggagactatcccagcagcacatggcacaaagcaagaaccagccccggacaggacgccattccatcacaggtgcactcacacccaccagcactcactcagactgggcccatttagacacaccgattcatccaacatgcatatctctggggtgtggaaggaaactggattacctggtgaaaacccacacagacatggggagaacatgccagctctacacaaacagtggcctggtggg

SEQ ID NO: 4590 - protein, 87 aa, Homo sapiens
MESHVGCRRLETIPAAHGTKQEPAPDRTPFHHRCTHTHQHSLRLGPFRHTDSSNMHISGVWKETGLPGENPHRHGENMPALHKQWPG

SEQ ID NO: 4591 - DNA, 235 bp, Homo sapiens
ccgctgtaaccctaaagaaaactctgctccttaagggacttctggaatccatctgcaaggaatgccagctggtggctcttaaatacccagaaacctaacaaagagtactggacaatgtggaaacttaagaagtgggacaacataggcactaccagctatcggggtgtaagagaggggagttatgggtgaattgcattcagtgaaggcttcacagaggaagagaaggtgaacctga

SEQ ID NO: 4592 - protein, 31 aa, Homo sapiens
AVTLKKTLLLKGLLESICKECQLVALKYPET

SEQ ID NO: 4593 - DNA, 2497 bp, Homo sapiens
agctcaatgccaggtgattcttttgtacattaaatttttagaaacagtaccaagatagaattttgcaagacagcagaggactcccggatcacacatgtgttagaatatctggattaaatgaatcagacaccccttttcctggatgatatttatacacctgaattgtgtgttaaggagcctgtgttgcttgcgtagatgctgaagagtggccgagcctgggaagtgatgaagcagaggacagaagagccccagtcagggatgcagtggagagctgtgcattaagctggcagttgggaagaagagctgacataaatagttcatggagagtcctggtgggagaaggtgatatctgtcttactgcagaactagggtaatatgaagaaaaccaacatggaaaaccgtgtctccctccttgtgttgttttggaggcagtccaggaaaggaggacggatctactttctaacttgtggagagatcatgggcaagtcaccctggtctaagtttcttcaaggtaaacattacgtgtgccttctctgatctaccggcttcaaccatggaatggtcatccctgtctagagactcataaacaaccatggatggagctggcatggcacttggaggctggaggtggtgagaggttgttgtacagagtattcaatttctccagtgaattcatccagtcagactctcatacattggctctcaacagactcttttattttcccttttccctgcatagtccttccaacctgaaattcccttgctttctctttgtataactaaatcttaagactcaggttcaccttctcttcctctgtgaagccttcactgaatgcaattcacccataactcccctctcttacaccccgatagctggtagtgcctatgttgtcccacttcttaagtttccacattgtccagtactctttgttaggtttctgggtatttaagagccaccagctggcattccttgcagatggattccagaagtccctgaaaaagaaattgtagagtcatattggactcatattgaacacagaaggaataaattgttggggttgggtggaggcggtgactggactcacatgagaatagacaactgatacactctttcttcatgggaagatatttagcacagagagcatccttcttttccttctctgcttctttctcccagagagagggataaggagacctgggcttgaacctgaggagaccagactggcctagactggaagactgggctaagctgtggtgagctgtttgcagtttataaacaagtcctgacatcccagtttgggtgttggcaagcaatgtcttcagcccagagaaagttctcagagatgcaccaaggcctcaggctaaactgcagagtaggcaaaactcttcaccactgttcctcccactccttcagttccccagcaccccagatacctccagccctcacactgccaacttcgggcattccttccttggtgtctaactgggcttgatcttcataaagactatatggtgaagttagcttttcctcttcccaccaggtactgatctcttaaaacgaataagatgtaggtaatcaaattggctttatctttctattaggtattctagactaaaagctccattaaactgatgtaatttagtaagggagatgttggggggctaagggctttgtctatctctatcagctgctctcctctccccacaagctagactttggataaaataccagataacagattttgtgacttggcacatggcttcctttctcccagacttctttgtgcctccctcttgcaaccagctaaagagtcatccttgtgggaacaactgggaattggcacagagactattggaaatcacaggtgatcctggaaccgagtgtctcccgaatgccttattagtacaagcctcttgggactacttggaaccttccaaagggaatttcactctcttaatttcatactcagtgcaggataaccttctataatgttcccaactggcagcagccagccctggatgaagtacttcctgtaaggagaagtttagtcctttccaaggcagcctgttccattgtctgtacttgttgggaatctctttttgtataaaacagaagtttagttacagttttacttttaaggaatgtggaatacatctcttccccatgacagctcttcaaattattaaacaacagtgtggttctcagtacctctctccctccctctctatcccctcacacacacacacacactctctctctctaggttagacatttacatttcctcaatgtttctcatctgacatggctttaagatcttacaacctctgattcccttctttggacattacactttgttaataagaattggtcggctgggctcagtggcttacgcctgtaatcacagcacttcgagaggccgaggtgggtggatcacgaggtcaggagttcaagatcagcctggccaagatggtgaaaccccgtctctactaacaatac

SEQ ID NO: 4594 - protein, 53 aa, Homo sapiens
MKKTNMENRVSLLVLFWRQSRKGGRIYFLTCGEIMGKSPWSKFLQGKHYVCLL

SEQ ID NO: 4595 - DNA, 2169 bp, Homo sapiens
aaaaagcttcttccatatggagggaccgggtgcgctgggcgcggcgtcccctgcgttgtcctcctgctgccgcccccgcggccgccgctttctgccgcggggaccctgagccccggcccgccggtgtcagccgccgcgcgcgcgcacagacacacacacagagacacacaaacacacacagaaaagacacacacgcgcacacacggcgcgcacaccctcacgcccgccacagccacaacacgcccgcacgcgccctccctctccggcccgcaacttctcggtcctcggctcctttgttgctccagccgcggccgctcgcccgtgttgtgtgtccccggtgtcaccgagcgtgttgtgtgtccgtgcggcgcggcgctgtgtggctccctcgcgcccaccacgctggcccccgggccccggctcgcccttcccaggcgccggctgcagcagagtttcagaacaagcttcctggaacccatgacccatgaagtcttgtcgacatttataccgtctgagggtagcagctcgaaagtagaagaaagtgttgccagggacggcagtatctctttgtgtgaccctggcggcttatgggacgttggcttcagacctttgtgatacaccatgctgcgtgggacgatgacggcgtggagaggaatgaggcctgaggtcacactggcttgcctcctcctagccacagcaggctgctttgctgacttgaacgaggtccctcaggtcaccgtccagcctgcgtccaccgtccagaagcccggaggcactgtgatcttgggctgcgtggtggaacctccaaggatgaatgtaacctggcgcctgaatggaaaggagctgaatggctcggatgatgctctgggtgtcctcatcacccacgggaccctcgtcatcactgcccttaacaaccacactgtgggacggtaccagtgtgtggcccggatgcctgcgggggctgtggccagcgtgccagccactgtgacactagccagtgagtctgctcctttgcctccctgccatggtgcggtccctcctcatctctcccaccctgaagcccccaccattcatgctgcctcttgttactcttagcataaaatgggccttaactgcagaaatgtcaaatcagaacagtagctgcctagtaatgcccagtgatgggggacccttgtgcccttggaaaacctcactccaagtagaggctgtatctggagtgagtgtctacagagaggggaattggtcagtgcatggcagaacttgacatggcagaactgttccgtgggccccagagcagggccgtgccgtgccttcctacttggtcatcctgtggctgtaggtgcactgtcccaactgctcacacaccttccagtcccctccctccattctcaccacagttacagtcggagcagggagagacaggacaccaagagacatgggcagggccacgtgtagtctggacagagcccacccagcccagacttggcctcctgtctctctgtgaggggcaagcatagtccgaaggcctggattataaatattagaacataatgaaaaggaaactgtgtggcaaagggataaagggatacagagaaaagaaacaaggaagagatgaggtgacagtttggaccaaggaaaatgccaagagaagacttcacactaccttttttttttctggttttgccattcttttattcatgttgttacactcagtataggatagtttattaaaatcattatgtctgtagacattctatttgtgatatagaaattgtgttatttctgacctctattttttcctattatgtgacaaagaacataggtcctcagaccaacatgtggaaaccaagggccaaatggcttctaaggtccctcccaactgaataattctggtaaattccatttccatgtgctcactgacggatggtcctaataaccgctcttatttcttttatgcttgtgaaagtcatagtttttacaaaattacttgagggtgtattataaagattcaacagagcaaagtaaaggccaagtgacttgacatagtcatagctggaagaggagccttaccaagacaggtgtttctagttgccattatacttattctaccttatgaggacccattgtatgaggctagatggaagtgagtaaacagacgtcctacctttg

SEQ ID NO: 4596 - protein, 157 aa, Homo sapiens
MLRGTMTAWRGMRPEVTLACLLLATAGCFADLNEVPQVTVQPASTVQKPGGTVILGCVVEPPRMNVTWRLNGKELNGSDDALGVLITHGTLVITALNNHTVGRYQCVARMPAGAVASVPATVTLASESAPLPPCHGAVPPHLSHPEAPTIHAASCYS

SEQ ID NO: 4597 - DNA, 4280 bp, Homo sapiens
gtttctcatagttggcgtcttctaaaggaaaaacactaaaatgaggaactcagcggaccgggagcgacgcagcttgagggaagcatccctagctgttggcgcagaggggcgaggctgaagccgagtggcccgaggtgtctgaggggctggggcaaaggtgaaagagtttcagaacaagcttcctggaacccatgacccatgaagtcttgtcgacatttataccgtctgagggtagcagctcgaaagtagaagaaagtgttgccagggacggcagtatctctttgtgtgaccctggcggcttatgggacgttggcttcagacctttgtgatacaccatgctgcgtgggacgatgacggcgtggagaggaatgaggcctgaggtcacactggcttgcctcctcctagccacagcaggctgctttgctgacttgaacgaggtccctcaggtcaccgtccagcctgcgtccaccgtccagaagcccggaggcactgtgatcttgggctgcgtggtggaacctccaaggatgaatgtaacctggcgcctgaatggaaaggagctgaatggctcggatgatgctctgggtgtcctcatcacccacgggaccctcgtcatcactgcccttaacaaccacactgtgggacggtaccagtgtgtggcccggatgcctgcgggggctgtggccagcgtgccagccactgtgacactagccaatctccaggacttcaagttagatgtgcagcacgtgattgaagtggatgagggaaacacagcagtcattgcctgccacctgcctgagagccaccccaaagcccaggtccggtacagcgtcaaacaagagtggctggaggcctccagaggtaactacctgatcatgccctcagggaacctccagattgtgaatgccagccaggaggacgagggcatgtacaagtgtgcagcctacaacccagtgacccaggaagtgaaaacctccggctccagcgacaggctacgtgtgcgccgctccaccgctgaggctgcccgcatcatctaccccccagaggcccaaaccatcatcgtcaccaaaggccagagtctcattctggagtgtgtggccagtggaatcccacccccacgggtcacctgggccaaggatgggtccagtgtcaccggctacaacaagacgcgcttcctgctgagcaacctcctcatcgacaccaccagcgaggaggactcaggcacctaccgctgcatggccgacaatggggttgggcagcccggggcagcggtcatcctctacaatgtccaggtgtttgaaccccctgaggtcaccatggagctatcccagctggtcatcccctggggccagagtgccaagcttacctgtgaggtgcgtgggaaccccccgccctccgtgctgtggctgaggaatgctgtgcccctcatctccagccagcgcctccggctctcccgcagggccctgcgcgtgctcagcatggggcctgaggacgaaggcgtctaccagtgcatggccgagaacgaggttgggagcgcccatgccgtagtccagctgcggacctccaggccaagcataaccccaaggctatggcaggatgctgagctggctactggcacacctcctgtatcaccctccaaactcggcaaccctgagcagatgctgagggggcaaccggcgctccccagacccccaacgtcagtggggcctgcttccccgcagtgtccaggagagaaggggcagggggctcccgccgaggctcccatcatcctcagctcgccccgcacctccaagacagactcatatgaactggtgtggcggcctcggcatgagggcagtggccgggcgccaatcctctactatgtggtgaaacaccgcaaggtcacaaattcctctgacgattggaccatctctggcattccagccaaccagcaccgcctgaccctcaccagacttgaccccgggagcttgtatgaagtggagatggcagcttacaactgtgcgggagagggccagacagccatggtcaccttccgaactggacggcggcccaaacccgagatcatggccagcaaagagcagcagatccagagagacgaccctggagccagtccccagagcagcagccagccagaccacggccgcctctcccccccagaagctcccgacaggcccaccatctccacggcctccgagacctcagtgtacgtgacctggattccccgtgggaatggtgggttcccaatccagtccttccgtgtggagtacaagaagctaaagaaagtgggagactggattctggccaccagcgccatccccccatcgcggctgtccgtggagatcacgggcctagagaaaggcacctcctacaagtttcgagtccgggctctgaacatgctgggggagagcgagcccagcgccccctctcggccctacgtggtgtcgggctacagcggtcgcgtgtacgagaggcccgtggcaggtccttatatcaccttcacggatgcggtcaatgagaccaccatcatgctcaagtggatgtacatcccagcaagtaacaacaacaccccaatccatggcttttatatctattatcgacccacagacagtgacaatgatagtgactacaagaaggatatggtggaaggggacaagtactggcactccatcagccacctgcagccagagacctcctacgacattaagatgcagtgcttcaatgaaggaggggagagcgagttcagcaacgtgatgatctgtgagaccaaagctcggaagtcttctggccagcctggtcgactgccacccccaactctggccccaccacagccgccccttcctgaaaccatagagcggccggtgggcactggggccatggtggctcgctccagcgacctgccctatctgattgtcggggtcgtcctgggctccatcgttctcatcatcgtcaccttcatccccttctgcttgtggagggcctggtctaagcaaaaacatacaacagacctgggttttcctcgaagtgcccttccaccctcctgcccgtatactatggtgccattgggaggactcccaggccaccaggccagtggacagccctacctcagtggcatcagtggacgggcctgtgctaatgggatccacatgaataggggctgcccctcggctgcagtgggctacccgggcatgaagccccagcagcactgcccaggcgagcttcagcagcagagtgacaccagcagcctgctgaggcagacccatcttggcaatggatatgacccccaaagtcaccagatcacgaggggtcccaagtctagcccggacgagggctctttcttatacacactgcccgacgactccactcaccagctgctgcagccccatcacgactgctgccaacgccaggagcagcctgctgctgtgggccagtcaggggtgaggagagcccccgacagtcctgtcctggaagcagtgtgggaccctccatttcactcagggcccccatgctgcttgggccttgtgccagttgaagaggtggacagtcctgactcctgccaagtgagtggaggagactggtgtccccagcaccccgtaggggcctacgtaggacaggaacctggaatgcagctctccccggggccactggtgcgtgtgtcttttgaaacaccacctctcacaatttaggcagaagctgatatcccagaaagactatatattgttttttttttaaaaaaaaaaagaagaaaaaagagacagagaaaattggtatttatttttctattatagccatatttatatatttatgcacttgtaaataaatgtatatgttttataattctggagagacataaggagtcctacccgttgaggttggagagggaaaataaagaagctgccacctaacaggagtcacccaggaaagcaccgcacaggctggcgcgggacagactcctaacctggggcctctgcagtggcaggcgaggctgcaggaggcccacagataagctggcaagaggaaggatcccaggcacatggttcatcacgagcatgagggaacagcaaggggcacggtatcacagcctggagacacccacacagatggctggatccggtgctacgggaaacattttcctaagatgcccatgagaacagaccaagatgtgtacagcactatgagcattaaaaaaccttccagaatcaataatccgtggcaacatatctctgtaaaaacaaacactgtaacttctaaataaatgtttagtcttccctgtaaccttcaaactg

SEQ ID NO: 4598 - protein, 1114 aa, Homo sapiens; identical to SEQ ID NO: 448

SEQ ID NO: 4599 - DNA, 4303 bp, Homo sapiens
gtttctcatagttggcgtcttctaaaggaaaaacactaaaatgaggaactcagcggaccgggagcgacgcagcttgagggaagcatccctagctgttggcgcagaggggcgaggctgaagccgagtggcccgaggtgtctgaggggctggggcaaaggtgaaagagtttcagaacaagcttcctggaacccatgacccatgaagtcttgtcgacatttataccgtctgagggtagcagctcgaaagtagaagaaagtgttgccagggacggcagtatctctttgtgtgaccctggcggcttatgggacgttggcttcagacctttgtgatacaccatgctgcgtgggacgatgacggcgtggagaggaatgaggcctgaggtcacactggcttgcctcctcctagccacagcaggctgctttgctgacttgaacgaggtccctcaggtcaccgtccagcctgcgtccaccgtccagaagcccggaggcactgtgatcttgggctgcgtggtggaacctccaaggatgaatgtaacctggcgcctgaatggaaaggagctgaatggctcggatgatgctctgggtgtcctcatcacccacgggaccctcgtcatcactgcccttaacaaccacactgtgggacggtaccagtgtgtggcccggatgcctgcgggggctgtggccagcgtgccagccactgtgacactagccaatctccaggacttcaagttagatgtgcagcacgtgattgaagtggatgagggaaacacagcagtcattgcctgccacctgcctgagagccaccccaaagcccaggtccggtacagcgtcaaacaagagtggctggaggcctccagaggtaactacctgatcatgccctcagggaacctccagattgtgaatgccagccaggaggacgagggcatgtacaagtgtgcagcctacaacccagtgacccaggaagtgaaaacctccggctccagcgacaggctacgtgtgcgccgctccaccgctgaggctgcccgcatcatctaccccccagaggcccaaaccatcatcgtcaccaaaggccagagtctcattctggagtgtgtggccagtggaatcccacccccacgggtcacctgggccaaggatgggtccagtgtcaccggctacaacaagacgcgcttcctgctgagcaacctcctcatcgacaccaccagcgaggaggactcaggcacctaccgctgcatggccgacaatggggttgggcagcccggggcagcggtcatcctctacaatgtccaggtgtttgaaccccctgaggtcaccatggagctatcccagctggtcatcccctggggccagagtgccaagcttacctgtgaggtgcgtgggaaccccccgccctccgtgctgtggctgaggaatgctgtgcccctcatctccagccagcgcctccggctctcccgcagggccctgcgcgtgctcagcatggggcctgaggacgaaggcgtctaccagtgcatggccgagaacgaggttgggagcgcccatgccgtagtccagctgcggacctccaggccaagcataaccccaaggctatggcaggatgctgagctggctactggcacacctcctgtatcaccctccaaactcggcaaccctgagcagatgctgagggggcaaccggcgctccccagacccccaacgtcagtggggcctgcttccccgcagtgtccaggagagaaggggcagggggctcccgccgaggctcccatcatcctcagctcgccccgcacctccaagacagactcatatgaactggtgtggcggcctcggcatgagggcagtggccgggcgccaatcctctactatgtggtgaaacaccgcaaggtcacaaattcctctgacgattggaccatctctggcattccagccaaccagcaccgcctgaccctcaccagacttgaccccgggagcttgtatgaagtggagatggcagcttacaactgtgcgggagagggccagacagccatggtcaccttccgaactggacggcggcccaaacccgagatcatggccagcaaagagcagcagatccagagagacgaccctggagccagtccccagagcagcagccagccagaccacggccgcctctcccccccagaagctcccgacaggcccaccatctccacggcctccgagacctcagtgtacgtgacctggattccccgtgggaatggtgggttcccaatccagtccttccgtgtggagtacaagaagctaaagaaagtgggagactggattctggccaccagcgccatccccccatcgcggctgtccgtggagatcacgggcctagagaaaggcacctcctacaagtttcgagtccgggctctgaacatgctgggggagagcgagcccagcgccccctctcggccctacgtggtgtcgggctacagcggtcgcgtgtacgagaggcccgtggcaggtccttatatcaccttcacggatgcggtcaatgagaccaccatcatgctcaagtggatgtacatcccagcaagtaacaacaacaccccaatccatggcttttatatctattatcgacccacagacagtgacaatgatagtgactacaagaaggatatggtggaaggggacaagtactggcactccatcagccacctgcagccagagacctcctacgacattaagatgcagtgcttcaatgaaggaggggagagcgagttcagcaacgtgatgatctgtgagaccaaagctcggaagtcttctggccagcctggtcgactgccacccccaactctggccccaccacagccgccccttcctgaaaccatagagcggccggtgggcactggggccatggtggctcgctccagcgacctgccctatctgattgtcggggtcgtcctgggctccatcgttctcatcatcgtcaccttcatccccttctgcttgtggagggcctggtctaagcaaaaacatacaacagacctgggttttcctcgaagtgcccttccaccctcctgcccgtatactatggtgccattgggaggactcccaggccaccaggccagtggacagccctacctcagtggcatcagtggacgggcctgtgctaatgggatccacatgaataggggctgcccctcggctgcagtgggctacccgggcatgaagccccagcagcactgcccaggcgagcttcagcagcagagtgacaccagcagcctgctgaggcagacccatcttggcaatggatatgacccccaaagtcaccagatcacgaggggtcccaagtctagcccggacgagggctctttcttatacacactgcccgacgactccactcaccagctgctgcagccccatcacgactgctgccaacgccaggagcagcctgctgctgtgggccagtcaggggtgaggagagcccccgacagtcctgtcctggaagcagtgtgggaccctccatttcactcagggcccccatgctgcttgggccttgtgccagttgaagaggtggacagtcctgactcctgccaagtgagtggaggagactggtgtccccagcaccccgtaggggcctacgtaggacaggaacctggaatgcagctctccccggggccactggtgcgtgtgtcttttgaaacaccacctctcacaatttaggcagaagctgatatcccagaaagactatatattgttttttttttaaaaaaaaaaagaagaaaaaagagacagagaaaattggtatttatttttctattatagccatatttatatatttatgcacttgtaaataaatgtatatgttttataattctggagagacataaggagtcctacccgttgaggttggagagggaaaataaagaagctgccacctaacaggagtcacccaggaaagcaccgcacaggctggcgcgggacagactcctaacctggggcctctgcagtggcaggcgaggctgcaggaggcccacagataagctggcaagaggaaggatcccaggcacatggttcatcacgagcatgagggaacagcaaggggcacggtatcacagcctggagacacccacacagatggctggatccggtgctacgggaaacattttcctaagatgcccatgagaacagaccaagatgtgtacagcactatgagcattaaaaaaccttccagaatcaataatccgtggcaacatatctctgtaaaaacaaacactgtaacttctaaataaatgtttagtcttccctgtaaccttcaaactgagtcatgtgtgagtcagcatttt

SEQ ID NO: 4600 - protein, 1114 aa, Homo sapiens; identical to SEQ ID NO: 448

SEQ ID NO: 4601 - DNA, 1286 bp, Homo sapiens
ttagagatagtttttctcatcctcaagtattgggagtccaactttgagtggaatctggactaaacttcagagtgttgccagggacggcagtatctctttgtgtgaccctggcggcttatgggacgttggcttcagacctttgtgatacaccatgctgcgtgggacgatgacggcgtggagaggaatgaggcctgaggtcacactggcttgcctcctcctagccacagcaggctgctttgctgacttgaacgaggtccctcaggtcaccgtccagcctgcgtccaccgtccagaagcccggaggcactgtgatcttgggctgcgtggtggaacctccaaggatgaatgtaacctggcgcctgaatggaaaggagctgaatggctcggatgatgctctgggtgtcctcatcacccacgggaccctcgtcatcactgcccttaacaaccacactgtgggacggtaccagtgtgtggcccggatgcctgcgggggctgtggccagcgtgccagccactgtgacactagccagtgagtctgctcctttgcctccctgccatggtgcggtccctcctcatctctcccaccctgaagcccccaccattcatgctgcctcttgttactcttagcataaaatgggccttaactgcagaaatgtcaaatcagaacagtagctgcctagtaatgcccagtgatgggggacccttgtgcccttggaaaacctcactccaagtagaggctgtatctggagtgagtgtctacagagaggggaattggtcagtgcatggcagaacttgacatggcagaactgttccgtgggccccagagcagggccgtgccgtgccttcctacttggtcatcctgtggctgtaggtgcactgtcccaactgctcacacaccttccagtcccctccctccattctcaccacagttacagtcggagcagggagagacaggacaccaagagacatgggcagggccacgtgtagtctggacagagcccacccagcccagacttggcctcctgtctctctgtgaggggcaagcatagtccgaaggcctggattataaatattagaacataatgaaaaggaaactgtgtggcaaagggataaagggatacagagaaaagaaacaaggaagagatgaggtgacagtttggaccaaggaaaatgccaagagaagacttcacactaccttttttttttctggttttgccattcttttattcatgttgttacactcagtataggatagtttattaaaatcattatgtctgtagacattcta

SEQ ID NO: 4602 - protein, 157 aa, Homo sapiens; identical to SEQ ID NO: 4596

SEQ ID NO: 4603 - DNA, 3974 bp, Homo sapiens
gcctcgtgggagtggtggttcgacggtgtcctatgcctgctttccttgcgggcggaggaactacaattcccagcgtgacccggaggcagcccgggcagaagggcggttgctgcagctttggccgaggttcgggctcgaacttggaaaatgctcctggcgcctcagggaaggtccttctcaaagaaaaggatggggctgaatcgctggaaacggttcacaaggaagccgagtcccaagcctacttttggtcctgacagtgtggaacactggataaagagagtggagaaagcctcagagtttgcagtgtcaaatgcattttttactagaaattcagatttacctagaagtccctggggccaaatcacagatttgaaaacatctgagcaaatagaggatcatgatgaaatctatgcagaagctcaggagctggtcaatgactggttagacaccaaacttaagcaagaattagcaagtgaggaagaaggtgatgctaaaaacactgtgtcaagtgtcactattatgccggaagccaatggccatttgaaatatgacaagtttgatgatttatgtggctatttggaggaagaagaggaaagtaccaccgttcaaaaatttatagaccatctgctccataaaaatgtggtagattctgcaatgatggaagatcttggaaggaaggaaaaccaagacaagaagcagcagaaggatcctcgtcttaccatggagatgagacataagcaggtaaaagaaaatcgcttaagacgtgagaaagaactggagtaccagagaatagaaaagaccctgaaaaaatcggccttcttggaggctcagtgtctggtgcaagaagagaagaaaaggaaggctctggaggccaagaaagaggaagaggagattcaaagggagatggtgaagctgcggagggagataattgagaggagacgcactgtgaaagcagcatggaaaatagagaagaaaaggcaagaagagaattctcaaaatagttcagaaaaagtcatgtttcaaagtactcacattcttccagatgaggaaaaaatggtgaaggaaagaaaaaggaaattgaaagaagtattaatccaaactttcaaagaaaatcaacagtgtcaaaaacggtatttcgctgcctggcacaagctgattcttgatcataggattaagctggggaaagctgggaccctgtctgactggaagattcagctgaaggtcctgcgggcctggagagactacacaagattccagaagttggagcgggagactcaagccttggaaaatgatcttagggaagaaaacagaaaacaacaactggccactgagtataaccggaaacaagttctccgacactgctttacagaatggcagcattggcatggcgccgagctcctgaagagagagctggctctcacaaaagaggaaactaggaagaagatggatgcactgctgcaggcagcatcactggggaaactcagtgccaatgggttatcaggcatcagtctacctgaggaggcaacagccatggtgggtccaccagtaaaaaatggacaggagactgctgtgccccctttgtgggaaaagcctcccttgggaagcagtggttgtatgctcagtcctcccctgggaagaacaacaacaggcaacttgcagggttcccttcagaatgtctctctgagtgcacctggcaataagcagcacaagaccctgggtgctgaaccctctcaacagcctggcagcaacgagacactcagaactaccagccagaaagcagaaccgctttgcttgggtcatttccacaaccgccatgtcttccagcaacagctgattgagaagcaaaagaagaaacttcaggaacagcagaaaacaattctcgagctgaagaaaaacctgcagctggcagaggctcagtgggcagcagagcatgccttagcagtcacagaagcacagagccacctgctgtcaaagcccagagaagaggaaccaagaacctgccagatgcttgtgaattcacctgttgcttcccctgggactgaaggcagaagtgactcccgaaattctctttctggactcagaaggaaaccaaagcaattgatgacaccgcatcccatactaaaagctatggaagagagagcaattcaacgagctgaatgtaggcggatcttggcagagaagaagaaaaaacaagaagaagaaaaattggcccagttaaaggcccaagaggaggaacgtcagaaaagggaggcagaagaaaaggaggcacagcttgaaagaaaacgagaagagaagagactgaagaaaatgaaagaacttgagaagcagaagagaattaagaggaaccagcagctggaagcaatagccaaagaacattatgaaagggtcttgctaaggaaaaaaggtctagagccttggaagagattgagaatgcaaagcaaacaaaacatccaggtggcagaagaacattactctttgttcctgcagaggaaatacatgctgacgtggttccagcgtagtcaggaaagtctggctagaaagatggcccaggctgatcaattttattcccaaatactgcttaagagagtcatccagagctggctacagtacgtgattgatctgcaggaagaagtaagaaaattttgtgtacattttcttcaaaagaagattttcagggcctggtttaacatggtcagggaggtgaagatcgattctcagggcaagcatgagattgcagcggagcacagtgacaggaggatcctctggatcacccttcggacatggaagaagtttgtaaaatttatgaaagaggaaagagtaaaagaagaaaggcgacagcaacttcgtaggaaggtagttgaaattcttccagacttccaggtacctggaaggtaccacgagctatatcagcaatcagatacttggtccttgagtaagacaagtctggtgaacgaatgagccagattagtgtaatatttaggacaggaagctcgactagtctgtatgtgtgttatctccacccacccacacacatacatacatacacctggtttattctctacgagctacttcttagatcaaaggaattattttgagaatttttattcccttctttgacttttcctggattgctagtcattcactatagcatttatcacagtgggatcatccaaaggaacattctagagatcgtctgttcaaatatatcctatatatttttagcatagtaaactttaaaaaggacaagtgtttgcctgactgagcctgtgaagaaaatgtgtccgtatagcacgacaggagttgctgatgtgaccttaatgaaacagaaataaacaggggtgagtgctcggaaaggaagggcgggccaaggcactcagccttctagtgcagtagcatcagtgacacgcaccccaccagacctcgtccactttcaccacccctgaaggcagaccatgtatgaaaaggttctctacacagctgctgcagaggacagcagcttatcctgatttcagagaaactgaggcaccagagatgcttctcttccgtgcaccttgataagcatgaaggacattccaaaaggtaatagctctatcatgacagtccagcaattcattaaattatctgttcatgctcccacctgcaactgctgaataatacactcagtttgtcttctagtactcagctcagtttgatctagatattgagatacctatcttgaattcaaagaatgttttcatctttaagatgctataaagactgataaaatgctctcttctatgaattgtgttagagaattacctgctagaaaaataatttttcattataaaatacacatttattatataacaaattcaagtagtccataaatgcatatggtaaaatgagaaagtcctgtgcagtcctgagatgattactcttatttggtgtgctgaaaatttgagttgacaaaataaaattctgtggttttttaagtg

SEQ ID NO: 4604 - protein, 936 aa, Homo sapiens; identical to SEQ ID NO: 450

SEQ ID NO: 4605 - DNA, 538 bp, Homo sapiens
ggctctgcactggaggcagtgattttggggcagagaattttgcaacacgtggtagtgaactgtgaggagtttgaggggtctgaagactgaaagagtcgaatggtttgttggcagggtgtcctggtggattggtttctgtaagttcagattctcataaatcgtgtgagcgtcgccgacacctctgagataaaagggcccctttcgactagcctctgctgaaaggtagagttttcaggaagtttttattccgaactgcccatgggagggtgggaccgtcttcaatctctgagccaggtgcctagggaggtctggggccatggagatggcccatggagcaaagataaatccaggcttattggcttagccgaggtgtttccagagacagcccatttaggggtgataaatgggcttataaagcagagtaaagatttagaacaggagttttgaattcaactactttgtggctatatgaccctaggcaacttgtttaataactcagagaccctgttttctcatgcaaaatggggacgataatacc

SEQ ID NO: 4606 - protein, 62 aa, Homo sapiens [sequence omitted]

SEQ ID NO: 4607 - DNA, 665 bp, Homo sapiens
actggaggcagtgattttggggcagagaattttgcaacacgtggtagtgaactgtgaggagtttgaggggtctgaagactgaaagagtcgaatggtttgttggcaggacctagaagaatcccttaggatgaagctgagtcttaccaaggtagttaatggctgtcgcctaggaaaaataaaaaacctgggcaaaacaggggaccacaccatggatattccaggctgccttctgtataccaagactggctccgccccacacctcacccatcacacgctgcataatatccacggggttcctgccatggctcagcttacgctgtcatccctagcagaacatcatgaagtcttgacagaatataaagaaggagttggaaagtttataggtaaaaattaagttacttatatgtgccttgtgatgtgttaatttggagtttggaggtgctgttacctctttgatctttcattcatatgtttgtttattcataaatttaataagtattatttgaacatctaagagccaggcattggcaagtcaagattgaataggaaacagttgctgctctcatggaatttggagcctagctgggataaagatagagaattctagtaaaaattgtggttactgctttacaggattagggatatgtatggatatcatgacaggc

SEQ ID NO: 4608 - protein, 100 aa, Homo sapiens
MVCWQDLEESLRMKLSLTKVVNGCRLGKIKNLGKTGDHTMDIPGCLLYTKTGSAPHLTHHTLHNIHGVPAMAQLTLSSLAEHHEVLTEYKEGVGKFIGKN

SEQ ID NO: 4609 - DNA, 3993 bp, Homo sapiens
aggcagtgattttggggcagagaattttgcaacacgtggtagtgaactgtgaggagtttgaggggtctgaagactgaaagagtcgaatggtttgttggcagggtgtcctggtggattggtttctgtaagttcagattctcataaatcgtgtgagcgtcgccgacacctctgagataaaagggcccctttcgactagcctctgctgaaaggacctagaagaatcccttaggatgaagctgagtcttaccaaggtagttaatggctgtcgcctaggaaaaataaaaaacctgggcaaaacaggggaccacaccatggatattccaggctgccttctgtataccaagactggctccgccccacacctcacccatcacacgctgcataatatccacggggttcctgccatggctcagcttacgctgtcatccctagcagaacatcatgaagtcttgacagaatataaagaaggagttggaaagtttataggcatgccagaatcactcttgtactgctccctgcacgatccagtcagcccctgcccggctggttatgtaacaaacaagtctgtgtctgtgtggagtgttgcaggacgagtggaaatgactgtttccaagttcatggcaattcagaaggcccttcagccagactggttccagtgcctctccgatggagaagtatcttgtaaggaagcaacttccataaaaagggtcagaaagtctgttgaccgatcacttcttttcttggataactgtctgcggctgcaggaagagtcagaggttcttcagaagagtgtgatcattggagtgattgaaggtggagatgtgatggaagagaggctgaggtcagcacgagagacagccaagcggcctgtgggtggcttccttctggatggttttcaaggaaatccaacaaccctggaggctagactacgcttgctgtcatcagtcactgcagagctgccggaggacaagccaaggctcatatctggtgttagtcggccagatgaggtgctcgagtgtattgaaagaggagtggacttatttgagagttttttcccttatcaagtaacagagcggggatgtgccctgactttcagttttgattaccagccgaatcctgaagagacactactacaacaaaatggaacacaagaagaaataaaatgtatggatcaaataaagaaaattgaaacaactggttgcaaccaagaaataacatcatttgaaattaatctgaaggaaaaaaagtaccaggaggactttaacccgctggtgagaggatgttcctgttactgctgtaagaatcacactcgggcatacatccaccatctgctggtgaccaatgagctgctggccggagtcctgcttatgatgcacaactttgaacactactttgggtttttccattacatccgggaagcactaaaaagtgacaaactggcacagttgaaagagctcatccacaggcaagcatcttgagatcttgcaaatacaagtctcactcttcacactgagcctgtaccactgttgtaacatgggaagacgtgaagaagaaataatctgagctttaattatttatatttggatataaggtctgcttaaataaagaatctttgtaccaaactgcccacatgagggtgaagagatttcctcaaaagacttaaatgacctggattgatcagagagaattgaactgtgacctttaagacttctagactaattcttttagttgatagagattcatttagtcaaagacaaaagctttaactgtgagggcacagccttgaagtgggagtgatgagattctgagggacccatgaattggattgaggcttgaggggaaatggtgtgagacgaatgggctctggacatatgcctgttgatttgagaagaaatctggctggtttgagggtttcctttagttcaccctcatactctcaggagactcttctggatacttttgtcttccaccctgccctggcagtgcagccaatcagaaatggctcttgtgacttaactgggcttggatatccctggaatgtggggcttgaacattgctcctgtgatgatcatctgtcccaggtcacactccttcatttgaccacatggcctatttgcaacttctttttagagccaatgtaattgcctgttaggagccagaagtttgcccagctgctttcttctggttgtacagatccattgtggtctgccttccaggctcattaatagtctaactacgtaataactgaagacctatctcttgtgaagattcattctcaatgtgttcacttggacagagccctgcctggcctaacgattagagggttagtctccatcctgctcagatatgactcctgggcaattcacttaacttctccatggctgcttcctgctgaataaatagggacaggcataatggataggaatgaatgaacttttaagatactgtctagctctaaaattggaagaacaaaaagttttagattagagtcatagccttaatagccctagttgtcatcctgggagacaggcaacagtagagatatttgagagcctaaagagaggtttggcctgtgggtttttaagtggttattgaattggtatcaggagatcctgaggctggtaggggaaggtaattctttctaagttacctctgtatttttcaagttttctataaggaatacacatacacccacatgcacacaccatagtttttatacaaacagcaataacaaaaccaaaaagatgcccctttttttgtagggataagaaatacatttgttttatacttctatgctatattttgctattcaaaatttagtgggcattacttaacattgtttctaattattttgtggctgctgtatgttttatgtgttgggagcccattgtattaggccgttcttggattgctataaagaaatacctgagactgggtaatttggttttttggttttttggggttttttttgagacggagccttgctctgtcgcccaggctggagtgcagtggcgcgatctcggctctatgcaacctccacctcctgggttcatgccattctcctgcctcagcctcccgagtagctgggactacaggcgcccgccaccatgcctggctaattttttatatttttagtagagatggggtttcaccgtatgagccaggatggtctcgatctcctgacctcatgatccacaagactgggtaatctgtaaagaaaagaggtttaattggctcatggctctgcaggctttacaggaagcatggtactggcatctgcttggtttctggggaggcctccggaagcttatagtcatgacagaaggtgaagggggagcaggcacatcacatgacaaaagcaggaacaagactcagagcaagaagtcacttatcaccaaggggatggcccaggccattcatgagggatccacctttgtgctccaaacacctcccaccaggccccacctccagtattggggattacatttcaacttgaggtttgggcgggaacaaatagtcaaattatattacccatctacatggttttctttttcttagtatgggagtgtccatgaataaattcatgggcatcctcataactcttccatgaatggcaaggggtacttatggaaaacagttttccaaagatctgattgttttgaaatgtgttagattggacttgttcaaatgttcatatttttgttctatgctaaatgcatcgttaggggagtagtggtaaatattccagaatccatatgaaattcatgagtttatttatgtctaaaacactgaaaactgtgtccaatatcgttcagtttcctgggtctttttcttattagcacatttgagaaaaatattcctttcctttattgtagtaaatctattaaaggcaatagccaataaaacatttttaattttaaaaatttactgtgtttggctttctgtaaatgtagtaggtctgttaaacaaaatattaaatttccatagtaccag

SEQ ID NO: 4610 - protein, 415 aa, Homo sapiens; identical to SEQ ID NO: 452

SEQ ID NO: 4611 - DNA, 3815 bp, Homo sapiens
cagtgattttggggcagagaattttgcaacacgtggtagtgaactgtgaggagtttgaggggtctgaagactgaaagagtcgaatggtttgttggcaggacctagaagaatcccttaggatgaagctgagtcttaccaaggtagttaatggctgtcgcctaggaaaaataaaaaacctgggcaaaacaggggaccacaccatggatattccaggctgccttctgtataccaagactggctccgccccacacctcacccatcacacgctgcataatatccacggggttcctgccatggctcagcttacgctgtcatccctagcagaacatcatgaagtcttgacagaatataaagaaggagttggaaagtttataggcatgccagaatcactcttgtactgctccctgcacgatccagtcagcccctgcccggctggttatgtaacaaacaagtctgtgtctgtgtggagtgttgcaggacgagtggaaatgactgtttccaagttcatggcaattcagaaggcccttcagccagactggttccagtgcctctccgatggagaagtatcttgtaaggaagcaacttccataaaaagggtcagaaagtctgttgaccgatcacttcttttcttggataactgtctgcggctgcaggaagagtcagaggttcttcagaagagtgtgatcattggagtgattgaaggtggagatgtgatggaagagaggctgaggtcagcacgagagacagccaagcggcctgtgggtggcttccttctggatggttttcaaggaaatccaacaaccctggaggctagactacgcttgctgtcatcagtcactgcagagctgccggaggacaagccaaggctcatatctggtgttagtcggccagatgaggtgctcgagtgtattgaaagaggagtggacttatttgagagttttttcccttatcaagtaacagagcggggatgtgccctgactttcagttttgattaccagccgaatcctgaagagacactactacaacaaaatggaacacaagaagaaataaaatgtatggatcaaataaagaaaattgaaacaactggttgcaaccaagaaataacatcatttgaaattaatctgaaggaaaaaaagtaccaggaggactttaacccgctggtgagaggatgttcctgttactgctgtaagaatcacactcgggcatacatccaccatctgctggtgaccaatgagctgctggccggagtcctgcttatgatgcacaactttgaacactactttgggtttttccattacatccgggaagcactaaaaagtgacaaactggcacagttgaaagagctcatccacaggcaagcatcttgagatcttgcaaatacaagtctcactcttcacactgagcctgtaccactgttgtaacatgggaagacgtgaagaagaaataatctgagctttaattatttatatttggatataaggtctgcttaaataaagaatctttgtaccaaactgcccacatgagggtgaagagatttcctcaaaagacttaaatgacctggattgatcagagagaattgaactgtgacctttaagacttctagactaattcttttagttgatagagattcatttagtcaaagacaaaagctttaactgtgagggcacagccttgaagtgggagtgatgagattctgagggacccatgaattggattgaggcttgaggggaaatggtgtgagacgaatgggctctggacatatgcctgttgatttgagaagaaatctggctggtttgagggtttcctttagttcaccctcatactctcaggagactcttctggatacttttgtcttccaccctgccctggcagtgcagccaatcagaaatggctcttgtgacttaactgggcttggatatccctggaatgtggggcttgaacattgctcctgtgatgatcatctgtcccaggtcacactccttcatttgaccacatggcctatttgcaacttctttttagagccaatgtaattgcctgttaggagccagaagtttgcccagctgctttcttctggttgtacagatccattgtggtctgccttccaggctcattaatagtctaactacgtaataactgaagacctatctcttgtgaagattcattctcaatgtgttcacttggacagagccctgcctggcctaacgattagagggttagtctccatcctgctcagatatgactcctgggcaattcacttaacttctccatggctgcttcctgctgaataaatagggacaggcataatggataggaatgaatgaacttttaagatactgtctagctctaaaattggaagaacaaaaagttttagattagagtcatagccttaatagccctagttgtcatcctgggagacaggcaacagtagagatatttgagagcctaaagagaggtttggcctgtgggtttttaagtggttattgaattggtatcaggagatcctgaggctggtaggggaaggtaattctttctaagttacctctgtatttttcaagttttctataaggaatacacatacacccacatgcacacaccatagtttttatacaaacagcaataacaaaaccaaaaagatgcccctttttttgtagggataagaaatacatttgttttatacttctatgctatattttgctattcaaaatttagtgggcattacttaacattgtttctaattattttgtggctgctgtatgttttatgtgttgggagcccattgtattaggccgttcttggattgctataaagaaatacctgagactgggtaatttggttttttggttttttggggttttttttgagacggagccttgctctgtcgcccaggctggagtgcagtggcgcgatctcggctctatgcaacctccacctcctgggttcatgccattctcctgcctcagcctcccgagtagctgggactacaggcgcccgccaccatgcctggctaattttttatatttttagtagagatggggtttcaccgtatgagccaggatggtctcgatctcctgacctcatgatccacaagactgggtaatctgtaaagaaaagaggtttaattggctcatggctctgcaggctttacaggaagcatggtactggcatctgcttggtttctggggaggcctccggaagcttatagtcatgacagaaggtgaagggggagcaggcacatcacatgacaaaagcaggaacaagactcagagcaagaagtcacttatcaccaaggggatggcccaggccattcatgagggatccacctttgtgctccaaacacctcccaccaggccccacctccagtattggggattacatttcaacttgaggtttgggcgggaacaaatagtcaaattatattacccatctacatggttttctttttcttagtatgggagtgtccatgaataaattcatgggcatcctcataactcttccatgaatggcaaggggtacttatggaaaacagttttccaaagatctgattgttttgaaatgtgttagattggacttgttcaaatgttcatatttttgttctatgctaaatgcatcgttaggggagtagtggtaaatattccagaatccatatgaaattcatgagtttatttatgtctaaaacactgaaaactgtgtccaatatcgttcagtttcctgggtctttttcttattagcacatttgagaaaaatattcctttcctttattgtagtaaatctattaaaggcaatagccaataaaacatttttaattttaaaaattt

SEQ ID NO: 4612 - protein, 427 aa, Homo sapiens
MVCWQDLEESLRMKLSLTKVVNGCRLGKIKNLGKTGDHTMDIPGCLLYTKTGSAPHLTHHTLHNIHGVPAMAQLTLSSLAEHHEVLTEYKEGVGKFIGMPESLLYCSLHDPVSPCPAGYVTNKSVSVWSVAGRVEMTVSKFMAIQKALQPDWFQCLSDGEVSCKEATSIKRVRKSVDRSLLFLDNCLRLQEESEVLQKSVIIGVIEGGDVMEERLRSARETAKRPVGGFLLDGFQGNPTTLEARLRLLSSVTAELPEDKPRLISGVSRPDEVLECIERGVDLFESFFPYQVTERGCALTFSFDYQPNPEETLLQQNGTQEEIKCMDQIKKIETTGCNQEITSFEINLKEKKYQEDFNPLVRGCSCYCCKNHTRAYIHHLLVTNELLAGVLLMMHNFEHYFGFFHYIREALKSDKLAQLKELIHRQAS

SEQ ID NO: 4613 - DNA, 3909 bp, Homo sapiens
cagagaattttgcaacacgtggtagtgaactgtgaggagtttgaggggtctgaagactgaaagagtcgaatggtttgttggcagggtgtcctggtggattggtttctgtaagttcagattctcataaatcgtgtgagcgtcgccgacacctctgagataaaagggcccctttcgactagcctctgctgaaaggacctagaagaatcccttaggatgaagctgagtcttaccaaggtagttaatggctgtcgcctaggaaaaataaaaaacctgggcaaaacaggggaccacaccatggatattccaggctgccttctgtataccaagactggctccgccccacacctcacccatcacacgctgcataatatccacggggttcctgccatggctcagcttacgctgtcatccctagcagaacatcatgaagtcttgacagaatataaagaaggagttggaaagtttataggcatgccagaatcactcttgtactgctccctgcacgatccagtcagcccctgcccggctggttatgtaacaaacaagtctgtgtctgtgtggagtgttgcaggacgagtggaaatgactgtttccaagttcatggcaattcagaaggcccttcagccagactggttccagtgcctctccgatggagaagtatcttgtaaggaagcaacttccataaaaagggtcagaaagtctgttgaccgatcacttcttttcttggataactgtctgcggctgcaggaagagtcagaggttcttcagaagagtgtgatcattggagtgattgaaggtggagatgtgatggaagagaggctgaggtcagcacgagagacagccaagcggcctgtgggtggcttccttctggatggttttcaaggaaatccaacaaccctggaggctagactacgcttgctgtcatcagtcactgcagagctgccggaggacaagccaaggctcatatctggtgttagtcggccagatgaggtgctcgagtgtattgaaagaggagtggacttatttgagagttttttcccttatcaagtaacagagcggggatgtgccctgactttcagttttgattaccagccgaatcctgaagagacactactacaacaaaatggaacacaagaagaaataaaatgtatggatcaaataaagaaaattgaaacaactggttgcaaccaagaaataacatcatttgaaattaatctgaaggaaaaaaagtaccaggaggactttaacccgctggtgagaggatgttcctgttactgctgtaagaatcacactcgggcatacatccaccatctgctggtgaccaatgagctgctggccggagtcctgcttatgatgcacaactttgaacactactttgggtttttccattacatccgggaagcactaaaaagtgacaaactggcacagttgaaagagctcatccacaggcaagcatcttgagatcttgcaaatacaagtctcactcttcacactgagcctgtaccactgttgtaacatgggaagacgtgaagaagaaataatctgagctttaattatttatatttggatataaggtctgcttaaataaagaatctttgtaccaaactgcccacatgagggtgaagagatttcctcaaaagacttaaatgacctggattgatcagagagaattgaactgtgacctttaagacttctagactaattcttttagttgatagagattcatttagtcaaagacaaaagctttaactgtgagggcacagccttgaagtgggagtgatgagattctgagggacccatgaattggattgaggcttgaggggaaatggtgtgagacgaatgggctctggacatatgcctgttgatttgagaagaaatctggctggtttgagggtttcctttagttcaccctcatactctcaggagactcttctggatacttttgtcttccaccctgccctggcagtgcagccaatcagaaatggctcttgtgacttaactgggcttggatatccctggaatgtggggcttgaacattgctcctgtgatgatcatctgtcccaggtcacactccttcatttgaccacatggcctatttgcaacttctttttagagccaatgtaattgcctgttaggagccagaagtttgcccagctgctttcttctggttgtacagatccattgtggtctgccttccaggctcattaatagtctaactacgtaataactgaagacctatctcttgtgaagattcattctcaatgtgttcacttggacagagccctgcctggcctaacgattagagggttagtctccatcctgctcagatatgactcctgggcaattcacttaacttctccatggctgcttcctgctgaataaatagggacaggcataatggataggaatgaatgaacttttaagatactgtctagctctaaaattggaagaacaaaaagttttagattagagtcatagccttaatagccctagttgtcatcctgggagacaggcaacagtagagatatttgagagcctaaagagaggtttggcctgtgggtttttaagtggttattgaattggtatcaggagatcctgaggctggtaggggaaggtaattctttctaagttacctctgtatttttcaagttttctataaggaatacacatacacccacatgcacacaccatagtttttatacaaacagcaataacaaaaccaaaaagatgcccctttttttgtagggataagaaatacatttgttttatacttctatgctatattttgctattcaaaatttagtgggcattacttaacattgtttctaattattttgtggctgctgtatgttttatgtgttgggagcccattgtattaggccgttcttggattgctataaagaaatacctgagactgggtaatttggttttttggttttttggggttttttttgagacggagccttgctctgtcgcccaggctggagtgcagtggcgcgatctcggctctatgcaacctccacctcctgggttcatgccattctcctgcctcagcctcccgagtagctgggactacaggcgcccgccaccatgcctggctaattttttatatttttagtagagatggggtttcaccgtatgagccaggatggtctcgatctcctgacctcatgatccacaagactgggtaatctgtaaagaaaagaggtttaattggctcatggctctgcaggctttacaggaagcatggtactggcatctgcttggtttctggggaggcctccggaagcttatagtcatgacagaaggtgaagggggagcaggcacatcacatgacaaaagcaggaacaagactcagagcaagaagtcacttatcaccaaggggatggcccaggccattcatgagggatccacctttgtgctccaaacacctcccaccaggccccacctccagtattggggattacatttcaacttgaggtttgggcgggaacaaatagtcaaattatattacccatctacatggttttctttttcttagtatgggagtgtccatgaataaattcatgggcatcctcataactcttccatgaatggcaaggggtacttatggaaaacagttttccaaagatctgattgttttgaaatgtgttagattggacttgttcaaatgttcatatttttgttctatgctaaatgcatcgttaggggagtagtggtaaatattccagaatccatatgaaattcatgagtttatttatgtctaaaacactgaaaactgtgtccaatatcgttcagtttcctgggtctttttcttattagcacatttgagaaaaatattcctttcctttattgtagtaaatctattaaaggcaatagccaataaaacatttttaattttaaaaattt

SEQ ID NO: 4614 - protein, 415 aa, Homo sapiens; identical to SEQ ID NO: 452

SEQ ID NO: 4615 - DNA, 4099 bp, Homo sapiens
cagagaattttgcaacacgtggtagtgaactgtgaggagtttgaggggtctgaagactgaaagagtcgaatggtttgttggcagggtgtcctggtggattggtttctgtaagttcagattctcataaatcgtgtgagcgtcgccgacacctctgagataaaagggcccctttcgactagcctctgctgaaaggacctagaagaatcccttaggatgaagctgagtcttaccaaggtagttaatggctgtcgcctaggaaaaataaaaaacctgggcaaaacaggggaccacaccatggatattccaggctgccttctgtataccaagactggctccgccccacacctcacccatcacacgctgcataatatccacggggttcctgccatggctcagcttacgctgtcatccctagcagaacatcatgaagtcttgacagaatataaagaaggagttggaaagtttataggcatgccagaatcactcttgtactgctccctgcacgatccagtcagcccctgcccggctggttatgtaacaaacaagtctgtgtctgtgtggagtgttgcaggacgagtggaaatgactgtttccaagttcatggcaattcagaaggcccttcagccagactggttccagtgcctctccgatggagaagtatcttgtaaggaagcaacttccataaaaagggtcagaaagtctgttgaccgatcacttcttttcttggataactgtctgcggctgcaggaagagtcagaggttcttcagaagagtgtgatcattggagtgattgaaggtggagatgtgatggaagagaggctgaggtcagcacgagagacagccaagcggcctgtgggtggcttccttctggatggttttcaaggaaatccaacaaccctggaggctagactacgcttgctgtcatcagtcactgcagagctgccggaggacaagccaaggctcatatctggtgttagtcggccagatgaggtgctcgagtgtattgaaagaggagtggacttatttgagagttttttcccttatcaagtaacagagcggggatgtgccctgactttcagttttgattaccagccgaatcctgaagagacactactacaacaaaatggaacacaagaagaaataaaatgtatggatcaaataaagaaaattgaaacaactggttgcaaccaagaaataacatcatttgaaattaatctgaaggaaaaaaagtaccaggaggactttaacccgctggtgagaggatgttcctgttactgctgtaagaatcacactcgggcatacatccaccatctgctggtgaccaatgagctgctggccggagtcctgcttatgatgcacaactttgaacactactttgggtttttccattacatccgggaagcactaaaaagtgacaaactggcacagttgaaagagctcatccacaggcaagcatcttgagatcttgcaaatacaagtctcactcttcacactgagcctgtaccactgttgtaacatgggaagacgtgaagaagaaataatctgagctttaattatttatatttggatataaggtctgcttaaataaagaatctttgtaccaaactgcccacatgagggtgaagagatttcctcaaaagacttaaatgacctggattgatcagagagaattgaactgtgacctttaagacttctagactaattcttttagttgatagagattcatttagtcaaagacaaaagctttaactgtgagggcacagccttgaagtgggagtgatgagattctgagggacccatgaattggattgaggcttgaggggaaatggtgtgagacgaatgggctctggacatatgcctgttgatttgagaagaaatctggctggtttgagggtttcctttagttcaccctcatactctcaggagactcttctggatacttttgtcttccaccctgccctggcagtgcagccaatcagaaatggctcttgtgacttaactgggcttggatatccctggaatgtggggcttgaacattgctcctgtgatgatcatctgtcccaggtcacactccttcatttgaccacatggcctatttgcaacttctttttagagccaatgtaattgcctgttaggagccagaagtttgcccagctgctttcttctggttgtacagatccattgtggtctgccttccaggctcattaatagtctaactacgtaataactgaagacctatctcttgtgaagattcattctcaatgtgttcacttggacagagccctgcctggcctaacgattagagggttagtctccatcctgctcagatatgactcctgggcaattcacttaacttctccatggctgcttcctgctgaataaatagggacaggcataatggataggaatgaatgaacttttaagatactgtctagctctaaaattggaagaacaaaaagttttagattagagtcatagccttaatagccctagttgtcatcctgggagacaggcaacagtagagatatttgagagcctaaagagaggtttggcctgtgggtttttaagtggttattgaattggtatcaggagatcctgaggctggtaggggaaggtaattctttctaagttacctctgtatttttcaagttttctataaggaatacacatacacccacatgcacacaccatagtttttatacaaacagcaataacaaaaccaaaaagatgcccctttttttgtagggataagaaatacatttgttttatacttctatgctatattttgctattcaaaatttagtgggcattacttaacattgtttctaattattttgtggctgctgtatgttttatgtgttgggagcccattgtattaggccgttcttggattgctataaagaaatacctgagactgggtaatttggttttttggttttttggggttttttttgagacggagccttgctctgtcgcccaggctggagtgcagtggcgcgatctcggctctatgcaacctccacctcctgggttcatgccattctcctgcctcagcctcccgagtagctgggactacaggcgcccgccaccatgcctggctaattttttatatttttagtagagatggggtttcaccgtatgagccaggatggtctcgatctcctgacctcatgatccacaagactgggtaatctgtaaagaaaagaggtttaattggctcatggctctgcaggctttacaggaagcatggtactggcatctgcttggtttctggggaggcctccggaagcttatagtcatgacagaaggtgaagggggagcaggcacatcacatgacaaaagcaggaacaagactcagagcaagaagtcacttatcaccaaggggatggcccaggccattcatgagggatccacctttgtgctccaaacacctcccaccaggccccacctccagtattggggattacatttcaacttgaggtttgggcgggaacaaatagtcaaattatattacccatctacatggttttctttttcttagtatgggagtgtccatgaataaattcatgggcatcctcataactcttccatgaatggcaaggggtacttatggaaaacagttttccaaagatctgattgttttgaaatgtgttagattggacttgttcaaatgttcatatttttgttctatgctaaatgcatcgttaggggagtagtggtaaatattccagaatccatatgaaattcatgagtttatttatgtctaaaacactgaaaactgtgtccaatatcgttcagtttcctgggtctttttcttattagcacatttgagaaaaatattcctttcctttattgtagtaaatctattaaaggcaatagccaataaaacatttttaattttaaaaatttactgtgtttggctttctgtaaatgtagtaggtctgttaaacaaaatattaaatttccatagtaccagaaatgttgtagagatttctcattggaagaaaaaaatgtttatctgtattcattgttttgagagcttccatgataaatgtaaaatccaaaaagatatttaattatatacattatgaagattccc

SEQ ID NO: 4616 - protein, 415 aa, Homo sapiens; identical to SEQ ID NO: 452

SEQ ID NO: 4617 - DNA, 587 bp, Homo sapiens
tttatcattttaattattttatttttatttgcattttactcttgctaattcctcatcattttgctccatggcagtctgtgtctgtgtggagtgttgcaggacgagtggaaatgactgtttccaagttcatggcaattcagaaggcccttcagccagactggttccagtgcctctccgatggagaagtatcttgtaaggaagcaacttccataaaaagggtcagaaagtctgttgaccgatcacttcttttcttggataactgtctgcggctgcaggaagagtcagaggttcttcagaagagtgtgatcattggagtgattgaaggtggagatgtgatggaagagaggctgaggtcagcacgagagacagccaagcggcctgtgggtggcttccttctggatggttttcaaggaaatccaacaaccctggaggctagactacgcttgctgtcatcagtcactgcagagctggaggtagaaaaggagctaggatacagactttgggctggagttgcttgaagtaggttttcaggagagtgtcgcctgcccagtcttccctctggccttcagaaatgacctttcctttcc

SEQ ID NO: 4618 - protein, 135 aa, Homo sapiens
MTVSKFMAIQKALQPDWFQCLSDGEVSCKEATSIKRVRKSVDRSLLFLDNCLRLQEESEVLQKSVIIGVIEGGDVMEERLRSARETAKRPVGGFLLDGFQGNPTTLEARLRLLSSVTAELEVEKELGYRLWAGVA

SEQ ID NO: 4619 - DNA, 393 bp, Homo sapiens
ttccttctggatggttttcaaggaaatccaacaaccctggaggctagactacgcttgctgtcatcagtcactgcagagctgccggaggacaagccaaggctcatatctggtgttagtcggccagatgaggtgctcgagtgtattgaaagaggagtggacttatttgagagttttttcccttatcaagtaacagagcggggatgtgccctgactttcagttttgattaccagccgaatcctgaagagacacgataaattctcaggagtgaaattacagagtcaaagatcatgaaataataactaaaataaaatgtttccaatggccacttcttatctgatcatcattcaagcctttttattggtttgtccttcagtactacaacaaaatggaac

SEQ ID NO: 4620 - protein, 59 aa, Homo sapiens
MVFKEIQQPWRLDYACCHQSLQSCRRTSQGSYLVLVGQMRCSSVLKEEWTYLRVFSLIK

SEQ ID NO: 4621 - DNA, 2922 bp, Homo sapiens
gataaattctcaggagtgaaattacagagtcaaagatcatgaaataataactaaaataaaatgtttccaatggccacttcttatctgatcatcattcaagcctttttattggtttgtccttcagtactacaacaaaatggaacacaagaagaaataaaatgtatggatcaaataaagaaaattgaaacaactggttgcaaccaagaaataacatcatttgaaattaatctgaaggaaaaaaagtaccaggaggactttaacccgctggtgagaggatgttcctgttactgctgtaagaatcacactcgggcatacatccaccatctgctggtgaccaatgagctgctggccggagtcctgcttatgatgcacaactttgaacactactttgggtttttccattacatccgggaagcactaaaaagtgacaaactggcacagttgaaagagctcatccacaggcaagcatcttgagatcttgcaaatacaagtctcactcttcacactgagcctgtaccactgttgtaacatgggaagacgtgaagaagaaataatctgagctttaattatttatatttggatataaggtctgcttaaataaagaatctttgtaccaaactgcccacatgagggtgaagagatttcctcaaaagacttaaatgacctggattgatcagagagaattgaactgtgacctttaagacttctagactaattcttttagttgatagagattcatttagtcaaagacaaaagctttaactgtgagggcacagccttgaagtgggagtgatgagattctgagggacccatgaattggattgaggcttgaggggaaatggtgtgagacgaatgggctctggacatatgcctgttgatttgagaagaaatctggctggtttgagggtttcctttagttcaccctcatactctcaggagactcttctggatacttttgtcttccaccctgccctggcagtgcagccaatcagaaatggctcttgtgacttaactgggcttggatatccctggaatgtggggcttgaacattgctcctgtgatgatcatctgtcccaggtcacactccttcatttgaccacatggcctatttgcaacttctttttagagccaatgtaattgcctgttaggagccagaagtttgcccagctgctttcttctggttgtacagatccattgtggtctgccttccaggctcattaatagtctaactacgtaataactgaagacctatctcttgtgaagattcattctcaatgtgttcacttggacagagccctgcctggcctaacgattagagggttagtctccatcctgctcagatatgactcctgggcaattcacttaacttctccatggctgcttcctgctgaataaatagggacaggcataatggataggaatgaatgaacttttaagatactgtctagctctaaaattggaagaacaaaaagttttagattagagtcatagccttaatagccctagttgtcatcctgggagacaggcaacagtagagatatttgagagcctaaagagaggtttggcctgtgggtttttaagtggttattgaattggtatcaggagatcctgaggctggtaggggaaggtaattctttctaagttacctctgtatttttcaagttttctataaggaatacacatacacccacatgcacacaccatagtttttatacaaacagcaataacaaaaccaaaaagatgcccctttttttgtagggataagaaatacatttgttttatacttctatgctatattttgctattcaaaatttagtgggcattacttaacattgtttctaattattttgtggctgctgtatgttttatgtgttgggagcccattgtattaggccgttcttggattgctataaagaaatacctgagactgggtaatttggttttttggttttttggggttttttttgagacggagccttgctctgtcgcccaggctggagtgcagtggcgcgatctcggctctatgcaacctccacctcctgggttcatgccattctcctgcctcagcctcccgagtagctgggactacaggcgcccgccaccatgcctggctaattttttatatttttagtagagatggggtttcaccgtatgagccaggatggtctcgatctcctgacctcatgatccacaagactgggtaatctgtaaagaaaagaggtttaattggctcatggctctgcaggctttacaggaagcatggtactggcatctgcttggtttctggggaggcctccggaagcttatagtcatgacagaaggtgaagggggagcaggcacatcacatgacaaaagcaggaacaagactcagagcaagaagtcacttatcaccaaggggatggcccaggccattcatgagggatccacctttgtgctccaaacacctcccaccaggccccacctccagtattggggattacatttcaacttgaggtttgggcgggaacaaatagtcaaattatattacccatctacatggttttctttttcttagtatgggagtgtccatgaataaattcatgggcatcctcataactcttccatgaatggcaaggggtacttatggaaaacagttttccaaagatctgattgttttgaaatgtgttagattggacttgttcaaatgttcatatttttgttctatgctaaatgcatcgttaggggagtagtggtaaatattccagaatccatatgaaattcatgagtttatttatgtctaaaacactgaaaactgtgtccaatatcgttcagtttcctgggtctttttcttattagcacatttgagaaaaatattcctttcctttattgtagtaaatctattaaaggcaatagccaataaaacatttttaattttaaaaattt

SEQ ID NO: 4622 - protein, 137 aa, Homo sapiens [sequence omitted]

SEQ ID NO: 4623 - DNA, 3112 bp, Homo sapiens
gataaattctcaggagtgaaattacagagtcaaagatcatgaaataataactaaaataaaatgtttccaatggccacttcttatctgatcatcattcaagcctttttattggtttgtccttcagtactacaacaaaatggaacacaagaagaaataaaatgtatggatcaaataaagaaaattgaaacaactggttgcaaccaagaaataacatcatttgaaattaatctgaaggaaaaaaagtaccaggaggactttaacccgctggtgagaggatgttcctgttactgctgtaagaatcacactcgggcatacatccaccatctgctggtgaccaatgagctgctggccggagtcctgcttatgatgcacaactttgaacactactttgggtttttccattacatccgggaagcactaaaaagtgacaaactggcacagttgaaagagctcatccacaggcaagcatcttgagatcttgcaaatacaagtctcactcttcacactgagcctgtaccactgttgtaacatgggaagacgtgaagaagaaataatctgagctttaattatttatatttggatataaggtctgcttaaataaagaatctttgtaccaaactgcccacatgagggtgaagagatttcctcaaaagacttaaatgacctggattgatcagagagaattgaactgtgacctttaagacttctagactaattcttttagttgatagagattcatttagtcaaagacaaaagctttaactgtgagggcacagccttgaagtgggagtgatgagattctgagggacccatgaattggattgaggcttgaggggaaatggtgtgagacgaatgggctctggacatatgcctgttgatttgagaagaaatctggctggtttgagggtttcctttagttcaccctcatactctcaggagactcttctggatacttttgtcttccaccctgccctggcagtgcagccaatcagaaatggctcttgtgacttaactgggcttggatatccctggaatgtggggcttgaacattgctcctgtgatgatcatctgtcccaggtcacactccttcatttgaccacatggcctatttgcaacttctttttagagccaatgtaattgcctgttaggagccagaagtttgcccagctgctttcttctggttgtacagatccattgtggtctgccttccaggctcattaatagtctaactacgtaataactgaagacctatctcttgtgaagattcattctcaatgtgttcacttggacagagccctgcctggcctaacgattagagggttagtctccatcctgctcagatatgactcctgggcaattcacttaacttctccatggctgcttcctgctgaataaatagggacaggcataatggataggaatgaatgaacttttaagatactgtctagctctaaaattggaagaacaaaaagttttagattagagtcatagccttaatagccctagttgtcatcctgggagacaggcaacagtagagatatttgagagcctaaagagaggtttggcctgtgggtttttaagtggttattgaattggtatcaggagatcctgaggctggtaggggaaggtaattctttctaagttacctctgtatttttcaagttttctataaggaatacacatacacccacatgcacacaccatagtttttatacaaacagcaataacaaaaccaaaaagatgcccctttttttgtagggataagaaatacatttgttttatacttctatgctatattttgctattcaaaatttagtgggcattacttaacattgtttctaattattttgtggctgctgtatgttttatgtgttgggagcccattgtattaggccgttcttggattgctataaagaaatacctgagactgggtaatttggttttttggttttttggggttttttttgagacggagccttgctctgtcgcccaggctggagtgcagtggcgcgatctcggctctatgcaacctccacctcctgggttcatgccattctcctgcctcagcctcccgagtagctgggactacaggcgcccgccaccatgcctggctaattttttatatttttagtagagatggggtttcaccgtatgagccaggatggtctcgatctcctgacctcatgatccacaagactgggtaatctgtaaagaaaagaggtttaattggctcatggctctgcaggctttacaggaagcatggtactggcatctgcttggtttctggggaggcctccggaagcttatagtcatgacagaaggtgaagggggagcaggcacatcacatgacaaaagcaggaacaagactcagagcaagaagtcacttatcaccaaggggatggcccaggccattcatgagggatccacctttgtgctccaaacacctcccaccaggccccacctccagtattggggattacatttcaacttgaggtttgggcgggaacaaatagtcaaattatattacccatctacatggttttctttttcttagtatgggagtgtccatgaataaattcatgggcatcctcataactcttccatgaatggcaaggggtacttatggaaaacagttttccaaagatctgattgttttgaaatgtgttagattggacttgttcaaatgttcatatttttgttctatgctaaatgcatcgttaggggagtagtggtaaatattccagaatccatatgaaattcatgagtttatttatgtctaaaacactgaaaactgtgtccaatatcgttcagtttcctgggtctttttcttattagcacatttgagaaaaatattcctttcctttattgtagtaaatctattaaaggcaatagccaataaaacatttttaattttaaaaatttactgtgtttggctttctgtaaatgtagtaggtctgttaaacaaaatattaaatttccatagtaccagaaatgttgtagagatttctcattggaagaaaaaaatgtttatctgtattcattgttttgagagcttccatgataaatgtaaaatccaaaaagatatttaattatatacattatgaagattccc

SEQ ID NO: 4624 - protein, 137 aa, Homo sapiens [sequence omitted]

SEQ ID NO: 4625 - DNA, 501 bp, Homo sapiens
atggagggcgtggagacaagggcggggcttgctcaagagttgcagaggaaggaaaagagagagaaaagctgtgagatacttgttagaaagaaacgattcaatgagaagctaaaaagaggagtaaatcctttcaatcaagaagaaaacaaaagcttgcctgggctccaagaggtgggtgactacggcgcagaagaaggacggcaagaaaccaagcgcagccgcaaggcgagctactccgtgtacttgcacaaggtgctgaagcaggtccactctgacaccggcatctcctctaaggccatggggatcatgaactccttcgtcaacgacatctttgagcacgtcgcgggcgaggcttcccgcctggcgcattacaacaagcgctcgaccatcacctccagggagatccagacggccgagcgcctgctgctgcccgaggaggtggccaagcacgccgtgtccgagggcaccaaggccatcaccaagtataccagcgctaagtaa

SEQ ID NO: 4626 - protein, 166 aa, Homo sapiens
MEGVETRAGLAQELQRKEKREKSCEILVRKKRFNEKLKRGVNPFNQEENKSLPGLQEVGDYGAEEGRQETKRSRKASYSVYLHKVLKQVHSDTGISSKAMGIMNSFVNDIFEHVAGEASRLAHYNKRSTITSREIQTAERLLLPEEVAKHAVSEGTKAITKYTSAK

SEQ ID NO: 4627 - DNA, 1422 bp, Homo sapiens
aaaggtaaaaacagtggaaaaactaagattaaaaagagcactgaggagaaaatatacatgtactaaaaagcacagtatccgagcagatagagagacaaagaggaaaagagagcgaggtagaaaacggatactgcctatgcctactccatccctctttcagcaccaaggacagaacctctgagcggctgacccaagcaacgctcagtttagggtccctcccaaatcctctaaagaaaacggatacattcgaaagcagctatgaaacatgcactaaggtctaatagggaagctggaaaagcagcactcaagtaatttcaccttagaggcaaaaatgggtgatttctttctgttcatttcatagtttctgagtcctgagaaaggcaaagtttgctttgcttgggtatgtctgctgtcagtaaatggctgcaggagccgaagtggtaaactcctcggtctccagaaatcagaagaaaattttagggaagccccttggcatcacgcacctccctctgggctatggcatctctgagccagctgagtggccacctgaactacacctgtggggcagagaactccacaggtgccagccaggcccgcccacatgcctactatgccctctcctactgcgcgctcatcctggccatcgtcttcggcaatggcctggtgtgcatggctgtgctgaaggagcgggccctgcagactaccaccaactacttagtagtgagcctggctgtggcagacttgctggtggccaccttggtgatgccctgggtggtatacctggaggtgacaggtggagtctggaatttcagccgcatttgctgtgatgtttttgtcaccctggatgtcatgatgtgtacagccagcatccttaatctctgtgccatcagcatagacaggtacactgcagtggtcatgcccgttcactaccagcatggcacgggacagagctcctgtcggcgcgtggccctcatgatcacggccgtctgggtactggcctttgctgtgtcctgccctcttctgtttggctttaataccacaggggaccccactgtctgctccatctccctgagtcccaccatagcgcccaagctcagcttagaagttcgaaaactcagcaatggcagattatcgacatctttgaagctggggcccctgcaacctcggggagtgccacttcgggagaagaaggcaacccaaatggtggccattgtgcttggggccttcattgtctgctggctgcccttcttcttgacccatgttctcaatacccactgccagacatgccacgtgtccccagagctttacagtgccacgacatggctgggctacgtgaatagcgccctcaaccctgtgatctataccaccttcaatatcgagttccggaaagccttcctcaagatcctgtcttgctgagggagc

SEQ ID NO: 4628 - protein, 299 aa, Homo sapiens
MASLSQLSGHLNYTCGAENSTGASQARPHAYYALSYCALILAIVFGNGLVCMAVLKERALQTTTNYLVVSLAVADLLVATLVMPWVVYLEVTGGVWNFSRICCDVFVTLDVMMCTASILNLCAISIDRYTAVVMPVHYQHGTGQSSCRRVALMITAVWVLAFAVSCPLLFGFNTTGDPTVCSISLSPTIAPKLSLEVRKLSNGRLSTSLKLGPLQPRGVPLREKKATQMVAIVLGAFIVCWLPFFLTHVLNTHCQTCHVSPELYSATTWLGYVNSALNPVIYTTFNIEFRKAFLKILSC

SEQ ID NO: 4629 - DNA, 1616 bp, Homo sapiens
aaaggtaaaaacagtggaaaaactaagattaaaaagagcactgaggagaaaatatacatgtactaaaaagcacagtatccgagcagatagagagacaaagaggaaaagagagcgaggtagaaaacggatactgcctatgcctactccatccctctttcagcaccaaggacagaacctctgagcggctgacccaagcaacgctcagtttagggtccctcccaaatcctctaaagaaaacggatacattcgaaagcagctatgaaacatgcactaaggtctaatagggaagctggaaaagcagcactcaagtaatttcaccttagaggcaaaaatgggtgatttctttctgttcatttcatagtttctgagtcctgagaaaggcaaagtttgctttgcttgggtatgtctgctgtcagtaaatggctgcaggagccgaagtggtaaactcctcggtctccagaaatcagaagaaaattttagggaagccccttggcatcacgcacctccctctgggctatggcatctctgagccagctgagtggccacctgaactacacctgtggggcagagaactccacaggtgccagccaggcccgcccacatgcctactatgccctctcctactgcgcgctcatcctggccatcgtcttcggcaatggcctggtgtgcatggctgtgctgaaggagcgggccctgcagactaccaccaactacttagtagtgagcctggctgtggcagacttgctggtggccaccttggtgatgccctgggtggtatacctggaggtgacaggtggagtctggaatttcagccgcatttgctgtgatgtttttgtcaccctggatgtcatgatgtgtacagccagcatccttaatctctgtgccatcagcatagacaggtacactgcagtggtcatgcccgttcactaccagcatggcacgggacagagctcctgtcggcgcgtggccctcatgatcacggccgtctgggtactggcctttgctgtgtcctgccctcttctgtttggctttaataccacaggggaccccactgtctgctccatctccaaccgatcctcactcgacagaacagtcagtgcaacagtgtcaggcctggcttcccccagcaaaccctctctcctgacccggcacatctggagctgaagcgttactacagcatctgccaggacactgccttgggtggaccaggcttccaagaaagaggaggagagttgaaaagagaggagaagactcggaattccctgagtcccaccatagcgcccaagctcagcttagaagttcgaaaactcagcaatggcagattatcgacatctttgaagctggggcccctgcaacctcggggagtgccacttcgggagaagaaggcaacccaaatggtggccattgtgcttggggccttcattgtctgctggctgcccttcttcttgacccatgttctcaatacccactgccagacatgccacgtgtccccagagctttacagtgccacgacatggctgggctacgtgaatagcgccctcaaccctgtgatctataccaccttcaatatcgagttccggaaagccttcctcaagatcctgtcttgctgagggagc

SEQ ID NO: 4630 - protein, 215 aa, Homo sapiens
MASLSQLSGHLNYTCGAENSTGASQARPHAYYALSYCALILAIVFGNGLVCMAVLKERALQTTTNYLVVSLAVADLLVATLVMPWVVYLEVTGGVWNFSRICCDVFVTLDVMMCTASILNLCAISIDRYTAVVMPVHYQHGTGQSSCRRVALMITAVWVLAFAVSCPLLFGFNTTGDPTVCSISNRSSLDRTVSATVSGLASPSKPSLLTRHIWS

SEQ ID NO: 4631 - DNA, 1582 bp, Homo sapiens
aaaggtaaaaacagtggaaaaactaagattaaaaagagcactgaggagaaaatatacatgtactaaaaagcacagtatccgagcagatagagagacaaagaggaaaagagagcgaggtagaaaacggatactgcctatgcctactccatccctctttcagcaccaaggacagaacctctgagcggctgacccaagcaacgctcagtttagggtccctcccaaatcctctaaagaaaacggatacattcgaaagcagctatgaaacatgcactaaggtctaatagggaagctggaaaagcagcactcaagtaatttcaccttagaggcaaaaatgggtgatttctttctgttcatttcatagtttctgagtcctgagaaaggcaaagtttgctttgcttgggtatgtctgctgtcagtaaatggctgcaggagccgaagtggtaaactcctcggtctccagaaatcagaagaaaattttagggaagccccttggcatcacgcacctccctctgggctatggcatctctgagccagctgagtggccacctgaactacacctgtggggcagagaactccacaggtgccagccaggcccgcccacatgcctactatgccctctcctactgcgcgctcatcctggccatcgtcttcggcaatggcctggtgtgcatggctgtgctgaaggagcgggccctgcagactaccaccaactacttagtagtgagcctggctgtggcagacttgctggtggccaccttggtgatgccctgggtggtatacctggaggtgacaggtggagtctggaatttcagccgcatttgctgtgatgtttttgtcaccctggatgtcatgatgtgtacagccagcatccttaatctctgtgccatcagcatagacaggtacactgcagtggtcatgcccgttcactaccagcatggcacgggacagagctcctgtcggcgcgtggccctcatgatcacggccgtctgggtactggcctttgctgtgtcctgccctcttctgtttggctttaataccacaggggaccccactgtctgctccatctccaaccctgattttgtcatctactcttcagtggtgtccttctacctgccctttggagtgactgtccttgtctatgccagaatctatgtggtgctgaaacaaaggagacggaaaaggatcctcactcgacagaacagtcagtgcaacagtgtcaggcctgtccctgagtcccaccatagcgcccaagctcagcttagaagttcgaaaactcagcaatggcagattatcgacatctttgaagctggggcccctgcaacctcggggagtgccacttcgggagaagaaggcaacccaaatggtggccattgtgcttggggccttcattgtctgctggctgcccttcttcttgacccatgttctcaatacccactgccagacatgccacgtgtccccagagctttacagtgccacgacatggctgggctacgtgaatagcgccctcaaccctgtgatctataccaccttcaatatcgagttccggaaagccttcctcaagatcctgtcttgctgagggagc

SEQ ID NO: 4632 - protein, 327 aa, Homo sapiens
MASLSQLSGHLNYTCGAENSTGASQARPHAYYALSYCALILAIVFGNGLVCMAVLKERALQTTTNYLVVSLAVADLLVATLVMPWVVYLEVTGGVWNFSRICCDVFVTLDVMMCTASILNLCAISIDRYTAVVMPVHYQHGTGQSSCRRVALMITAVWVLAFAVSCPLLFGFNTTGDPTVCSISNPDFVIYSSVVSFYLPFGVTVLVYARIYVVLKQRRRKRILTRQNSQCNSVRPVPESHHSAQAQLRSSKTQQWQIIDIFEAGAPATSGSATSGEEGNPNGGHCAWGLHCLLAALLLDPCSQYPLPDMPRVPRALQCHDMAGLRE

SEQ ID NO: 4633 - DNA, 1626 bp, Homo sapiens
aaaggtaaaaacagtggaaaaactaagattaaaaagagcactgaggagaaaatatacatgtactaaaaagcacagtatccgagcagatagagagacaaagaggaaaagagagcgaggtagaaaacggatactgcctatgcctactccatccctctttcagcaccaaggacagaacctctgagcggctgacccaagcaacgctcagtttagggtccctcccaaatcctctaaagaaaacggatacattcgaaagcagctatgaaacatgcactaaggtctaatagggaagctggaaaagcagcactcaagtaatttcaccttagaggcaaaaatgggtgatttctttctgttcatttcatagtttctgagtcctgagaaaggcaaagtttgctttgcttgggtatgtctgctgtcagtaaatggctgcaggagccgaagtggtaaactcctcggtctccagaaatcagaagaaaattttagggaagccccttggcatcacgcacctccctctgggctatggcatctctgagccagctgagtggccacctgaactacacctgtggggcagagaactccacaggtgccagccaggcccgcccacatgcctactatgccctctcctactgcgcgctcatcctggccatcgtcttcggcaatggcctggtgtgcatggctgtgctgaaggagcgggccctgcagactaccaccaactacttagtagtgagcctggctgtggcagacttgctggtggccaccttggtgatgccctgggtggtatacctggaggtgacaggtggagtctggaatttcagccgcatttgctgtgatgtttttgtcaccctggatgtcatgatgtgtacagccagcatccttaatctctgtgccatcagcatagacaggtacactgcagtggtcatgcccgttcactaccagcatggcacgggacagagctcctgtcggcgcgtggccctcatgatcacggccgtctgggtactggcctttgctgtgtcctgccctcttctgtttggctttaataccacaggggaccccactgtctgctccatctccaaccctgattttgtcatctactcttcagtggtgtccttctacctgccctttggagtgactgtccttgtctatgccagaatctatgtggtgctgaaacaaaggagacggaaaaggatcctcactcgacagaacagtcagtgcaacagtgtcaggcctggcttcccccagcaaaccctctctcctgacccggcacatctggagctgaagcgttactacagcatctgccaggacactgccttgggtggaccaggcttccaagaaagaggaggagagttgaaaagagaggagaagactcggaattccctgatgccacttcgggagaagaaggcaacccaaatggtggccattgtgcttggggccttcattgtctgctggctgcccttcttcttgacccatgttctcaatacccactgccagacatgccacgtgtccccagagctttacagtgccacgacatggctgggctacgtgaatagcgccctcaaccctgtgatctataccaccttcaatatcgagttccggaaagccttcctcaagatcctgtcttgctgagggagc

SEQ ID NO: 4634 - protein, 367 aa, Homo sapiens; identical to SEQ ID NO: 457

SEQ ID NO: 4635 - DNA, 1725 bp, Homo sapiens
aaaggtaaaaacagtggaaaaactaagattaaaaagagcactgaggagaaaatatacatgtactaaaaagcacagtatccgagcagatagagagacaaagaggaaaagagagcgaggtagaaaacggatactgcctatgcctactccatccctctttcagcaccaaggacagaacctctgagcggctgacccaagcaacgctcagtttagggtccctcccaaatcctctaaagaaaacggatacattcgaaagcagctatgaaacatgcactaaggtctaatagggaagctggaaaagcagcactcaagtaatttcaccttagaggcaaaaatgggtgatttctttctgttcatttcatagtttctgagtcctgagaaaggcaaagtttgctttgcttgggtatgtctgctgtcagtaaatggctgcaggagccgaagtggtaaactcctcggtctccagaaatcagaagaaaattttagggaagccccttggcatcacgcacctccctctgggctatggcatctctgagccagctgagtggccacctgaactacacctgtggggcagagaactccacaggtgccagccaggcccgcccacatgcctactatgccctctcctactgcgcgctcatcctggccatcgtcttcggcaatggcctggtgtgcatggctgtgctgaaggagcgggccctgcagactaccaccaactacttagtagtgagcctggctgtggcagacttgctggtggccaccttggtgatgccctgggtggtatacctggaggtgacaggtggagtctggaatttcagccgcatttgctgtgatgtttttgtcaccctggatgtcatgatgtgtacagccagcatccttaatctctgtgccatcagcatagacaggtacactgcagtggtcatgcccgttcactaccagcatggcacgggacagagctcctgtcggcgcgtggccctcatgatcacggccgtctgggtactggcctttgctgtgtcctgccctcttctgtttggctttaataccacaggggaccccactgtctgctccatctccaaccctgattttgtcatctactcttcagtggtgtccttctacctgccctttggagtgactgtccttgtctatgccagaatctatgtggtgctgaaacaaaggagacggaaaaggatcctcactcgacagaacagtcagtgcaacagtgtcaggcctggcttcccccagcaaaccctctctcctgacccggcacatctggagctgaagcgttactacagcatctgccaggacactgccttgggtggaccaggcttccaagaaagaggaggagagttgaaaagagaggagaagactcggaattccctgagtcccaccatagcgcccaagctcagcttagaagttcgaaaactcagcaatggcagattatcgacatctttgaagctggggcccctgcaacctcggggagtgccacttcgggagaagaaggcaacccaaatggtggccattgtgcttggggccttcattgtctgctggctgcccttcttcttgacccatgttctcaatacccactgccagacatgccacgtgtccccagagctttacagtgccacgacatggctgggctacgtgaatagcgccctcaaccctgtgatctataccaccttcaatatcgagttccggaaagccttcctcaagatcctgtcttgctgagggagc

SEQ ID NO: 4636 - protein, 400 aa, Homo sapiens; identical to SEQ ID NO: 455

SEQ ID NO: 4637 - DNA, 741 bp, Homo sapiens
agtgtgagcagcgagcgaatgagcaagagcgtgtgacaacagaggatgacaggctgtgaggttcgaagcaggaaggacacactccataagtctcggcactgctcatcagcccatgtgtcagcacgctcttgctgatgggagcagcggggagaaacgccatactgggaagtcactgctggtgtgggacaagttacaagatgcttctgggggaggaaaatgtgtatcatcaactcctcaggacagtgaagcctgctcagtctagacttacatgagagactactcaatgactctcacagaaaagagatcttcccaaggtgacatcttctcctcctaagccaataaggtcatcttactcacagtccacttccaggaactgaccccaaatggacagaatctacttatatcatggcacagctgtcaacttctcttgctaaagaagagaataacgctcacaaaattgccccagatggcggtgcaacatttttgggccaagtactacaactgaaaagcatgaacagagttttaccagcgggttacagctcttgtttaacttctagaaaactagtgacatgctcttggagaagcccctcttacagaaggccaaagaagctgagaaagcacagaggaaataatcaaggctcacctgggaaagcaacacagcttcaccatcattctctcgtccctgagaaaataaatcaaaacaaacaagtatattgagcactgggtgttcaaaaccacatg

SEQ ID NO: 4638 - protein, 103 aa, Homo sapiens
MAQLSTSLAKEENNAHKIAPDGGATFLGQVLQLKSMNRVLPAGYSSCLTSRKLVTCSWRSPSYRRPKKLRKHRGNNQGSPGKATQLHHHSLVPEKINQNKQVY

SEQ ID NO: 4639 - DNA, 3547 bp, Homo sapiens
acactccataagtctcggcactgctcatcagcccatgtgtcagcacgctcttgctgatgggagcagcggggagaaacgccatactgggaagtcactgctggtgtgggacaagttacaagatgcttctgggggaggaaaatgtgtatcatcaactcctcaggacagtgaagcctgctcagtctagacttacatgagagactactcaatgactctcacagaaaagagatcttcccaaggtgacatcttctcctcctaagccaataaggtcatcttactcacagtccacttccaggaactgaccccaaatggacagaatctacttatatcatggcacagctgtcaacttctcttgctaaagaagagaataacgctcacaaaattgccccagatggcggtgcaacatttttgggccaagtactacaactgaaaagcatgaacagagttttaccagcgggttacaggtttgtttatatgaaaattgcactccctgtttatttctaatagggaaaatatttctgatggtatatgattcctaaatgaaatgatgctaacaaatgttcacatattttgtgagggagaacacagcaaattgtaagatatgatctgcagatatcaaactcattttctttactggaaaacaggtctgactgcatggcacgattatgttgggaaaaatgcagctatagttctcttcatttggaacacgaacgtatatcacaaagctaaccagatcacattcattcagtagcaaacacaaatcaactgtggctagcaaatgtgtgtacaaaatacattgacatcaataccagtttggtgctttcttgtgatcaaatccagggaaatagaaatcagccatctaaaacttaaccacttgcaaaagagcatttatgttaccagcagtttaaaggaaatgaatgttcattgaagagcagcctatgctgaactctcatttttacatgtattcaactatatatatgctggctcatcattttaaaactattatcagccaggtgcagtggctcacgcctgtaagcattttgagaggctgaggtgggtggatcatgaggtcaggagatcgagaccatcctggctaacacggtgaaaccccatctctactaaaaatacaaaaaattagctaggcatggtggcgggtgcctgtagtcccagctacttgggaggttgaggcaagagaatcacttgaacccaggaggcagaggttgcagtgagccgacatgcgccactgcactccagcctgggtgacagagtgagactccatctcaaaaacaaacaaacaaacaagcaaacaaaaaaattatattatcatttattaaatgtgattaggtagctctggatccttggtctgttattttttttaaggcataataagaccaggacttaaaaaaaaacaccctgtaaaatgtacgctttttaagaaataatagaagtcacttttattctaacatgctatctttattgaaatattttaaacatttattgcaaaaacaataaatgctttttatttttcaaacataaacaatacttaagtataaaagtaaaaactgaacattgcatataaccctggtccatcccatttcctgcagaaaaccactattaacagttttatgcttatacttctagatgtagttttatttcctgaaactttctcttttactaaatactgtatcttagagatgttttgatatcagtacatacagagataccttattgtttcacagtatttcatagaacagatgtaccataacttacttccaactgataaacatttagattgttctcaacgtttcacacataaaaacaaaactgcagcgattattctttgcacgcacatctctgcataatataaaaacatttctgaggatttctagaattgaattaacatgtcaaaggatctacatgttttatattttaatacattgtattcatcaaaacatttttttctgagtttctcattagattagataagctgtgttttgttttgtttgtcttagctcttgtttaacttctagaaaactagtgacatgctcttggagaagcccctcttacagaaggccaaagaagctgagaaagcacagaggaaataatcaaggctcacctgggaaagcaacacagcttcaccatcattctctcgtccctgagaaaataaatcaaaacaaacaagtatattgagcactgggtgttcaaaaccacatgaagaattgttttttgttaaattaaagccttaagtagtcttaaatgatgtagcaaaatatgcccattcaatgtggttacttacctcctcagatatgaaaggattttatatggcagtatttttatattctacgttcttacaagtttcacatattccattacttaagcgttcatatttctcacaaagacttacattcctcaggagtacaatgttttagaacaaagaatgcattcaataaatctttacagagttaatctttacagaggacaattctcctgtagacaggagtgaatacatataaaggacaaataacgaggcaaggcctttgtacctttcagccatctgcaaaatgaagaactgaattcaaattttgataggcatggctttcagagaagtctgacagaagctatgcatgaatttctttttttctcttttacagttcccttcttacttaaaaaaaaaaaatcctgaagtggcttagtgatataaactatggagagaggtgtgggtggttcttttaagtgcacaataaccaacaggtctccctcctggaaaaattctcagatgctgaggaagatatttcctgtggccaaaagattttcttcactagtttttgtcaaaatgtcttttcgcagtttaagttctctgacgttgactgatgtgggcccacttgcaaaaggccttcccacatatctcatagagtttatctctggaaggaattcttcaatgccaagtgaggatgagctgcaggtcacagctttcctactgccactgaattcagagtgcttctcctcagtgtggctctctatgtatcaaagaaaaaaaaaaaaagaaaacccacaaattcccacatcatttgcactcaaaggttttttcctccagagtggatcttactctgttgggcaaaagcagagtggtagccaaagtcctttctatgttcaaggcactcataaggtttctctccagtgtgactccttgtatgtcgagtgagggaatagctgtagtaaaaacctttcccacattctttgcactcgtagggctttcctgcagtgtgggtcatactatgtcggaagaaaacagagcggtaggtgaaggtcttcccgcactcactgcacttgcagggcttctctccagtgtgaatcttcatgtgccgggttaaggaagagttgtagtaaaaggtttttccacattctttgcacccaaagagtttttctccagtgtgggtcacacgatgctggatgaagacagagtgatagctgaaggtctttccacactcgctgcactcatagggcttctctccagtgtgaatctggcggtagcacaggaggtgcgacctgc

SEQ ID NO: 4640 - protein, 49 aa, Homo sapiens
MCQHALADGSSGEKRHTGKSLLVWDKLQDASGGGKCVSSTPQDSEACSV

SEQ ID NO: 4641 - DNA, 2687 bp, Homo sapiens
gccggagccagcagtggcaacccgctggggtccctttccacactgtggaagctttgttctttcgctctttgcaataaatcttgctacttctcactctttgggtccacactgcttttaccagctgtaacactcaccgcaaacgtctgcagcttcactcctgaagccagcgagaccacgagcccaccgggaggaacgaacaactccagacgcgccgccttaagccttaagagctgtaacactcaccacgaaggtctgcagcttcactcctgagccagcgagaccacgaacccgccagaaggaagaaactccgaacacatccgaacatcagaaggaacaaactctagacgcgccaccttaagagctgtaacactcaccacaagggtccgcggcttcattcttgaagtcagtgagaccaagaacccaccaattccggacacagttggaaatgcagaagggcacttgagtttggctgcagtctcccacacggagaccttctggaggaagatgagccctaaacgcgatgggttggggacaggtgatggtctgcactcacaggttttacaggagcaggtctccacaggagacaatctccatgaatgtgactcccagggaccaagtaaagacactttggttcgtgaggggaagacctacaaatgcaaggaatgtgggagcgtgtttaacaaaaacagcctccttgttcgacatcagcagattcacactggggtgaagccttatgaatgccaggagtgtggaaaagcctttcctgaaaaggtcgacttcgttcgacccatgaggattcacacaggggagaagccctgtaagtgcgtggagtgcgggaaggtcttcaaccgcaggtcgcacctcctgtgctaccgccagattcacactggagagaagccctatgagtgcagcgagtgtggaaagaccttcagctatcactctgtcttcatccagcatcgtgtgacccacactggagaaaaactctttgggtgcaaagaatgtggaaaaaccttttactacaactcttccttaacccggcacatgaagattcacactggagagaagccctgcaagtgcagtgagtgcgggaagaccttcacctaccgctctgttttcttccgacatagtatgacccacactgcaggaaagccctacgagtgcaaagaatgtgggaaaggtttttactacagctattccctcactcgacatacaaggagtcacactggagagaaaccttatgagtgccttgaacatagaaaggactttggctaccactctgcttttgcccaacagagtaagatccactctggaggaaaaaacctttgagtgcaaatgatgtgggaatttgtgggttttctttttttttttttctttgatacatagagagccacactgaggagaagcactctgaattcagtggcagtaggaaagctgtgacctgcagctcatcctcacttggcattgaagaattccttccagagataaactctatgagatatgtgggaaggccttttgcaagtgggcccacatcagtcaacgtcagagaacttaaactgcgaaaagacattttgacaaaaactagtgaagaaaatcttttggccacaggaaatatcttcctcagcatctgagaatttttccaggagggagacctgttggttattgtgcacttaaaagaaccacccacacctctctccatagtttatatcactaagccacttcaggattttttttttttaagtaagaagggaactgtaaaagagaaaaaaagaaattcatgcatagcttctgtcagacttctctgaaagccatgcctatcaaaatttgaattcagttcttcattttgcagatggctgaaagggacgagagaatgatggtgaagctgtgttgctttcccaggtgagccttgattatttcctctgtgctttctcagcttctttggccttctgtaagaggggcttctccaagagcatgtcactagttttctagaagttaaacaagagctaagacaaacaaaacaaaacacagcttatctaatctaatgagaaactcagaaaaaaatgttttgatgaatacaatgtattaaaatataaaacatgtagatcctttgacatgttaattcaattctagaaatcctcagaaatgtttttatattatgcagagatgtgcgtgcaaagaataatcgctgcagttttgtttttatgtgtgaaacgttgagaacaatctaaatgtttatcagttggaagtaagttatggtacatctgttctatgaaatactgtgaaacaataaggtatctctgtatgtactgatatcaaaacatctctaagatacagtatttagtaaaagagaaagtttcaggaaataaaactacatctagaagtataagcataaaactgttaatagtggttttctgcaggaaatgggatggaccagggttatatgcaatgttcagtttttacttttatacttaagtattgtttatgtttgaaaaataaaaagcatttattgtttttgcaataaatgtttaaaatatttcaataaagatagcatgttagaataaaagtgacttctattatttcttaaaaagcgtacattttacagggtgtttttttttaagtcctggtcttattatgccttaaaaaaaataacagaccaaggatccagagctacctaatcacatttaataaat

SEQ ID NO: 4642 - protein, 273 aa, Homo sapiens; identical to SEQ ID NO: 460

SEQ ID NO: 4643 - DNA, 3706 bp, Homo sapiens
ggagcttggaggagagagcacgaccccctgctgctgccgcaggatgttgcccttgattctaggcagagacaggaggcatcagacagctgtgacagccatggagctcccctaccacttctgagccagagggaagactttggagaagcagaagcccaaagacactgctgggagattggtctgtgctctgggagaaccctaggttgtgtttcccgtgtacaagccaccgatcttgtggaaggtaccaccactcccagccccgcttggctgagggctgcgggccacaggttttcaggaccgtgcttgtggttggaggctgtggactcaagtgcggctggcccgggactttcacagggcgcagggcgggctaggggaaggcccagctgtgaactgataagggggttttacagtctaggccagcacttcttcccctttcacgggcaaacgtgacattctttttcagcacctgtactcacccagctgcatcaaggcggaccagacttgtccaactcacagccccaaaagtcagggcagaataaagcacagtggctgattttagcatttttaaaatagaaatgtgagtcagcacctgatggacctcacagatccctgctatgccacgagggctgctgactggccttaaaagctcagggtggcccggggagctctcagagcaggcctgcttctcacagctgagccgctcagtgctgggggctggtgttgagtgggtgggaaccagccaggttccccgtggagtctgtgcaggaggctctggagggtctggggtagattccctggggagagacttctgtcatttgctttcctccaaggcagcctcagggtctagctggcaagtggtcactttcctgcagaaacatgctatcctcctgttctatcagataaggagggcagaatgaagaggttgggtggaaccctggccttggagtctggagactaggattttactcttgacaaagcacattatatagatagggatattgtcctccaattttcctttcacttccttaattaatattgttatcaatactactgttgatgtattgaactcctgccatcttccaggcactgtgctgaacacttcaccaaacactagagaattaaatcctcacaaccctatgaaagaggtactcttattcctatatgcacatggggaaactgagccttcaggaggttgagaaagttttccaaggtcaccaaacaggatgactttggacccagtctgttaatcatccccctctagagcaccattgatcaaaatggacttgaccatattcctctttggactggttacttagcaaaaaacagaaaaattatttaacaattgtttaaaaccacctctaagtttctctggatatctcattatataagagaggtctcacctctttggctcccacccagctcaactatggaaacacaggctgtaaatttttatagcccaaatcctagtgtccaccactttctgtgctctagtcccactagctgctcttggccctgccactcctggctccccggccttagtgagtttgggaaacatccctccagttcaaccttggcaccttcccttggacacacattaggtattatttctccttcagctgaaggctttgtagctattgaaaggcaaggcatctcttgatgtgagccttgaaggacaggttgctttgggtaggcagagagaagctggtaaggcgtatattgtctaagggtctggaggtggggtataaggggtatacaagtcatagagttggggataggcagaacccagagaggggagaaaactggcctgagatagaagaccttgcaagggagaaggagggtaggagcctggatggtgtgaaatgctagaggtgcatggctggaatggagggggtggggcaccaggcttcagatgcttctgggtgcagatgcagattttcaggatgtacaacatggagcatccccaaggcaactgtgttgagagcctgcgaggcaggtgaatgtggatcttctaccccctctcctgactgagttcaccaaggaacaagctttgtaaactatttgaggctcccaggggctcacccttctttgcatttccagctctcatgaggtcattgtgcacaggaaagctctctcctctaatctcctctgatcctactgcaccagagaaatcaagccagaattcaataaagtctcagtccagataaacaagacaaaagaaataagattcgagtagaagatctccttcaagggaaagttgctgtgtttgtccaagacctttgtcccatccatgtatcatcccccaagtaaacacttcttgttcacctgttcattagatttcaagtgcagtccctggcctgtaagtccctacaatgataagcttctcttatcattgcacattcttcatcaggaggatgccagaggagctcagccaacagttcctcatcagtagcagattcttcagaatcttgggcactacacagatgcccttgagctctttgaataaaggctgatttttagaaaaaacattaagacagaacttaaaaacaatagattgactataatccaaagacgagtgtacctctaaccacaattttcatttatttttaaatgtttccttcatggcctttcttgtggctcaccctatgcagtttgtgtatttgttgacaactttatgtgtttttaatatggtttttgccaaacttggtttttccgagaccgtcttttctcagaggctcagttttaccgtcctatctgcagtcggctactttcagtggcagaagaggccacatctgcttcctgtaggccctctgggcagaagcatgcgctggtgtctcctcctgatctgggcccaggggctgaggcaggctcccctcgcctcaggaatgatgacaggcacaatagaaacaacggggaacatttctgcagagaaaggtggctctatcatcttacaatgtcacctctcctccaccacggcacaagtgacccaggtcaactgggagcagcaggaccagcttctggccatttgtaatgctgacttggggtggcacatctccccatccttcaaggatcgagtggccccaggtcccggcctgggcctcaccctccagtcgctgaccgtgaacgatacaggggagtacttctgcatctatcacacctaccctgatgggacgtacactgggagaatcttcctggaggtcctagaaagctcagtggctgagcacggtgccaggttccagattccattgcttggagccatggccgcgacgctggtggtcatctgcacagcagtcatcgtggtggtcgcgttgactagaaagaaagccctcagaatccattctgtggaaggtgacctcaggagaaaatcagctggacaggaggaatggagccccagtgctccctcacccccaggaagctgtgtccaggcagaagctgcacctgctgggctctgtggagagcagcggggagaggactgtgccgagctgcatgactacttcaatgtcctgagttacagaagcctgggtaactgcagcttcttcacagagactggttagcaaccagaggcatcttctggaagatacacttttgtctttgctattatagatgaatatataagcagctgtactctccatcagtgctgcgtgtgtgtgtgtgtgtgtatgtgtgtgtgtgttcagttgagtgaataaatgtcatcctcttctccatcttc

SEQ ID NO: 4644 - protein, 310 aa, Homo sapiens
MAFLVAHPMQFVYLLTTLCVFNMVFAKLGFSETVFSQRLSFTVLSAVGYFQWQKRPHLLPVGPLGRSMRWCLLLIWAQGLRQAPLASGMMTGTIETTGNISAEKGGSIILQCHLSSTTAQVTQVNWEQQDQLLAICNADLGWHISPSFKDRVAPGPGLGLTLQSLTVNDTGEYFCIYHTYPDGTYTGRIFLEVLESSVAEHGARFQIPLLGAMAATLVVICTAVIVVVALTRKKALRIHSVEGDLRRKSAGQEEWSPSAPSPPGSCVQAEAAPAGLCGEQRGEDCAELHDYFNVLSYRSLGNCSFFTETG

SEQ ID NO: 4645 - DNA, 2939 bp, Homo sapiens
cagtggcagaagaggccacatctgcttcctgtaggccctctgggcagaagcatgcgctggtgtctcctcctgatctgggcccaggggctgaggcaggctcccctcgcctcaggaatgatgacaggcacaatagaaacaacggggaacatttctgcagagaaaggtggctctatcatcttacaatgtcacctctcctccaccacggcacaagtgacccaggtcaactgggagcagcaggaccagcttctggccatttgtaatgctgacttggggtggcacatctccccatccttcaaggatcgagtggccccaggtcccggcctgggcctcaccctccagtcgctgaccgtgaacgatacaggggagtacttctgcatctatcacacctaccctgatgggacgtacactgggagaatcttcctggaggtcctagaaagctcagtggctgagcacggtgccaggttccagattccattgcttggagccatggccgcgacgctggtggtcatctgcacagcagtcatcgtggtggtcgcgttgactagaaagaaagccctcagaatccattctgtggaaggtgacctcaggagaaaatcagctggacaggaggaatggagccccagtgctccctcacccccaggaagctgtgtccaggcagaagctgcacctgctgggctctgtggagagcagcggggagaggactgtgccgagctgcatgactacttcaatgtcctgagttacagaagcctgggtaactgcagcttcttcacagagactggttagcaaccagaggcatcttctggaagatacacttttgtctttgctattatagatgaatatataagcagctgtactctccatcagtgctgcgtgtgtgtgtgtgtgtgtatgtgtgtgtgtgttcagttgagtgaataaatgtcatcctcttctccatcttcatttccttggccttttcgttctattccattttgcattatggcaggcctagggtgagtaacgtggatcttgatcataaatgcaaaattaaaaaatatcttgacctggttttaaatctggcagtttgagcagatcctatgtctctgagagacacattcctcataatggccagcattttgggctacaaggttttgtggttgatgatgaggatggcatgactgcagagccatcctcatctcattttttcacgtcattttcagtaactttcactcattcaaaggcaggttataagtaagtcctggtagcagcctctatggggagatttgagagtgactaaatcttggtatctgccctcaagaacttacagttaaatggggagacaatgttgtcatgaaaaggtattatagtaaggagagaaggagacatacacaggccttcaggaagagacgacagtttggggtgaggtagttggcataggcttatctgtgatgaagtggcctgggagcaccaaggggatgttgaggctagtctgggaggagcaggagttttgtctagggaacttgtaggaaattcttggagctgaaagtcccacaaagaaggccctggcaccaagggagtcagcaaacttcagattttattctctgggcaggcatttcaagtttccttttgctgtgacatactcatccattagacagcctgatacaggcctgtagcctcttccggccgtgtgtgctggggaagccccaggaaacgcacatgcccacacagggagccaagtcgtagcatttgggccttgatctaccttttctgcatcaatacactcttgagcctttgaaaaaagaacgtttcccactaaaaagaaaatgtggatttttaaaatagggactcttcctaggggaaaaaggggggctgggagtgatagagggtttaaaaaataaacaccttcaaactaacttcttcgaacccttttattcactccctgacgactttgtgctggggttggggtaactgaaccgcttatttctgtttaattgcattcaggctggatcttagaagacttttatccttccaccatctctctcagaggaatgagcggggaggttggatttactggtgactgattttctttcatgggccaaggaactgaaagagaatgtgaagcaaggttgtgtcttgcgcatggttaaaaataaagcattgtcctgcttcctaagacttagactggggttgacaattgttttagcaacaagacaattcaactatttctcctaggatttttattattattattttttcacttttctaccaaatgggttacataggaagaatgaactgaaatctgtccagagctccaagtcctttggaagaaagattagatgaacgtaaaaatgttgttgtttgctgtggcagtttacagcatttttcttgcaaaattagtgcaaatctgttggaaatagaacacaattcacaaattggaagtgaactaaaatgtaatgacgaaaagggagtagtgttttgatttggaggaggtgtatattcggcagaggttggactgagagttgggtgttatttaacataattatggtaattgggaaacatttataaacactattgggatggtgataaaatacaaaagggcctatagatgttagaaatgggtcaggttactgaaatgggattcaatttgaaaaaaatttttttaaatagaactcactgaactagattctcctctgagaaccagagaagaccatttcatagttggattcctggagacatgcgctatccaccacgtagccactttccacatgtggccatcaaccacttaagatggggttagtttaaatcaagatgtgctgttataattggtataagcataaaatcacactagattctggagatttaatatgaataataagaatactatttcagtagttttggtatattgtgtgtcaaaaatgataatattttggatgtattgggtgaaataaaatattaacatt

SEQ ID NO: 4646 - protein, 243 aa, Homo sapiens
MRWCLLLIWAQGLRQAPLASGMMTGTIETTGNISAEKGGSIILQCHLSSTTAQVTQVNWEQQDQLLAICNADLGWHISPSFKDRVAPGPGLGLTLQSLTVNDTGEYFCIYHTYPDGTYTGRIFLEVLESSVAEHGARFQIPLLGAMAATLVVICTAVIVVVALTRKKALRIHSVEGDLRRKSAGQEEWSPSAPSPPGSCVQAEAAPAGLCGEQRGEDCAELHDYFNVLSYRSLGNCSFFTETG

SEQ ID NO: 4647 - DNA, 1003 bp, Homo sapiens
tgcttcctgtaggccctctgggcagaagcatgcgctggtgtctcctcctgatctgggcccaggggctgaggcaggctcccctcgcctcaggaatgatgacaggcacaatagaaacaacggggaacatttctgcagagaaaggtggctctatcatcttacaatctatcacacctaccctgatgggacgtacactgggagaatcttcctggaggtcctagaaagctcagtggctgagcacggtgccaggttccagattccattgcttggagccatggccgcgacgctggtggtcatctgcacagcagtcatcgtggtggtcgcgttgactagaaaggtaatggctccggctgcacaccgcagtcatgggcacccccacgtctggcacccgggtcctttcaggttctctttccacccagagagagacccagatgtgatcttcccgagtgctctttgtgcctttttcctggcatttgttctgcctattagtgcagttatttatgctcttccgttgtccctctcatagggagggaccccctggacagctggacctgtttcctacccatcttgctgtcatttgtaactcctggtttctgcttatcccttaagccactgctctgagagtttaatttatctactatgattttgatgcatcgtgggcatctatatatgctagagctttctgcacattagctcttttgattattacaactctctggtagtgctaggttacccagcatgtctgtagaatgagaaataaacactccaaaaatgtagggttaggccaggagctgtggctcacacctcagaagccacagatatggctggtgctattgggaaagtcaatgatctgtaatattttcatttatgtgttggctatcacaatagacataattccacccactcgggagactgtggcgggaggatcacttgactctaggagttcaaggctgcagtgagctatgactgcactccagcgtgggcaacagagcaagactctatctct

SEQ ID NO: 4648 - protein, 62 aa, Homo sapiens
MRWCLLLIWAQGLRQAPLASGMMTGTIETTGNISAEKGGSIILQSITPTLMGRTLGESSWRS

SEQ ID NO: 4649 - DNA, 605 bp, Homo sapiens
taagaggtcgacagagtcaagtgcagtaaacagtacaagaaaatagagaatggaaagctgcctcactaagcttagtgaacaggaagtaacaagaagaaagccctcagaatccattctgtggaaggtgacctcaggagaaaatcagctggacaggaggaatggagccccagtgctccctcacccccaggaagctgtgtccaggcagaagctgcacctgctgggctctgtggagagcagcggggagaggactgtgccgagctgcatgactacttcaatgtcctgagttacagaagcctgggtaactgcagcttcttcacagagactggttagcaaccagaggcatcttctggaagatacacttttgtctttgctattatagatgaatatataagcagctgtactctccatcagtgctgcgtgtgtgtgtgtgtgtgtatgtgtgtgtgtgttcagttgagtgaataaatgtcatcctcttctccatcttcatttccttggccttttcgttctattccattttgcattatggcaggcctagggtgagtaacgtggatcttgatcataaatgcaaaattaaaaaatatcttgacctggttttaaatctg

SEQ ID NO: 4650 - protein, 77 aa, Homo sapiens
MESCLTKLSEQEVTRRKPSESILWKVTSGENQLDRRNGAPVLPHPQEAVSRQKLHLLGSVESSGERTVPSCMTTSMS

SEQ ID NO: 4651 - DNA, 1956 bp, Homo sapiens
gaggccatgaattgatgaattgcaagtttgtgccccatagctgcacagactgcctgaagttacatttagagactgaaatcactgcaccttaaaaacaaaagattgagctgcactgtattcctatctttgaccatcagtctgtgacctgccccttctctttacatgcagccgctctctgctccctgccccaatgaacatctgcactaggcccaagccttggagtaatttacctgaagagtgacaccattgattttgaaactactgaagaaacccaagacagctgaaaaccagaaggcatctgaggagaatgagattactcagccgggtggatccagcgccaagccgggccttccctgcctgaactttgaagctgttttgtctccagacccagccctcatccactcaacacattcactgacaaactctcacgctcacaccgggtcatctgattgtgagaagccccaccaatgcagcatctgttggcgctccttctccttaaaggattaccttatcaagcacatggtgacacacacaggagtgagggcataccagtgtagtatctgcaacaagcgcttcacccagaagagctccctcaacgtgcacatgcgcctccaccggggagagaagtcctacgagtgctacatctgcaaaaagaagttctctcacaagaccctcctggagcgacacgtggccctgcacagtgccagcaatgggaccccccctgcaggcacacccccaggtgcccgcgctggccccccaggcgtggtggcctgcacggaggggaccacttacgtctgctccgtctgcccagcaaagtttgaccaaatcgagcagttcaacgaccacatgaggatgcatgtgtctgacggataagtagtatctttctctctttcttatgaacaaaacaaaacaacaacaaaaaacaaacaaacaaaaaagctatggcactagaatttaagaaatgttttggtttcatttttactttctgtttttgtttttgtttcgtttcattttgtactacatgaagaactgttttttgcctgctggtacattacatttccggaggcttgggtgaataatagttttcccagtctccctcggatggtggccttaaggcctggtagtgcttcaagaggtccactggttggatctctagctactggcctctaaatacaacccttctttacaaaaaaatcttttaaaaaaaagtaaaaaaaaaaaaaaaatttccacttgtgaagagcactacaaaaaatatataacaaaatctaaaaggcctactgtctttaagtacaccgcttgcagtgtttcagtggacattttcacaattctggccgcttggacttcacagtaaccagttaaaactgtggaatatcacttctggttgaaaacccagaggaaaggccctgctgttttccacctaccacgttgtctgatttcataaaagggctgtgggggtgggaagggcagtgggttcggtggtgtgggaaagaaagacgaatggcaggcttcttccccagattctgcccgggtccacacaccctggcccaccttctccatatccccctcttgcagcagaagccaggaagacttggacaagcaacaagcaacagtggctatcgtatttattcagtgtcttcgctgagccacagcctcagcacaatcaagagggactttcatgaaaggcaggaatgcagataaaacaaagatatcagaaatttgcacctatgtttctaggtacaagagaaggattatttccaacaatctttgcaaaaaaaaaaaaagtgtcaggatatattcttgtggaagagaaaaagaaaaagaaatggagggtggggggaacaataaaaagttcttgaggcttttttaattcaaaattttatagaggggcaaaagtgacgtttaccagatagaatgctgatttttttaatatatttacaacagtatttgtgtaaa

SEQ ID NO: 4652 - protein, 117 aa, Homo sapiens
MVTHTGVRAYQCSICNKRFTQKSSLNVHMRLHRGEKSYECYICKKKFSHKTLLERHVALHSASNGTPPAGTPPGARAGPPGVVACTEGTTYVCSVCPAKFDQIEQFNDHMRMHVSDG

SEQ ID NO: 4653 - DNA, 3713 bp, Homo sapiens
gaagaagtaggggcggggggaagtttaggagttgaggaaagaagattaaagagcgcgaggagacaaataaaaagaagtgttaagaattgcctttgggactctgaaggctgaagaattgatgaattgcaagtttgtgccccatagctgcacagactgcctgaagttacatttagagactgaaatcactgcaccttaaaaacaaaagattgagctgcactgtattcctaatgtttcatcattactaacaggatattcctcatgacattgctgtctgatctttgaccatcagtctgtgacctgccccttctctttacatgcagccgctctctgctccctgccccaatgaacatctgcactaggcccaagccttggagtaatttacctgaagagtgacaccattgattttgaaactactgaagaaacccaagacagctgaaaaccagaaggcatctgaggagaatgagattactcagccgggtggatccagcgccaagccgggccttccctgcctgaactttgaagctgttttgtctccagacccagccctcatccactcaacacattcactgacaaactctcacgctcacaccgggtcatctgattgtgacatcagttgcaaggggatgaccgagcgcattcacagcatcaaccttcacaacttcagcaattccgtgctcgagaccctcaacgagcagcgcaaccgtggccacttctgtgacgtaacggtgcgcatccacgggagcatgctgcgcgcacaccgctgcgtgctggcagccggcagccccttcttccaggacaaactgctgcttggctacagcgacatcgagatcccgtcggtggtgtcagtgcagtcagtgcaaaagctcattgacttcatgtacagcggcgtgctacgggtctcgcagtcggaagctctgcagatcctcacggccgccagcatcctgcagatcaaaacagtcatcgacgagtgcacgcgcatcgtgtcacagaacgtgggcgatgtgttcccggggatccaggactcgggccaggacacgccgcggggcactcccgagtcaggcacgtcaggccagagcagcgacacggagtcgggctacctgcagagccacccacagcacagcgtggacaggatctactcggcactctacgcgtgctccatgcagaatggcagcggcgagcgctctttttacagcggcgcagtggtcagccaccacgagactgcgctcggcctgccccgcgaccaccacatggaagaccccagctggatcacacgcatccatgagcgctcgcagcagatggagcgctacctgtccaccacccccgagaccacgcactgccgcaagcagccccggcctgtgcgcatccagaccctagtgggcaacatccacatcaagcaggagatggaggacgattacgactactacgggcagcaaagggtgcagatcctggaacgcaacgaatccgaggagtgcacggaagacacagaccaggccgagggcaccgagagtgagcccaaaggtgaaagcttcgactcgggcgtcagctcctccataggcaccgagcctgactcggtggagcagcagtttgggcctggggcggcgcgggacagccaggctgaacccacccaacccgagcaggctgcagaagcccccgctgagggtggtccgcagacaaaccagctagaaacaggtgcttcctctccggagagaagcaatgaagtggagatggacagcactgttatcactgtcagcaacagctccgacaagagcgtcctacaacagccttcggtcaacacgtccatcgggcagccattgccaagtacccagctctacttacgccagacagaaaccctcaccagcaacctgaggatgcctctgaccttgaccagcaacacgcaggtcattggcacagctggcaacacctacctgccagccctcttcactacccagcccgcgggcagtggccccaagcctttcctcttcagcctgccacagcccctggcaggccagcagacccagtttgtgacagtgtcccagcccggtctgtcgacctttactgcacagctgccagcgccacagcccctggcctcatccgcaggccacagcacagccagtgggcaaggcgaaaaaaagccttatgagtgcactctctgcaacaagactttcaccgccaaacagaactacgtcaagcacatgttcgtacacacaggtgagaagccccaccaatgcagcatctgttggcgctccttctccttaaaggattaccttatcaagcacatggtgacacacacaggagtgagggcataccagtgtagtatctgcaacaagcgcttcacccagaagagctccctcaacgtgcacatgcgcctccaccggggagagaagtcctacgagtgctacatctgcaaaaagaagttctctcacaagaccctcctggagcgacacgtggccctgcacagtgccagcaatgggaccccccctgcaggcacacccccaggtgcccgcgctggccccccaggcgtggtggcctgcacggaggggaccacttacgtctgctccgtctgcccagcaaagtttgaccaaatcgagcagttcaacgaccacatgaggatgcatgtgtctgacggataagtagtatctttctctctttcttatgaacaaaacaaaacaacaacaaaaaacaaacaaacaaaaaagctatggcactagaatttaagaaatgttttggtttcatttttactttctgtttttgtttttgtttcgtttcattttgtactacatgaagaactgttttttgcctgctggtacattacatttccggaggcttgggtgaataatagttttcccagtctccctcggatggtggccttaaggcctggtagtgcttcaagaggtccactggttggatctctagctactggcctctaaatacaacccttctttacaaaaaaatcttttaaaaaaaagtaaaaaaaaaaaaaaaatttccacttgtgaagagcactacaaaaaatatataacaaaatctaaaaggcctactgtctttaagtacaccgcttgcagtgtttcagtggacattttcacaattctggccgcttggacttcacagtaaccagttaaaactgtggaatatcacttctggttgaaaacccagaggaaaggccctgctgttttccacctaccacgttgtctgatttcataaaagggctgtgggggtgggaagggcagtgggttcggtggtgtgggaaagaaagacgaatggcaggcttcttccccagattctgcccgggtccacacaccctggcccaccttctccatatccccctcttgcagcagaagccaggaagacttggacaagcaacaagcaacagtggctatcgtatttattcagtgtcttcgctgagccacagcctcagcacaatcaagagggactttcatgaaaggcaggaatgcagataaaacaaagatatcagaaatttgcacctatgtttctaggtacaagagaaggattatttccaacaatctttgcaaaaaaaaaaaaagtgtcaggatatattcttgtggaagagaaaaagaaaaagaaatggagggtggggggaacaataaaaagttcttgaggcttttttaattcaaaattttatagaggggcaaaagtgacgtttaccagatagaatgctgatttttttaatatatttacaacagtatttgtgtaaa

SEQ ID NO: 4654 - protein, 668 aa, Homo sapiens
MTERIHSINLHNFSNSVLETLNEQRNRGHFCDVTVRIHGSMLRAHRCVLAAGSPFFQDKLLLGYSDIEIPSVVSVQSVQKLIDFMYSGVLRVSQSEALQILTAASILQIKTVIDECTRIVSQNVGDVFPGIQDSGQDTPRGTPESGTSGQSSDTESGYLQSHPQHSVDRIYSALYACSMQNGSGERSFYSGAVVSHHETALGLPRDHHMEDPSWITRIHERSQQMERYLSTTPETTHCRKQPRPVRIQTLVGNIHIKQEMEDDYDYYGQQRVQILERNESEECTEDTDQAEGTESEPKGESFDSGVSSSIGTEPDSVEQQFGPGAARDSQAEPTQPEQAAEAPAEGGPQTNQLETGASSPERSNEVEMDSTVITVSNSSDKSVLQQPSVNTSIGQPLPSTQLYLRQTETLTSNLRMPLTLTSNTQVIGTAGNTYLPALFTTQPAGSGPKPFLFSLPQPLAGQQTQFVTVSQPGLSTFTAQLPAPQPLASSAGHSTASGQGEKKPYECTLCNKTFTAKQNYVKHMFVHTGEKPHQCSICWRSFSLKDYLIKHMVTHTGVRAYQCSICNKRFTQKSSLNVHMRLHRGEKSYECYICKKKFSHKTLLERHVALHSASNGTPPAGTPPGARAGPPGVVACTEGTTYVCSVCPAKFDQIEQFNDHMRMHVSDG

SEQ ID NO: 4655 - DNA, 2784 bp, Homo sapiens
gcagggagcttaacagccaggcctggacaccctcaagagactgtgtgctgattctcagtcgtcactccttggatcaggaaccatagtcctgatctttgaccatcagtctgtgacctgccccttctctttacatgcagccgctctctgctccctgccccaatgaacatctgcactaggcccaagccttggagtaatttacctgaagagtgacaccattgattttgaaactactgaagaaacccaagacagctgaaaaccagaaggcatctgaggagaatgagattactcagccgggtggatccagcgccaagccgggccttccctgcctgaactttgaagctgttttgtctccagacccagccctcatccactcaacacattcactgacaaactctcacgctcacaccgggtcatctgattgtgacatcagttgcaaggggatgaccgagcgcattcacagcatcaaccttcacaacttcagcaattccgtgctcgagaccctcaacgagcagcgcaaccgtggccacttctgtgacgtaacggtgcgcatccacgggagcatgctgcgcgcacaccgctgcgtgctggcagccggcagccccttcttccaggacaaactgctgcttggctacagcgacatcgagatcccgtcggtggtgtcagtgcagtcagtgcaaaagctcattgacttcatgtacagcggcgtgctacgggtctcgcagtcggaagctctgcagatcctcacggccgccagcatcctgcagatcaaaacagtcatcgacgagtgcacgcgcatcgtgtcacagaacgtgggcgatgtgttcccggggatccaggactcgggccaggacacgccgcggggcactcccgagtcaggcacgtcaggccagagcagcgacacggagtcgggctacctgcagagccacccacagcacagcgtggacaggatctactcggcactctacgcgtgctccatgcagaatggcagcggcgagcgctctttttacagcggcgcagtggtcagccaccacgagactgcgctcggcctgccccgcgaccaccacatggaagaccccagctggatcacacgcatccatgagcgctcgcagcagatggagcgctacctgtccaccacccccgagaccacgcactgccgcaagcagccccggcctgtgcgcatccagaccctagtgggcaacatccacatcaagcaggagatggaggacgattacgactactacgggcagcaaagggtgcagatcctggaacgcaacgaatccgaggagtgcacggaagacacagaccaggccgagggcaccgagagtgagcccaaaggtgaaagcttcgactcgggcgtcagctcctccataggcaccgagcctgactcggtggagcagcagtttgggcctggggcggcgcgggacagccaggctgaacccacccaacccgagcaggctgcagaagcccccgctgagggtggtccgcagacaaaccagctagaaacaggtgcttcctctccggagagaagcaatgaagtggagatggacagcactgttatcactgtcagcaacagctccgacaagagcgtcctacaacagccttcggtcaacacgtccatcgggcagccattgccaagtacccagctctacttacgccagacagaaaccctcaccagcaacctgaggatgcctctgaccttgaccagcaacacgcaggtcattggcacagctggcaacacctacctgccagccctcttcactacccagcccgcgggcagtggccccaagcctttcctcttcagcctgccacagcccctggcaggccagcagacccagtttgtgacagtgtcccagcccggtctgtcgacctttactgcacagctgccagcgccacagcccctggcctcatccgcaggccacagcacagccagtgggcaaggcgaaaaaaagccttatgagtgcactctctgcaacaagactttcaccgccaaacagaactacgtcaagcacatgttcgtacacacaggtgagaagccccaccaatgcagcatctgttggcgctccttctccttaaaggattaccttatcaagcacatggtgacacacacaggagtgagggcataccagtgtagtatctgcaacaagcgcttcacccagaagagctccctcaacgtgcacatgcgcctccaccggggagagaagtcctacgagtgctacatctgcaaaaagaagttctctcacaagaccctcctggagcgacacgtggccctgcacagtgccagcaatgggaccccccctgcaggcacacccccaggtgcccgcgctggccccccaggcgtggtggcctgcacggaggggaccacttacgtctgctccgtctgcccagcaaagtttgaccaaatcgagcagttcaacgaccacatgaggatgcatgtgtctgacggataagtagtatctttctctctttcttatgaacaaaacaaaacaacaacaaaaaacaaacaaacaaaaaagctatggcactagaatttaagaaatgttttggtttcatttttactttctgtttttgtttttgtttcgtttcattttgtactacatgaagaactgttttttgcctgctggtacattacatttccggaggcttgggtgaataatagttttcccagtctccctcggatggtggccttaaggcctggtagtgcttcaagaggtccactggttggatctctagctactggcctctaaatacaacccttctttacaaaaaaatcttttaaaaaaaagt

SEQ ID NO: 4656 - protein, 668 aa, Homo sapiens; identical to SEQ ID NO: 4654

SEQ ID NO: 4657 - DNA, 2832 bp, Homo sapiens
acatttcaaaaaaaatacatagactgatgtttcagacttgtgcagcataagcctacagggtacgaagaatgaactctgagaatgtttggagaatgtttcatcattactaacaggatattcctcatgacattgctgtctgatctttgaccatcagtctgtgacctgccccttctctttacatgcagccgctctctgctccctgccccaatgaacatctgcactaggcccaagccttggagtaatttacctgaagagtgacaccattgattttgaaactactgaagaaacccaagacagctgaaaaccagaaggcatctgaggagaatgagattactcagccgggtggatccagcgccaagccgggccttccctgcctgaactttgaagctgttttgtctccagacccagccctcatccactcaacacattcactgacaaactctcacgctcacaccgggtcatctgattgtgacatcagttgcaaggggatgaccgagcgcattcacagcatcaaccttcacaacttcagcaattccgtgctcgagaccctcaacgagcagcgcaaccgtggccacttctgtgacgtaacggtgcgcatccacgggagcatgctgcgcgcacaccgctgcgtgctggcagccggcagccccttcttccaggacaaactgctgcttggctacagcgacatcgagatcccgtcggtggtgtcagtgcagtcagtgcaaaagctcattgacttcatgtacagcggcgtgctacgggtctcgcagtcggaagctctgcagatcctcacggccgccagcatcctgcagatcaaaacagtcatcgacgagtgcacgcgcatcgtgtcacagaacgtgggcgatgtgttcccggggatccaggactcgggccaggacacgccgcggggcactcccgagtcaggcacgtcaggccagagcagcgacacggagtcgggctacctgcagagccacccacagcacagcgtggacaggatctactcggcactctacgcgtgctccatgcagaatggcagcggcgagcgctctttttacagcggcgcagtggtcagccaccacgagactgcgctcggcctgccccgcgaccaccacatggaagaccccagctggatcacacgcatccatgagcgctcgcagcagatggagcgctacctgtccaccacccccgagaccacgcactgccgcaagcagccccggcctgtgcgcatccagaccctagtgggcaacatccacatcaagcaggagatggaggacgattacgactactacgggcagcaaagggtgcagatcctggaacgcaacgaatccgaggagtgcacggaagacacagaccaggccgagggcaccgagagtgagcccaaaggtgaaagcttcgactcgggcgtcagctcctccataggcaccgagcctgactcggtggagcagcagtttgggcctggggcggcgcgggacagccaggctgaacccacccaacccgagcaggctgcagaagcccccgctgagggtggtccgcagacaaaccagctagaaacaggtgcttcctctccggagagaagcaatgaagtggagatggacagcactgttatcactgtcagcaacagctccgacaagagcgtcctacaacagccttcggtcaacacgtccatcgggcagccattgccaagtacccagctctacttacgccagacagaaaccctcaccagcaacctgaggatgcctctgaccttgaccagcaacacgcaggtcattggcacagctggcaacacctacctgccagccctcttcactacccagcccgcgggcagtggccccaagcctttcctcttcagcctgccacagcccctggcaggccagcagacccagtttgtgacagtgtcccagcccggtctgtcgacctttactgcacagctgccagcgccacagcccctggcctcatccgcaggccacagcacagccagtgggcaaggcgaaaaaaagccttatgagtgcactctctgcaacaagactttcaccgccaaacagaactacgtcaagcacatgttcgtacacacaggtgagaagccccaccaatgcagcatctgttggcgctccttctccttaaaggattaccttatcaagcacatggtgacacacacaggagtgagggcataccagtgtagtatctgcaacaagcgcttcacccagaagagctccctcaacgtgcacatgcgcctccaccggggagagaagtcctacgagtgctacatctgcaaaaagaagttctctcacaagaccctcctggagcgacacgtggccctgcacagtgccagcaatgggaccccccctgcaggcacacccccaggtgcccgcgctggccccccaggcgtggtggcctgcacggaggggaccacttacgtctgctccgtctgcccagcaaagtttgaccaaatcgagcagttcaacgaccacatgaggatgcatgtgtctgacggataagtagtatctttctctctttcttatgaacaaaacaaaacaacaacaaaaaacaaacaaacaaaaaagctatggcactagaatttaagaaatgttttggtttcatttttactttctgtttttgtttttgtttcgtttcattttgtactacatgaagaactgttttttgcctgctggtacattacatttccggaggcttgggtgaataatagttttcccagtctccctcggatggtggccttaaggcctggtagtgcttcaagaggtccactggttggatctctagctactggcctctaaatacaacccttctttacaaaaaaatcttttaaaaaaaagt

SEQ ID NO: 4658 - protein, 668 aa, Homo sapiens; identical to SEQ ID NO: 4654

SEQ ID NO: 4659 - DNA, 550 bp, Homo sapiens
gcagccagagagggagtcggtgtggacgcgaggagccgggcgcttagaacagaggcttgcacaggtggagatgtggaagtctgtagtgggccatgatgtgtctgtttccgtggagacccagggtgatgattgggacacagatcctgactttgtgaatgacatctctgaaaaggagcaacgatggggagccaagaccatcgaggggtctggacacttccctctcctgcttcattaagggcttggggcagagacagcatggggaaggaggtccccttccccaagagtcctctctatcctggatgagctcatgaacatttctcttgtgttcctgactccttcccaatgaacacctctctgccaccccaagctctgctctcctcctctgtgagctctgggcttcccagtttgtttacccgggaaagtacgtctagattgtgtggtttgcctcattgtgctatttgcccactttccttccctgaagaaatatctgaaccttctttctgttcagtcctaaaattcgaaataaagtgagactatggttcacctgtat

SEQ ID NO: 4660 - protein, 54 aa, Homo sapiens
MWKSVVGHDVSVSVETQGDDWDTDPDFVNDISEKEQRWGAKTIEGSGHFPLLLH

SEQ ID NO: 4661 - DNA, 791 bp, Homo sapiens
gctcagtttctcactccgaagtggcagcagccagagagggagtcggtgtggacgcgaggagccgggcgcttagaacagaggcttgcacaggtggagatgtggaagtctgtagtgggccatgatgtgtctgtttccgtggagacccagggtgatgattgggacacagatcctgactttgtgaatgacatctctgaaaaggagcaacgatggggagccaagaccatcgaggggtctggacgcacagaacacatcaacatccaccagctgaggaacaaagtatcagaggagcatgatgttctcaggaagaaagagatggagtcagggcccaaagcatcccatggctatggaggtcggtttggagtagaaagagaccgaatggacaagagtgcagtgggccatgagtatgttgccgaggtggagaagcactcttctcagacggatgctgccaaaggctttgggggcaagtacggagttgagagggacagggcagacaagcatggggaaggaggtccccttccccaagagtcctctctatcctggatgagctcatgaacatttctcttgtgttcctgactccttcccaatgaacacctctctgccaccccaagctctgctctcctcctctgtgagctctgggcttcccagtttgtttacccgggaaagtacgtctagattgtgtggtttgcctcattgtgctatttgcccactttccttccctgaagaaatatctgaaccttctttctgttcagtcctaaaattcgaaataaagtgagactatggttcacctgtat

SEQ ID NO: 4662 - protein, 151 aa, Homo sapiens
MWKSVVGHDVSVSVETQGDDWDTDPDFVNDISEKEQRWGAKTIEGSGRTEHINIHQLRNKVSEEHDVLRKKEMESGPKASHGYGGRFGVERDRMDKSAVGHEYVAEVEKHSSQTDAAKGFGGKYGVERDRADKHGEGGPLPQESSLSWMSS

SEQ ID NO: 4663 - DNA, 2037 bp, Homo sapiens
gacgaaaacctgaatacggaactgaagcagcagctcagtttctcactccgaagtggcagcagccagagagggagtcggtgtggacgcgaggagccgggcgcttagaacagaggcttgcacaggtggagatgtggaagtctgtagtgggccatgatgtgtctgtttccgtggagacccagggtgatgattgggacacagatcctgactttgtgaatgacatctctgaaaaggagcaacgatggggagccaagaccatcgaggggtctggacgcacagaacacatcaacatccaccagctgaggaacaaagtatcagaggagcatgatgttctcaggaagaaagagatggagtcagggcccaaagcatcccatggctatggaggtcggtttggagtagaaagagaccgaatggacaagagtgcagtgggccatgagtatgttgccgaggtggagaagcactcttctcagacggatgctgccaaaggctttgggggcaagtacggagttgagagggacagggcagacaagtcagcagtcggctttgattataaaggagaagtggagaagcacacatctcagaaagattactctcgtggctttggtggccggtacggggtggagaaggataaatgggacaaagcagctctgggatatgactacaagggagagacggagaaacacgagtcccagagagattatgccaagggctttggtggccagtatggaatccagaaggaccgagtggataagagcgctgtcggcttcaatgaaatggaggccccgaccacagcttataagaagacgacgcccatagaagccgcttctagtggtacccgtgggctgaaggcgaaatttgagtccatggctgaggagaagaggaagcgagaggaagaggagaaggcacagcaggtggccaggaggcaacaggagcgaaaggctgtgacaaagaggagccctgaggctccacagccagtgatagctatggaagagccagcagtaccggccccactgcccaagaaaatctcctcagaggcctggcctccagttgggactcctccatcatcagagtctgagcctgtgagaaccagcagggaacacccagtgcccttgctgcccattaggcagactctcccggaggacaatgaggagcccccagctctgccccctaggactctggaaggcctccaggtggaggaagagccagtgtacgaagcagagcctgagcctgagcccgagcctgagcccgagcctgagaatgactatgaggacgttgaggagatggacaggcatgagcaggaggatgaaccagagggggactatgaggaggtgctcgagcctgaagattcttctttttcttctgctctggctggatcatcaggctgcccggctggggctggggctggggctgtggctctggggatctcagctgtggctgtatatgattaccaaggagagggaagtgatgagctttcctttgatccggacgacgtaatcactgacattgagatggtggacgagggctggtggcggggacgttgccatggccactttggactcttccctgcaaattatgtcaagcttctggagtgactagagctcactgtctactgcaactgtgatttcccatgtccaaagtggctctgcctccaccccctccctattcctgctgcaaatgtctaaccagatgaggttctggacagacttccctctcctgcttcattaagggcttggggcagagacagcatggggaaggaggtccccttccccaagagtcctctctatcctggatgagctcatgaacatttctcttgtgttcctgactccttcccaatgaacacctctctgccaccccaagctctgctctcctcctctgtgagctctgggcttcccagtttgtttacccgggaaagtacgtctagattgtgtggtttgcctcattgtgctatttgcccactttccttccctgaagaaatatctgaaccttctttctgttcagtcctaaaattcgaaataaagtgagactatggttcacctgtat

SEQ ID NO: 4664 - protein, 486 aa, Homo sapiens
MWKSVVGHDVSVSVETQGDDWDTDPDFVNDISEKEQRWGAKTIEGSGRTEHINIHQLRNKVSEEHDVLRKKEMESGPKASHGYGGRFGVERDRMDKSAVGHEYVAEVEKHSSQTDAAKGFGGKYGVERDRADKSAVGFDYKGEVEKHTSQKDYSRGFGGRYGVEKDKWDKAALGYDYKGETEKHESQRDYAKGFGGQYGIQKDRVDKSAVGFNEMEAPTTAYKKTTPIEAASSGTRGLKAKFESMAEEKRKREEEEKAQQVARRQQERKAVTKRSPEAPQPVIAMEEPAVPAPLPKKISSEAWPPVGTPPSSESEPVRTSREHPVPLLPIRQTLPEDNEEPPALPPRTLEGLQVEEEPVYEAEPEPEPEPEPEPENDYEDVEEMDRHEQEDEPEGDYEEVLEPEDSSFSSALAGSSGCPAGAGAGAVALGISAVAVYDYQGEGSDELSFDPDDVITDIEMVDEGWWRGRCHGHFGLFPANYVKLLE

SEQ ID NO: 4665 - DNA, 323 bp, Homo sapiens
agccagagagggagtcggtgtggacgcgaggagccgggcgcttagaacagaggcttgcacaggtggagatgtggaagtctgtagtgggccatgatgttgttcctgactccttcccaatgaacacctctctgccaccccaagctctgctctcctcctctgtgagctctgggcttcccagtttgtttacccgggaaagtacgtctagattgtgtggtttgcctcattgtgctatttgcccactttccttccctgaagaaatatctgaaccttctttctgttcagtcctaaaattcgaaataaagtgagactatggttcacctgta

SEQ ID NO: 4666 - protein, 78 aa, Homo sapiens [sequence omitted]

SEQ ID NO: 4667 - DNA, 655 bp, Homo sapiens
gctcagtttctcactccgaagtggcagcagccagagagggagtcggtgtggacgcgaggagccgggcgcttagaacagaggcttgcacaggtggagatgtggaagtctgtagtgggccatgatgtgtctgtttccgtggagacccagggtgatgattgggacacagatcctgactttgtgaatgacatctctgaaaaggagcaacgatggggagccaagaccatcgaggggtctggacgcacagaacacatcaacatccaccagctgaggaacaaagtatcagaggagcatgatgttctcaggaagaaagagatggagtcagggcccaaagcatcccatggctatggaggtcggtttggagtagaaagagaccgaatggacaagagtgcagtgggccatgagtatgttgccgaggtggagaagcactcttctcagacggatgctgccaaaggctttgggggcaagtacggagttgagagggacagggcagacaaggtaagtgaccactgaagagccagtgtacgaagcagagcctgagcctgagcccgagcctgagcccgagcctgagaatgactatgaggacgttgaggagatggacaggcatgagcaggaggatgaaccagagggggactatgaggaggtgctcgagcctgaa

SEQ ID NO: 4668 - protein, 137 aa, Homo sapiens
MWKSVVGHDVSVSVETQGDDWDTDPDFVNDISEKEQRWGAKTIEGSGRTEHINIHQLRNKVSEEHDVLRKKEMESGPKASHGYGGRFGVERDRMDKSAVGHEYVAEVEKHSSQTDAAKGFGGKYGVERDRADKVSDH

SEQ ID NO: 4669 - DNA, 1015 bp, Homo sapiens
gctcagtttctcactccgaagtggcagcagccagagagggagtcggtgtggacgcgaggagccgggcgcttagaacagaggcttgcacaggtggagatgtggaagtctgtagtgggccatgatgtgtctgtttccgtggagacccagggtgatgattgggacacagatcctgactttgtgaatgacatctctgaaaaggagcaacgatggggagccaagaccatcgaggggtctggacgcacagaacacatcaacatccaccagctgaggaacaaagtatcagaggagcatgatgttctcaggaagaaagagatggagtcagggcccaaagcatcccatggctatggaggtcggtttggagtagaaagagaccgaatggacaagagtgcagtgggccatgagtatgttgccgaggtggagaagcactcttctcagacggatgctgccaaaggctttgggggcaagtacggagttgagagggacagggcagacaaggtaagtgaccactctctctcccaaccacccacctccagtcctgtgaaaattgcccacgatcacccctggatggaggcacatgcttctttgttgaaagacaggacagtggatgctgtgaggacctgacaccgtcacagggatacctccctcagcaagttccttggtgccaatgttggaagccacatgctgagctgaaagacagtgattcaaataggagaagactctcaaactgtgtgtttgaatgaataattcctcaagccactggtttttattatactcatatgcatgaagatagaacagagaatcatctaagctcttcttttggcttaacatcaaaaccttataaatactcatgccgtttaggaaaacagattcatcagtttaaatattattgccatagcagcagataatcaagttaaacaactaattagggttactatttacagaatttagcatcaatctatgaagtccagatatctttaaagactcctttgtacaaaacaaaacaaaatgttgtttt

SEQ ID NO: 4670 - protein, 174 aa, Homo sapiens
MWKSVVGHDVSVSVETQGDDWDTDPDFVNDISEKEQRWGAKTIEGSGRTEHINIHQLRNKVSEEHDVLRKKEMESGPKASHGYGGRFGVERDRMDKSAVGHEYVAEVEKHSSQTDAAKGFGGKYGVERDRADKVSDHSLSQPPTSSPVKIAHDHPWMEAHASLLKDRTVDAVRT

SEQ ID NO: 4671 - DNA, 502 bp, Homo sapiens
gggagtcggtgtggacgcgaggagccgggcgcttagaacagaggcttgcacaggtggagatgtggaagtctgtagtgggccatgatgtgtctgtttccgtggagacccagggtgatgattgggacacagatcctgactttgtgaatgacatctctgaaaaggagcaacgatggggagccaagaccatcgaggggtctggacgcacagaacacatcaagtaggtgccgaaaggactggagaaaaggaagggggttatgggaagagcccaaagaaaactcggagacttgggggaagattttaaaaagtgtcagtggatgaccacattgcacaagcaacatactgtgaaagcctggcacaagtttctacaactggatgacaataccacattgtttaatcagaaataaatggtttcggccgggcgtggtggctcacgcttgtaatcccaaaactttggaaggccgagcgaggaagatcacttgaggtcaggagttcaagaccagca

SEQ ID NO: 4672 - protein, 57 aa, Homo sapiens
MTSLKRSNDGEPRPSRGLDAQNTSSRCRKDWRKGRGLWEEPKENSETWGKILKSVSG

SEQ ID NO: 4673 - DNA, 874 bp, Homo sapiens
actccgaagtggcagcagccagagagggagtcggtgtggacgcgaggagccgggcgcttagaacagaggcttgcacaggtggagatgtggaagtctgtagtgggccatgatgtgtctgtttccgtggagacccagggtgatgattgggacacagatcctgactttgtgaatgacatctctgaaaaggagcaacgatggggagccaagaccatcgaggggtctggacgcacagaacacatcaagtaggtgccgaaaggactggagaaaaggaagggggttatgggaagagcccaaagaaaactcggagacttgggggaaggtgagggaggaaaaggatagggtagttcatgtctatgtattattgtgtttgttttttttctagagtctgttcctgtgtgtacctgtgtgtcattgcatatttccattttatgtctctcctcttaccctcctcaaccctattatctatcttttatacctaacaactctgctatttccccaagtgggtctattggattaactgcctcccttcctttagtaaggcatgagagattcatagaggaagtggaccaaatactaaggtcctctctatctatctacctggcaatcatctatctcctatctatctcttcagataaatgtaaatatgtatttagaattcagggtgacttccttcagatgaactaagaacaattcagtaaaatgtcaaggtgaagaactcagaataaatgctataaaaagaggccacttcagctcccataactggcccaaataacttttaaaatacagatttgtacttagctatttgacagaagttggaagccatgaatggtaatatgaagaaatgtaacacttggaaaacctgttgataaaaact

SEQ ID NO: 4674 - protein, 53 aa, Homo sapiens
MWKSVVGHDVSVSVETQGDDWDTDPDFVNDISEKEQRWGAKTIEGSGRTEHIK

SEQ ID NO: 4675 - DNA, 450 bp, Homo sapiens
actccgaagtggcagcagccagagagggagtcggtgtggacgcgaggagccgggcgcttagaacagaggcttgcacaggtggagatgtggaagtctgtagtgggccatgatgtgtctgtttccgtggagacccagggtgatgattgggacacagatcctgactttgtggtgagtttggaagtagctttgcttggacagtgcagagggtggggtgaggagggcatctgggccactctgtgatctttgaggatgcttggaaaagggccttctaggactgagacagccctcatactgggactaattggtaggacaattggctgtcacctgtggggcatgcacgatacctggtatcagggatgaaaagagacaggtgtgggtgagtttgacagtgtgattgacaggccatggcaggctacactgaaggtgagaagcaggtgaacctgggtctcc

SEQ ID NO: 4676 - protein, 51 aa, Homo sapiens
MWKSVVGHDVSVSVETQGDDWDTDPDFVVSLEVALLGQCRGWGEEGIWATL

SEQ ID NO: 4677 - DNA, 646 bp, Homo sapiens
cagggactgcctgtggatccatgccaattgctgtgatcagccagcccatccaggagagaagctgtgacttccccaagcacaccaagctgtaactctctgggtcctgtcatttgggctgatgagaaagcagcttccgaggagagacatgattcatccaaagagacgattcatgtgagagccagctttcaggccaagtattgatgggagacatctggctgattggccaacagcaggtagagaaggcaagcccagtgaagacagcatgaggagagcatccaccttttgacattgcacacaagcaaggatgacaccatgaccatctttgaaagggcagagctggacttttgcataacattattcaggttaatgacaccttggtacacatcagtcaattaaataataaataaaatgtattgactcttagtcttcaataacacctctgagacttgttaataatacttgtggattgaagatatataaacaaaatcaatatttattgaaaaaatgttcaacgtttgagaacttagattaaccttgttaattgatcctataaagtgtcaaatttttgactgatttgtttacttacatgcttgtgaaattctttgggatggatattgcttcctaatacaatgtttgtagcacactc

SEQ ID NO: 4678 - protein, 54 aa, Homo sapiens
SASPSRREAVTSPSTPSCNSLGPVIWADEKAASEERHDSSKETIHVRASFQAKY

SEQ ID NO: 4679 - DNA, 727 bp, Homo sapiens
aggctccaccatgcggtgccgctctctttggagtctcctgaaggggaggagggccctcttggctgctcttctgactccaacagctggatgaagcctattcttgtcctacaggagccccactggaagtgaataagctcagttgccatatttggaccaaaattctcacatttgatactggaaggggtgaaaagagacctgttcaggggcagtgcccagtgaggagaccctcaaacgagaggcagagtccctcaagcctttgtacaatgccaccaagggtgctgccccttcttcaacagaacgtcctccttgcagggaggctgcagtgatgtcagagatgaatcacaggccagaggtgagagctggagaaagggaaactctcccagtccctgggagtggtcattacagactgggaaatcgctctccagctgatggtaaaggactgcaaatcctattcatgtgactcagggcctggtgtgccttctgggaagaaagcagaagagggttcctaactgtagaagggaaaagtttccctttattcttccagccacgtggttcaataagcatgtacaagctcttaccagggccaggcactgtgcgggcaccagaaacattaagatggaatgacacaggtctgccctggaagaaacattaagatggaatgacacaggtctgccctggaagggctcctttccagggctcagggactctgtgactccttttggggagc

SEQ ID NO: 4680 - protein, 44 aa, Homo sapiens
MSEMNHRPEVRAGERETLPVPGSGHYRLGNRSPADGKGLQILFM

SEQ ID NO: 4681 - DNA, 4061 bp, Homo sapiens
cggctcggggctgtgagcggctcggggccgggggtgggcggcggtgcggcgggcggccgacgctcctcttcggcggcggcggcggcggccatgcgtgggcggcgcggctggggcggccgggccggagttgcctcccgggggcccgcggctgagggccccgccgccgccgccgctgctgcttctgcttgcgctgttgccgctgctgcccgcgcctggcgctgccgccgcccccgccccgcggcccccggagctgcagtcggcttccgcggggcccagcgtgagtctctacctgagcgaggacgaggtgcgccggctgatcggtcttgatgcagaactttattatgtgagaaatgaccttattagtcactacgctctatcctttagtctgttagtacccagtgagacaaatttcctgcacttcacctggcatgcgaagtccaaggttgaatataagctgggattccaagtggacaatgttttggcaatggatatgccccaggtcaacatttctgttcagggggaagttccacgcactttatcagtgtttcgggtagagctttcctgtactggcaaagtagattctgaagttatgatactaatgcagctcaacttgacagtaaattcttcaaaaaattttaccgtcttaaattttaaacgaaggaaaatgtgctacaaaaaacttgaagaagtaaaaacttcagccttggacaaaaacactagcagaactatttatgatcctgtacatgcagctccaaccacttctacgcgtgtgttttatattagtgtaggggtttgttgtgcagtaatatttctcgtagcaataatattagctgttttgcaccttcatagtatgaaaaggattgaactggatgacagcattagtgccagcagtagttcccaagggctgtctcagccatccacccagacgactcagtatctgagagcagacacgcccaacaatgcaactcctatcaccagttatcctaccttgcggatagagaagaacgacttgagaagtgtcactcttttggaggccaaaggcaaggtgaaggatatagcaatatccagagagaggataactctaaaagatgtactccaagaaggtacttttgggcgtattttccatgggattttaatagatgaaaaagatccaaataaagaaaaacaagcatttgtcaaaacagttaaagatcaagcttctgaaattcaggtgacaatgatgctcactgaaagttgtaagctgcgaggtcttcatcacagaaatcttcttcctattactcatgtgtgtatagaagaaggagaaaagcccatggtgatattgccttacatgaattgggggaatcttaaattgtttttacgacagtgcaagttagtagaggccaataatccacaggcaatttctcagcaagacctggtacacatggctattcagattgcctgtggaatgagctacctggccagaagggaagtcatccacaaagacctggctgccaggaactgtgtcattgatgacacacttcaagttaagatcacagacaatgccctctccagagacttgttccccatggactatcactgtctgggggacaatgaaaacaggccagttcgttggatggctcttgaaagtctggttaataacgagttctctagcgctagtgatgtgtgggcctttggagtgacgctgtgggaactcatgactctgggccagactccctacgtggacattgaccccttcgagatggccgcatacctgaaagatggttaccgaatagcccagccaatcaactgtcctgatgaattatttgctgtgatggcctgttgctgggccttagatccagaggagaggcccaagtttcagcagctggtacagtgcctaacagagtttcatgcagccctgggggcctacgtctgactcctctccaatcccacaccatcaggaagaaggtgcctgtcggggctcacttgaagcctgtcagggatgctttgtatctaacacaacgccaacagaagcacatttgtcttccagaacaccgtgccttagaaatgctttagaatctgaactttttaagacagacttaataatgtggcatattttctagatatcacttttattaggttgaactgaaagggtttttgtaaattttttggccaaaattttttaaaacatacttactttggactaggggtacattcttacaaaataaataaacagtttttaaaattgtttagacacagatatttggaattagctatcttagtgccaactgctttttatttttttacttcatcaaggtgatgtaagtgactcacctttaaagtttttttagtgttattttttatcactactctgggaaatggtttgtcttcaagatgcaatacttttcttagtaaaggaaaaacagcataaaaagatacctggtctgccttgtacaagaaaaggcaatattagaggaagaaaatttaaagaaaagctagaggaaaaaaaaatttttttaaaaatacttattagaagcaaactgcccttgcatggaaaactgtttatttttttcagtgaaaaggaattctgctttcgtgtttttgggaaagcaggaactgagttcattacatctttaatttggcagaaattagcctttctgtgaaccagatgtggtttggggcagatctgtagtaaacaatggtgattttatttatttttactctctggaaaaggagataatacaattccagaaagtgaactcatatttctaaggttaagattcccttttattgcacctagaatagtgctatgcacagagcgggtgcttgagttgttgtcgttttttgtttgttttttaaatgtaaactggtaaattttgtgcttatcttcaaggctggcttaagtataaaattgttttttaaacacttgaaaaattaaaggatttgttttatattatgacagtattgaaattatttttcataatgaatgattggttattgtgtctggtaagtctttgaacattcaacagccagacatttgtgttttatttcatgatgttccagtcaagttccaaagccctaacacagttaagctggctcagactccaggttctagtaaaaagttggaattaatgttataaggaagtattaaaacactgaaacatttctccagaaccagcaagtaagggatatgtatgtatttatgctcagttttagttggcctaaagcagagttgaatgggctttctaaatagctaggcctgcaggtacctgccactactcccatcttcagaggtatataagggagaatgtgtagcagttggaggcttttgctgtttttaaaaaagccttatgaatcagcagcacatcgggaaaaatagctcacatagtacctggttttccacaagtaagccaagggcatgattttctgtgtacatttattaacagttctttggttttatgaaatactcatatgaagccagtccctggagtactgttttttaaaaggtccctttgaaccatttgtaaattatattttcattcataacctgcattcttagaaggcattcagtcaacatttacagcacttactgtgtattttccacatggagtggttcaactcaagcgtcccttccagtattcagggcattcttatttcatgttcaagtgagtgcattgtttagaaatcacagtttattaacatgtacatgatctattttaaaaaaaaaataagtactgacacctgacttctactcccaattagcagattgtaagaaatgtcctcagtttggtggatggtgtggtgcctgtaaccttatctttttgtgtttgtgagcacttttattttatgtatgtatttttattgtagtagatttttcttggtgagctacttggagtctttgacatgggaaggaaagagcagttataagatctccctgactcatgttcttccagtagttttattgtagattgtgaatgttactgaagttttacattttactgattttgcagaaaatataatttttatggaaaagaagcaaattgacaaagcagtgttgtggtattataagctggctctggtgacct

SEQ ID NO: 4682 - protein, 475 aa, Homo sapiens
MDMPQVNISVQGEVPRTLSVFRVELSCTGKVDSEVMILMQLNLTVNSSKNFTVLNFKRRKMCYKKLEEVKTSALDKNTSRTIYDPVHAAPTTSTRVFYISVGVCCAVIFLVAIILAVLHLHSMKRIELDDSISASSSSQGLSQPSTQTTQYLRADTPNNATPITSYPTLRIEKNDLRSVTLLEAKGKVKDIAISRERITLKDVLQEGTFGRIFHGILIDEKDPNKEKQAFVKTVKDQASEIQVTMMLTESCKLRGLHHRNLLPITHVCIEEGEKPMVILPYMNWGNLKLFLRQCKLVEANNPQAISQQDLVHMAIQIACGMSYLARREVIHKDLAARNCVIDDTLQVKITDNALSRDLFPMDYHCLGDNENRPVRWMALESLVNNEFSSASDVWAFGVTLWELMTLGQTPYVDIDPFEMAAYLKDGYRIAQPINCPDELFAVMACCWALDPEERPKFQQLVQCLTEFHAALGAYV

SEQ ID NO: 4683 - DNA, 3962 bp, Homo sapiens
ggcagccgcccccggctcggggctgtgagcggctcggggccgggggtgggcggcggtgcggcggccgccgccgctgctgcttctgcttgcgctgttgccgctgctgcccgcgcctggcgctgccgccgcccccgccccgcggcccccggagctgcagtcggcttccgcggggcccagcgtgagtctctacctgagcgaggacgaggtgcgccggctgatcggtcttgatgcagaactttattatgtgagaaatgaccttattagtcactacgctctatcctttagtctgttagtacccagtgagacaaatttcctgcacttcacctggcatgcgaagtccaaggttgaatataagctgggattccaagtggacaatgttttggcaatggatatgccccaggtcaacatttctgttcagggggaagttccacgcactttatcagtgtttcgggtagagctttcctgtactggcaaagtagattctgaagttatgatactaatgcagctcaacttgacagtaaattcttcaaaaaattttaccgtcttaaattttaaacgaaggaaaatgtgctacaaaaaacttgaagaagtaaaaacttcagccttggacaaaaacactagcagaactatttatgatcctgtacatgcagctccaaccacttctacgcgtgtgttttatattagtgtaggggtttgttgtgcagtaatatttctcgtagcaataatattagctgttttgcaccttcatagtatgaaaaggattgaactggatgacagcattagtgccagcagtagttcccaagggctgtctcagccatccacccagacgactcagtatctgagagcagacacgcccaacaatgcaactcctatcaccagttatcctaccttgcggatagagaagaacgacttgagaagtgtcactcttttggaggccaaaggcaaggtgaaggatatagcaatatccagagagaggataactctaaaagatgtactccaagaaggtacttttgggcgtattttccatgggattttaatagatgaaaaagatccaaataaagaaaaacaagcatttgtcaaaacagttaaagatcaagcttctgaaattcaggtgacaatgatgctcactgaaagttgtaagctgcgaggtcttcatcacagaaatcttcttcctattactcatgtgtgtatagaagaaggagaaaagcccatggtgatattgccttacatgaattgggggaatcttaaattgtttttacgacagtgcaagttagtagaggccaataatccacaggcaatttctcagcaagacctggtacacatggctattcagattgcctgtggaatgagctacctggccagaagggaagtcatccacaaagacctggctgccaggaactgtgtcattgatgacacacttcaagttaagatcacagacaatgccctctccagagacttgttccccatggactatcactgtctgggggacaatgaaaacaggccagttcgttggatggctcttgaaagtctggttaataacgagttctctagcgctagtgatgtgtgggcctttggagtgacgctgtgggaactcatgactctgggccagactccctacgtggacattgaccccttcgagatggccgcatacctgaaagatggttaccgaatagcccagccaatcaactgtcctgatgaattatttgctgtgatggcctgttgctgggccttagatccagaggagaggcccaagtttcagcagctggtacagtgcctaacagagtttcatgcagccctgggggcctacgtctgactcctctccaatcccacaccatcaggaagaaggtgcctgtcggggctcacttgaagcctgtcagggatgctttgtatctaacacaacgccaacagaagcacatttgtcttccagaacaccgtgccttagaaatgctttagaatctgaactttttaagacagacttaataatgtggcatattttctagatatcacttttattaggttgaactgaaagggtttttgtaaattttttggccaaaattttttaaaacatacttactttggactaggggtacattcttacaaaataaataaacagtttttaaaattgtttagacacagatatttggaattagctatcttagtgccaactgctttttatttttttacttcatcaaggtgatgtaagtgactcacctttaaagtttttttagtgttattttttatcactactctgggaaatggtttgtcttcaagatgcaatacttttcttagtaaaggaaaaacagcataaaaagatacctggtctgccttgtacaagaaaaggcaatattagaggaagaaaatttaaagaaaagctagaggaaaaaaaaatttttttaaaaatacttattagaagcaaactgcccttgcatggaaaactgtttatttttttcagtgaaaaggaattctgctttcgtgtttttgggaaagcaggaactgagttcattacatctttaatttggcagaaattagcctttctgtgaaccagatgtggtttggggcagatctgtagtaaacaatggtgattttatttatttttactctctggaaaaggagataatacaattccagaaagtgaactcatatttctaaggttaagattcccttttattgcacctagaatagtgctatgcacagagcgggtgcttgagttgttgtcgttttttgtttgttttttaaatgtaaactggtaaattttgtgcttatcttcaaggctggcttaagtataaaattgttttttaaacacttgaaaaattaaaggatttgttttatattatgacagtattgaaattatttttcataatgaatgattggttattgtgtctggtaagtctttgaacattcaacagccagacatttgtgttttatttcatgatgttccagtcaagttccaaagccctaacacagttaagctggctcagactccaggttctagtaaaaagttggaattaatgttataaggaagtattaaaacactgaaacatttctccagaaccagcaagtaagggatatgtatgtatttatgctcagttttagttggcctaaagcagagttgaatgggctttctaaatagctaggcctgcaggtacctgccactactcccatcttcagaggtatataagggagaatgtgtagcagttggaggcttttgctgtttttaaaaaagccttatgaatcagcagcacatcgggaaaaatagctcacatagtacctggttttccacaagtaagccaagggcatgattttctgtgtacatttattaacagttctttggttttatgaaatactcatatgaagccagtccctggagtactgttttttaaaaggtccctttgaaccatttgtaaattatattttcattcataacctgcattcttagaaggcattcagtcaacatttacagcacttactgtgtattttccacatggagtggttcaactcaagcgtcccttccagtattcagggcattcttatttcatgttcaagtgagtgcattgtttagaaatcacagtttattaacatgtacatgatctattttaaaaaaaaaataagtactgacacctgacttctactcccaattagcagattgtaagaaatgtcctcagtttggtggatggtgtggtgcctgtaaccttatctttttgtgtttgtgagcacttttattttatgtatgtatttttattgtagtagatttttcttggtgagctacttggagtctttgacatgggaaggaaagagcagttataagatctccctgactcatgttcttccagtagttttattgtagattgtgaatgttactgaagttttacattttactgattttgcagaaaatataatttttatggaaaagaagcaaattgacaaagcagtgttgtggtattataagctggctctggtgacct

SEQ ID NO: 4684 - protein, 475 aa, Homo sapiens; identical to SEQ ID NO: 4682

SEQ ID NO: 4685 - DNA, 2935 bp, Homo sapiens
cccccggctcggggctgtgagcggctcggggccgggggtgggcggcggtgcggcgggcggccgacgctcctcttcggcggcggcggcggcggccatgcgtgggcggcgcggctggggcggccgggccggagttgcctcccgggggcccgcggctgagggccccgccgccgccgccgctgctgcttctgcttgcgctgttgccgctgctgcccgcgcctggcgctgccgccgcccccgccccgcggcccccggagctgcagtcggcttccgcggggcccagcgtgagtctctacctgagcgaggacgaggtgcgccggctgatcggtcttgatgcagaactttattatgtgagaaatgaccttattagtcactacgctctatcctttagtctgttagtacccagtgagacaaatttcctgcacttcacctggcatgcgaagtccaaggttgaatataagctgggattccaagtggacaatgttttggcaatggatatgccccaggtcaacatttctgttcagggggaagttccacgcactttatcagtgtttcgggtagagctttcctgtactggcaaagtagattctgaagttatgatactaatgcagctcaacttgacagtaaattcttcaaaaaattttaccgtcttaaattttaaacgaaggaaaatgtgctacaaaaaacttgaagaagtaaaaacttcagccttggacaaaaacactagcagaactatttatgatcctgtacatgcagctccaaccacttctacgcgtgtgttttatattagtgtaggggtttgttgtgcagtaatatttctcgtagcaataatattagctgttttgcaccttcatagtatgaaaaggattgaactggatgacagcattagtgccagcagtagttcccaagggctgtctcagccatccacccagacgactcagtatctgagagcagacacgcccaacaatgcaactcctatcaccagttatcctaccttgcggatagagaagaacgacttgagaagtgtcactcttttggaggccaaaggcaaggtgaaggatatagcaatatccagagagaggataactctaaaagatgtactccaagaaggtacttttgggcgtattttccatgggattttaatagatgaaaaagatccaaataaagaaaaacaagcatttgtcaaaacagttaaagatcaagcttctgaaattcaggtgacaatgatgctcactgaaagttgtaagctgcgaggtcttcatcacagaaatcttcttcctattactcatgtgtgtatagaagaaggagaaaagcccatggtgatattgccttacatgaattgggggaatcttaaattgtttttacgacagtgcaagttagtagaggccaataatccacaggcaatttctcagcaagacctggtacacatggctattcagattgcctgtggaatgagctacctggccagaagggaagtcatccacaaagacctggctgccaggaactgtgtcattgatgacacacttcaagttaagatcacagacaatgccctctccagagacttgttccccatggactatcactgtctgggggacaatgaaaacaggccagttcgttggatggctcttgaaagtctggttaataacgagttctctagcgctagtgatgtgtgggcctttggagtgacgctgtgggaactcatgactctgggccagactccctacgtggacattgaccccttcgagatggccgcatacctgaaagatggttaccgaatagcccagccaatcaactgtcctgatgaattatttgctgtgatggcctgttgctgggccttagatccagaggagaggcccaagtttcagcagctggtacagtgcctaacagagtttcatgcagccctgggggcctacgtctgactcctctccaatcccacaccatcaggaagaaggtgcctgtcggggctcacttgaagcctgtcagggatgctttgtatctaacacaacgccaacagaagcacatttgtcttccagaacaccgtgccttagaaatgctttagaatctgaactttttaagacagacttaataatgtggcatattttctagatatcacttttattaggttgaactgaaagggtttttgtaaattttttggccaaaattttttaaaacatacttactttggactaggggtacattcttacaaaataaataaacagtttttaaaattgtttagacacagatatttggaattagctatcttagtgccaactgctttttatttttttacttcatcaaggtgatgtaagtgactcacctttaaagtttttttagtgttattttttatcactactctgggaaatggtttgtcttcaagatgcaatacttttcttagtaaaggaaaaacagcataaaaagatacctggtctgccttgtacaagaaaaggcaatattagaggaagaaaatttaaagaaaagctagaggaaaaaaaaatttttttaaaaatacttattagaagcaaactgcccttgcatggaaaactgtttatttttttcagtgaaaaggaattctgctttcgtgtttttgggaaagcaggaactgagttcattacatctttaatttggcagaaattagcctttctgtgaaccagatgtggtttggggcagatctgtagtaaacaatggtgattttatttatttttactctctggaaaaggagataatacaattccagaaagtgaactcatatttctaaggttaagattcccttttattgcacctagaatagtgctatgcacagagcgggtgcttgagttgttgtcgttttttgtttgttttttaaatgtaaactggtaaattttgtgcttatcttcaaggctggcttaagtataaaattgttttttaaacacttgaaaaattaaaggatttgttttatatt

SEQ ID NO: 4686 - protein, 475 aa, Homo sapiens; identical to SEQ ID NO: 4682

SEQ ID NO: 4687 - DNA, 2832 bp, Homo sapiens
ggcagccgcccccggctcggggctgtgagcggctcggggccgggggtgggcggcggtgcggcggccgccgccgctgctgcttctgcttgcgctgttgccgctgctgcccgcgcctggcgctgccgccgcccccgccccgcggcccccggagctgcagtcggcttccgcggggcccagcgtgagtctctacctgagcgaggacgaggtgcgccggctgatcggtcttgatgcagaactttattatgtgagaaatgaccttattagtcactacgctctatcctttagtctgttagtacccagtgagacaaatttcctgcacttcacctggcatgcgaagtccaaggttgaatataagctgggattccaagtggacaatgttttggcaatggatatgccccaggtcaacatttctgttcagggggaagttccacgcactttatcagtgtttcgggtagagctttcctgtactggcaaagtagattctgaagttatgatactaatgcagctcaacttgacagtaaattcttcaaaaaattttaccgtcttaaattttaaacgaaggaaaatgtgctacaaaaaacttgaagaagtaaaaacttcagccttggacaaaaacactagcagaactatttatgatcctgtacatgcagctccaaccacttctacgcgtgtgttttatattagtgtaggggtttgttgtgcagtaatatttctcgtagcaataatattagctgttttgcaccttcatagtatgaaaaggattgaactggatgacagcattagtgccagcagtagttcccaagggctgtctcagccatccacccagacgactcagtatctgagagcagacacgcccaacaatgcaactcctatcaccagttatcctaccttgcggatagagaagaacgacttgagaagtgtcactcttttggaggccaaaggcaaggtgaaggatatagcaatatccagagagaggataactctaaaagatgtactccaagaaggtacttttgggcgtattttccatgggattttaatagatgaaaaagatccaaataaagaaaaacaagcatttgtcaaaacagttaaagatcaagcttctgaaattcaggtgacaatgatgctcactgaaagttgtaagctgcgaggtcttcatcacagaaatcttcttcctattactcatgtgtgtatagaagaaggagaaaagcccatggtgatattgccttacatgaattgggggaatcttaaattgtttttacgacagtgcaagttagtagaggccaataatccacaggcaatttctcagcaagacctggtacacatggctattcagattgcctgtggaatgagctacctggccagaagggaagtcatccacaaagacctggctgccaggaactgtgtcattgatgacacacttcaagttaagatcacagacaatgccctctccagagacttgttccccatggactatcactgtctgggggacaatgaaaacaggccagttcgttggatggctcttgaaagtctggttaataacgagttctctagcgctagtgatgtgtgggcctttggagtgacgctgtgggaactcatgactctgggccagactccctacgtggacattgaccccttcgagatggccgcatacctgaaagatggttaccgaatagcccagccaatcaactgtcctgatgaattatttgctgtgatggcctgttgctgggccttagatccagaggagaggcccaagtttcagcagctggtacagtgcctaacagagtttcatgcagccctgggggcctacgtctgactcctctccaatcccacaccatcaggaagaaggtgcctgtcggggctcacttgaagcctgtcagggatgctttgtatctaacacaacgccaacagaagcacatttgtcttccagaacaccgtgccttagaaatgctttagaatctgaactttttaagacagacttaataatgtggcatattttctagatatcacttttattaggttgaactgaaagggtttttgtaaattttttggccaaaattttttaaaacatacttactttggactaggggtacattcttacaaaataaataaacagtttttaaaattgtttagacacagatatttggaattagctatcttagtgccaactgctttttatttttttacttcatcaaggtgatgtaagtgactcacctttaaagtttttttagtgttattttttatcactactctgggaaatggtttgtcttcaagatgcaatacttttcttagtaaaggaaaaacagcataaaaagatacctggtctgccttgtacaagaaaaggcaatattagaggaagaaaatttaaagaaaagctagaggaaaaaaaaatttttttaaaaatacttattagaagcaaactgcccttgcatggaaaactgtttatttttttcagtgaaaaggaattctgctttcgtgtttttgggaaagcaggaactgagttcattacatctttaatttggcagaaattagcctttctgtgaaccagatgtggtttggggcagatctgtagtaaacaatggtgattttatttatttttactctctggaaaaggagataatacaattccagaaagtgaactcatatttctaaggttaagattcccttttattgcacctagaatagtgctatgcacagagcgggtgcttgagttgttgtcgttttttgtttgttttttaaatgtaaactggtaaattttgtgcttatcttcaaggctggcttaagtataaaattgttttttaaacacttgaaaaattaaaggatttgttttatatt

SEQ ID NO: 4688 - protein, 475 aa, Homo sapiens; identical to SEQ ID NO: 4682

SEQ ID NO: 4689 - DNA, 2373 bp, Homo sapiens
ggcagccgcccccggctcggggctgtgagcggctcggggccgggggtgggcggcggtgcggcggccgccgccgctgctgcttctgcttgcgctgttgccgctgctgcccgcgcctggcgctgccgccgcccccgccccgcggcccccggagctgcagtcggcttccgcggggcccagcgtgagtctctacctgagcgaggacgaggtgcgccggctgatcggtcttgatgcagaactttattatgtgagaaatgaccttattagtcactacgctctatcctttagtctgttagtacccagtgagacaaatttcctgcacttcacctggcatgcgaagtccaaggttgaatataagctgggattccaagtggacaatgttttggcaatggatatgccccaggtcaacatttctgttcagggggaagttccacgcactttatcagtgtttcgggtagagctttcctgtactggcaaagtagattctgaagttatgatactaatgcagctcaacttgacagtaaattcttcaaaaaattttaccgtcttaaattttaaacgaaggaaaatgtgctacaaaaaacttgaagaagtaaaaacttcagccttggacaaaaacactagcagaactatttatgatcctgtacatgcagctccaaccacttctacgcgtgtgttttatattagtgtaggggtttgttgtgcagtaatatttctcgtagcaataatattagctgttttgcaccttcatagtatgaaaaggattgaactggatgacagcattagtgccagcagtagttcccaagggctgtctcagccatccacccagacgactcagtatctgagagcagacacgcccaacaatgcaactcctatcaccagttatcctaccttgcggatagagaagaacgacttgagaagtgtcactcttttggaggccaaaggcaaggtgaaggatatagcaatatccagagagaggataactctaaaagatgtactccaagaaggtacttttgggcgtattttccatgggattttaatagatgaaaaagatccaaataaagaaaaacaagcatttgtcaaaacagttaaagatcaagcttctgaaattcaggtgacaatgatgctcactgaaagttgtaagctgcgaggtcttcatcacagaaatcttcttcctattactcatgtgtgtatagaagaaggagaaaagcccatggtgatattgccttacatgaattgggggaatcttaaattgtttttacgacagtgcaagttagtagaggccaataatccacaggcaatttctcagcaagacctggtacacatggctattcagattgcctgtggaatgagctacctggccagaagggaagtcatccacaaagacctggctgccaggaactgtgtcattgatgacacacttcaagttaagatcacagacaatgccctctccagagacttgttccccatggactatcactgtctgggggacaatgaaaacaggccagttcgttggatggctcttgaaagtctggttaataacgagttctctagcgctagtgatgtgtgggcctttggagtgacgctgtgggaactcatgactctgggccagactccctacgtggacattgaccccttcgagatggccgcatacctgaaagatggttaccgaatagcccagccaatcaactgtcctgatgaattatttgctgtgatggcctgttgctgggccttagatccagaggagaggcccaagtttcagcagctggtacagtgcctaacagagtttcatgcagccctgggggcctacgtctgactcctctccaatcccacaccatcaggaagaaggtgcctgtcggggctcacttgaagcctgtcagggatgctttgtatctaacacaacgccaacagaagcacatttgtcttccagaacaccgtgccttagaaatgctttagaatctgaactttttaagacagacttaataatgtggcatattttctagatatcacttttattaggttgaactgaaagggtttttgtaaattttttggccaaaattttttaaaacatacttactttggactaggggtacattcttacaaaataaataaacagtttttaaaattgtttagacacagatatttggaattagctatcttagtgccaactgctttttatttttttacttcatcaaggtgatgtaagtgactcacctttaaagtttttttagtgttattttttatcactactctgggaaatggtttgtcttcaagatgcaatacttttcttagtaaaggaaaaacagcataaaaagatacctggtctgccttgtacaagaaaaggcaatattagaggaagaaaatttaaagaaaagc

SEQ ID NO: 4690 - protein, 475 aa, Homo sapiens; identical to SEQ ID NO: 4682

SEQ ID NO: 4691 - DNA, 392 bp, Homo sapiens
aacttgaagaagtaaaaacttcagccttggacaaaaacactagcagaactatttatgatcctgtacatgcagctccaaccacttctacgcgtgtgttttatattagtgtaggggtttgttgtgcagtaatatttctcgtagcaataatattagctgttttgcaccttcatagtatgaaaaggattgaactggatgacaggtattgtacatattttgggaaagaaaaaaaatgaaagcagttatttgtatatatgtgggagcccatacacatcgatgcacagtggtgcagggaaaggagggaggatgattaagccccagccaaaggaaaaataagatgacctaatcactgtctctggtttctctgattttatttttattttttaaaaattaag

SEQ ID NO: 4692 - protein, 46 aa, Homo sapiens [sequence omitted]

SEQ ID NO: 4693 - DNA, 4161 bp, Homo sapiens
actcccaccatccccctctaacagcacggagtcagtttccaggcagtgggcaaggagggctaagaacttgccccaggctacctgcctcccagctgaaaagggctttagttcttcccctgcctgtggagtctgcatgccagattcgcaccctcccctgagttctggccaggaggcttctgaacaagttcatattgttacaaagttcagctggagacttccttctccctgtggcattttcccagtgcctctggctgccctcctgagggatccctgtggtgccaggcaggaatttcctgcttggggaacccagtgggctcccagagcctttctcgcagcttcctctacccctgtatttcgctcggctctctaaattgactcagctccagcttgccctgcagggacattcaaggccagccaggaagctgaaggctgctcccactgcccctccaacagccgctcccctgcagaggcgtctcccatctgcacctgtcggaccggttattaccgagcggactttgaccctccagaagtggcatgcactagcgtcccatcaggtccccgcaatgttatctccatcgtcaatgagacgtccatcattctggagtggcaccctccaagggagacaggtgggcgggatgatgtgacctacaacatcatctgcaaaaagtgccgggcagaccgccggagctgctcccgctgtgacgacaatgtggagtttgtgcccaggcagctgggcctgacggagtgccgcgtctccatcagcagcctgtgggcccacaccccctacacctttgacatccaggccatcaatggagtctccagcaagagtcccttccccccacagcacgtctctgtcaacatcaccacaaaccaagccgccccctccaccgttcccatcatgcaccaagtcagtgccactatgaggagcatcaccttgtcatggccacagccggagcagcccaatggcatcatcctggactatgagatccggtactatgagaaggaacacaatgagttcaactcctccatggccaggagtcagaccaacacagcaaggattgatgggctgcggcctggcatggtatatgtggtacaggtgcgtgcccgcactgttgctggctacggcaagttcagtggcaagatgtgcttccagactctgactgacgatgattacaagtcagagctgagggagcagctgcccctgattgctggctcggcagcggccggggtcgtgttcgttgtgtccttggtggccatctctatcgtctgtagcaggaaacgggcttatagcaaagaggctgtgtacagcgataagctccagcattacagcacaggccgaggctccccagggatgaagatctacattgaccccttcacttacgaggatcccaacgaagctgtccgggagtttgccaaggagattgatgtatcttttgtgaaaattgaagaggtcatcggagcaggggagtttggagaagtgtacaaggggcgtttgaaactgccaggcaagagggaaatctacgtggccatcaagaccctgaaggcagggtactcggagaagcagcgtcgggactttctgagtgaggcgagcatcatgggccagttcgaccatcctaacatcattcgcctggagggtgtggtcaccaagagtcggcctgtcatgatcatcacagagttcatggagaatggtgcattggattctttcctcaggcaaaatgacgggcagttcaccgtgatccagcttgtgggtatgctcaggggcatcgctgctggcatgaagtacctggctgagatgaattatgtgcatcgggacctggctgctaggaacattctggtcaacagtaacctggtgtgcaaggtgtccgactttggcctctcccgctacctccaggatgacacctcagatcccacctacaccagctccttgggagggaagatccctgtgagatggacagctccagaggccatcgcctaccgcaagttcacttcagccagcgacgtttggagctatgggatcgtcatgtgggaagtcatgtcatttggagagagaccctattgggatatgtccaaccaagatgtcatcaatgccatcgagcaggactaccggctgcccccacccatggactgtccagctgctctacaccagctcatgctggactgttggcagaaggaccggaacagccggccccggtttgcggagattgtcaacaccctagataagatgatccggaacccggcaagtctcaagactgtggcaaccatcaccgccgtgccttcccagcccctgctcgaccgctccatcccagacttcacggcctttaccaccgtggatgactggctcagcgccatcaaaatggtccagtacagggacagcttcctcactgctggcttcacctccctccagctggtcacccagatgacatcagaagacctcctgagaataggcatcaccttggcaggccatcagaagaagatcctgaacagcattcattctatgagggtccagataagtcagtcaccaacggcaatggcatgagaactcttgtttcttggggaaggagaggagggaaaaggaccagggtcaagggggaccagaggttgaccactgtggaatgtactggagagactggcttctcagctgaggaatgcatttccatcagtgaagaatcaaccggacctgttgctagcaggcaatctccatttctcagtgacagaagcatgtttgagatgccgtgggaaaccaaatatataataataaaaatataaaaaggtgatgttcaacagaagtgaagacaaaacaatatgcatcaggagaacaagagtaaacccagctcccattctcagtgggctgcagttgcccaaccacaggaagaaagggaaggaggtagagggaagaaacagaagcagtgttccattttcttcctcaccaatgacattcttttcttttctcctttcgtactcctccctgagagtcccctcccttctcccacactcgtttccctttgctcatgactcctgtagggaagtttcttcaaacaaaacccagctcctgagtctccagatgttgttctgtcagttgccaaaggactttgctgaccactgcatggggatccaaccaattcaattaatgtcttcatattgaagaagagatgtaccttcaattgaaaacctcgtttttcttttgtttgcattttctgcaaaaaggaaaaagaaaccacaaattggggaaaaaaaaagaagaaaaacctgtttccgtgtgcaaaagcacacatatgtatgtctgtgttataaaatgactgtgcttgttcgtaacagatgcaaacaagaaagaagaactgggaagtctttgtccctaggaaatccaaaggggctggaatatggtgttggtttggctttctggttggcccaatcggcctattggctcaatgggaagagaggagagggagaaaaataaaatgaaaggaaaaaaaaaagtttgcaaattcagacaggaaacaggtgagtggtttgaattggatgcagtgtgggccatcctggaatgatactgactgattaattattcctgataacatctcaagaaaaggagaaggaaagtgtttctggagaatgttctttcacatcactggaatctgcaattcaagaagtgacaagggagaattcttgctttacctatggactggcttaagccgtgtggcatccgaggaatgtttcaaatgtgtctgtgtttctctttacattccttgttgtacctcattgttcaattcacttttgtaaattccacctaacatttaattattttaaatttctccttttaccttaatctccttgctaattttatctgtctaattaaaaagagcagaagcatgtctgggtttacgtaaaatggtgtcagagtgtgtatccctggatcccagagggttgtccccaaatttcaggagaatccttaacaactgtccttcttctttctaatgtgggagggagggaacacatccttgaccccatgaatgccaagaagcagaatgtagtaaactctctggcactgacgtgatccaaaggaaaaactgaataaataaggcttaagaagtcgctggcaaataaacataaacaatcaccatgaatacactatcaaccctgattttagtttacgcactgcatttgaga

SEQ ID NO: 4694 - protein, 545 aa, Homo sapiens
MHQVSATMRSITLSWPQPEQPNGIILDYEIRYYEKEHNEFNSSMARSQTNTARIDGLRPGMVYVVQVRARTVAGYGKFSGKMCFQTLTDDDYKSELREQLPLIAGSAAAGVVFVVSLVAISIVCSRKRAYSKEAVYSDKLQHYSTGRGSPGMKIYIDPFTYEDPNEAVREFAKEIDVSFVKIEEVIGAGEFGEVYKGRLKLPGKREIYVAIKTLKAGYSEKQRRDFLSEASIMGQFDHPNIIRLEGVVTKSRPVMIITEFMENGALDSFLRQNDGQFTVIQLVGMLRGIAAGMKYLAEMNYVHRDLAARNILVNSNLVCKVSDFGLSRYLQDDTSDPTYTSSLGGKIPVRWTAPEAIAYRKFTSASDVWSYGIVMWEVMSFGERPYWDMSNQDVINAIEQDYRLPPPMDCPAALHQLMLDCWQKDRNSRPRFAEIVNTLDKMIRNPASLKTVATITAVPSQPLLDRSIPDFTAFTTVDDWLSAIKMVQYRDSFLTAGFTSLQLVTQMTSEDLLRIGITLAGHQKKILNSIHSMRVQISQSPTAMA

SEQ ID NO: 4695 - DNA, 755 bp, Homo sapiens
tttattgttcccaattttggatgaggaaactgagagacaaaggaccttcccagaaaacacaatggtggagtcaggattttgattcaggcaatctgactccttgcttttaaccacttaccccagtgggtctcacacttgagtgtgcattggtatcacctagaggtattgttaaaacaaagaagctctgtggggagaattatgtcagtgagaccccaatgctctaaatttcagctacatatgctgcctcatcatctcacagaagactaaatccaatttggacccttagttaaaaacacactttgcacaagggtcagtggcccatagccctgagaaccaggctaaagagatggaacctgcagccatgctgtgcagcccagggtgtggctcacagaaaggggactgctcagccagcacacctgcagccactgggagtccggtgggcggaagtcacacgggggcaagtgggagatgtttaattaatgttcccgggtcaagggtaatgggaaaggaggtgatttgtggagaatccttggagattatgccccacctttccacaccctctccctgccccttccagcactcaaagacatgaatgactggtagagaggtagataaatctacagactgtatgtttattgtatcacctgggtgtccaaatacattcacacactactgaaattatgtgcttcttcctgccttccacctctccatatgtctccttcccaccacgttacatgtggagccaggtcactgga

SEQ ID NO: 4696 - protein, 81 aa, Homo sapiens
MEPAAMLCSPGCGSQKGDCSASTPAATGSPVGGSHTGASGRCLINVPGSRVMGKEVICGESLEIMPHLSTPSPCPFQHSKT

SEQ ID NO: 4697 - DNA, 2906 bp, Homo sapiens
ataacttgaaaaatcctctccgtctcccttccctgcctcctttcctttccctttcctctgccagtacaactagacccggcgtctggcgtccccggtgcccagcattctgcggggcaggcggtgtggtacccacagcccctgaacagcctgcaggtgaaatggaaaatcaaacaaaaccaccagatccaaggcctgatgctcctcctgaatacaattctcattttttaccaggaccccctggaacagctgtccctccacctactggctacccaggaggcttgcctatgggatactacagtccacagcaacccagtaccttccctttgtaccagccagttggtggtatccatcctgtccggtatcagcctggcaaatatcctatgccaaatcagtctgttccaataacatggatgccagggccaactcctatggcaaactgccctcctggtctggaatacttagttcagctggaggtgcagtgtcctcctggtgtcaccattggctttgttgcggaacattggaacctgtgcagggcggtgtacagcatccaaaatgagaagaaagaaaatgtgatgagagttcgtgggccatgctcaacctatggctgtggttcagattctgtttttgaggtcaaatcccttgatggcatatccaacatcggcagtattatccggaagtggaatggtttgttatcagcaatggcagatgctgaccattttgacattcacttcccactagacctggatgtgaagatgaaagccatgatttttggagcttgcttcctcattgacttcatgtattttgaaagatctccaccacaacgttcaagatagagagacacagcaagccatcaactatggttaattttgaaaaatggaaaagttggattgggcttacagtcagcactcagttatttgcaagtgtatttctttgctttgtagagtatttttattgggtgttaactttgacagctgagagtgggcttgcaagaacacaatctaaaagtgtgtttcaattgagtatctctctagtagaataggagttcatcctgaaaagctgtgactcattaacccagtaaacatatacaaagtaagcttaaaacactataaacatgagataagggaaaatgaatccagagttctcatattaataggtagtgaaacaataaggctttttagagcagactttgttggcataaaataacctggcttctatccctaaccctttcctacctttcctctccgtcaacatgtcctcatactgaagacaaacttgtttcaatgatagtcttcatttttaaaaacaaaaaggcaggcagacagaaataatgatgttttcttgcactaagaaggtactacttgtacacatatatcaaaacctcattctgcaaagtttttgaaggtttcaatgggaaatttgattttattacaaaataaaacattttttaatgttaaagtttatatattccatgcttgttttctcattcactggcatggatgatcaggagctgcctatatatgaaggcagaatcagactatcaggaaaggagctggccagggccacagccagtcaagatctctgagcaacttagagacattggtgtcattatatgaagcttgcatttaatacatttatacataatacatttgtacatttaattcataacgtctcttggtcacagatgccttatatataaaataagttgccagatctctaagattgcctagtacacctttgtatctcatttgatgtgatacccagaagagatcattgttttttgtttttgtttttgtttttttcaagaagatccttcgtgatcaccatgctgttctcatggtaagaactggagttatgtttttaaatttggaaatatgacattttatgtagcactttataaaaagtgaaagcgacaaattccaccgctgcttaatactgctttgcttctttttattgacatgatagataaatatgtatctacacagagtaataataataaaacacagtaaacattctatttctctatggtctacagcatgccagtaaataatatgtaggaccaataataaattatcaattacacatttttgtgttaactaattaaaagcatagtgtataagtgagtacactctaattaacttgcttctgttgcactttagttttctacctgcatatggactgcattttttttttttaacacagtcagtatgtagaatgggatgtattcttctgctgctgcttattaaataaagaaagcctgagtgttcttagatggggttattctgagatgagggtcttagcctacagttctttttgaaatgaaaggtgctttgttttttaattatattcatcttttcagggtaaatttgtttttctgagtttctcgtaatgctcatttttacatgctgctactagcttttttttttaaaaaaagtaaaagttgctgctttctaaaatattaattgccttatatttgaaagtgccattgcaatcgtaagtagactatgtatttcctataatgatgtctgatatttaaataggaaatcagacaaacaatattcagaaagtttaagcatataaactttttatttttaacttgcctaaatccctgtattccaaaacctgctgcatcataataaatatatctatatatatttagcataagacgtgatatttttaatttcttttttaaaaaattatatttgtctcttagagttaaaattttctttatataatattgtcatatgtcatagttttaatacaattcacatgatttctatgtttcttaatgatattttgttgtgtaaaattgatcggattgattaaaaaacaaattctctggaatttgtgcgttcatgctttttcgtattctttatggcttttaaataaatatacaatggttaatagta

SEQ ID NO: 4698 - protein, 224 aa, Homo sapiens
MENQTKPPDPRPDAPPEYNSHFLPGPPGTAVPPPTGYPGGLPMGYYSPQQPSTFPLYQPVGGIHPVRYQPGKYPMPNQSVPITWMPGPTPMANCPPGLEYLVQLEVQCPPGVTIGFVAEHWNLCRAVYSIQNEKKENVMRVRGPCSTYGCGSDSVFEVKSLDGISNIGSIIRKWNGLLSAMADADHFDIHFPLDLDVKMKAMIFGACFLIDFMYFERSPPQRSR

SEQ ID NO: 4699 - DNA, 3298 bp, Homo sapiens
ggggaagccgcgcgcggggaaggagggtccaggcgtgccggacccgcccccagaacccgcgcctagccctcccttccgcgcgcttactttgtttataacttgaaaaatcctctccgtctcccttccctgcctcctttcctttccctttcctctgccagtacaactagacccggcgtctggcgtccccggtgcccagcattctgcggggcaggcggattaattggaattcttcaaaatgtcaggtgtggtacccacagcccctgaacagcctgcaggtgaaatggaaaatcaaacaaaaccaccagatccaaggcctgatgctcctcctgaatacaattctcattttttaccaggaccccctggaacagctgtccctccacctactggctacccaggaggcttgcctatgggatactacagtccacagcaacccagtaccttccctttgtaccagccagttggtggtatccatcctgtccggtatcagcctggcaaatatcctatgccaaatcagtctgttccaataacatggatgccagggccaactcctatggcaaactgccctcctggtctggaatacttagttcagttggacaacatacatgttcttcagcattttgagcctctggaaatgatgacatgttttgaaactaataatagatatgatattaaaaacaactcagaccagatggtttacattgtaaccgaagacacagatgactttaccaggaatgcctatcggacactaaggcccttcgtcctccgggtcactgattgtatgggccgagaaatcatgacaatgcagagacccttcagatgcacctgctgttgcttctgttgcccctctgccagacaagagctggaggtgcagtgtcctcctggtgtcaccattggctttgttgcggaacattggaacctgtgcagggcggtgtacagcatccaaaatgagaagaaagaaaatgtgatgagagttcgtgggccatgctcaacctatggctgtggttcagattctgtttttgaggtcaaatcccttgatggcatatccaacatcggcagtattatccggaagtggaatggtttgttatcagcaatggcagatgctgaccattttgacattcacttcccactagacctggatgtgaagatgaaagccatgatttttggagcttgcttcctcattgacttcatgtattttgaaagatctccaccacaacgttcaagatagagagacacagcaagccatcaactatggttaattttgaaaaatggaaaagttggattgggcttacagtcagcactcagttatttgcaagtgtatttctttgctttgtagagtatttttattgggtgttaactttgacagctgagagtgggcttgcaagaacacaatctaaaagtgtgtttcaattgagtatctctctagtagaataggagttcatcctgaaaagctgtgactcattaacccagtaaacatatacaaagtaagcttaaaacactataaacatgagataagggaaaatgaatccagagttctcatattaataggtagtgaaacaataaggctttttagagcagactttgttggcataaaataacctggcttctatccctaaccctttcctacctttcctctccgtcaacatgtcctcatactgaagacaaacttgtttcaatgatagtcttcatttttaaaaacaaaaaggcaggcagacagaaataatgatgttttcttgcactaagaaggtactacttgtacacatatatcaaaacctcattctgcaaagtttttgaaggtttcaatgggaaatttgattttattacaaaataaaacattttttaatgttaaagtttatatattccatgcttgttttctcattcactggcatggatgatcaggagctgcctatatatgaaggcagaatcagactatcaggaaaggagctggccagggccacagccagtcaagatctctgagcaacttagagacattggtgtcattatatgaagcttgcatttaatacatttatacataatacatttgtacatttaattcataacgtctcttggtcacagatgccttatatataaaataagttgccagatctctaagattgcctagtacacctttgtatctcatttgatgtgatacccagaagagatcattgttttttgtttttgtttttgtttttttcaagaagatccttcgtgatcaccatgctgttctcatggtaagaactggagttatgtttttaaatttggaaatatgacattttatgtagcactttataaaaagtgaaagcgacaaattccaccgctgcttaatactgctttgcttctttttattgacatgatagataaatatgtatctacacagagtaataataataaaacacagtaaacattctatttctctatggtctacagcatgccagtaaataatatgtaggaccaataataaattatcaattacacatttttgtgttaactaattaaaagcatagtgtataagtgagtacactctaattaacttgcttctgttgcactttagttttctacctgcatatggactgcattttttttttttaacacagtcagtatgtagaatgggatgtattcttctgctgctgcttattaaataaagaaagcctgagtgttcttagatggggttattctgagatgagggtcttagcctacagttctttttgaaatgaaaggtgctttgttttttaattatattcatcttttcagggtaaatttgtttttctgagtttctcgtaatgctcatttttacatgctgctactagcttttttttttaaaaaaagtaaaagttgctgctttctaaaatattaattgccttatatttgaaagtgccattgcaatcgtaagtagactatgtatttcctataatgatgtctgatatttaaataggaaatcagacaaacaatattcagaaagtttaagcatataaactttttatttttaacttgcctaaatccctgtattccaaaacctgctgcatcataataaatatatctatatatatttagcataagacgtgatatttttaatttcttttttaaaaaattatatttgtctcttagagttaaaattttctttatataatattgtcatatgtcatagttttaatacaattcacatgatttctatgtttcttaatgatattttgttgtgtaaaattgatcggattgattaaaaaacaaattctctggaatttgtgcgttcatgctttttcgtattctttatggcttttaaataaatatacaatggttaatagta

SEQ ID NO: 4700 - protein, 329 aa, Homo sapiens
MSGVVPTAPEQPAGEMENQTKPPDPRPDAPPEYNSHFLPGPPGTAVPPPTGYPGGLPMGYYSPQQPSTFPLYQPVGGIHPVRYQPGKYPMPNQSVPITWMPGPTPMANCPPGLEYLVQLDNIHVLQHFEPLEMMTCFETNNRYDIKNNSDQMVYIVTEDTDDFTRNAYRTLRPFVLRVTDCMGREIMTMQRPFRCTCCCFCCPSARQELEVQCPPGVTIGFVAEHWNLCRAVYSIQNEKKENVMRVRGPCSTYGCGSDSVFEVKSLDGISNIGSIIRKWNGLLSAMADADHFDIHFPLDLDVKMKAMIFGACFLIDFMYFERSPPQRSR

SEQ ID NO: 4701 - DNA, 2839 bp, Homo sapiens
ataacttgaaaaatcctctccgtctcccttccctgcctcctttcctttccctttcctctgccagtacaactagacccggcgtctggcgtccccggtgcccagcattctgcggggcaggcggtgtggtacccacagcccctgaacagcctgcaggtgaaatggaaaatcaaacaaaaccaccagatccaaggcctgatgctcctcctgaatacaattctcattttttaccaggaccccctggaacagctgtccctccacctactggctacccaggaggcttgcctatgggatactacagtccacagcaacccagtaccttccctttgtaccagccagttggtggtatccatcctgtccggtatcagcctggcaaatatcctatgccaaatcagtctgttccaataacatggatgccagggccaactcctatggcaaactgccctcctggtctggaatacttagttcagctggaggtgcagtgtcctcctggtgtcaccattggctttgttgcggaacattggaacctgtgcagggcggtgtacagcatccaaaatgagaagaaagaaaatgtgatgagagttcgtgggccatgctcaacctatggctgtggttcagattctgtttttgaggtcaaatcccttgatggcatatccaacatcggcagtattatccggaagtggaatggtttgttatcagcaatggcagatgctgaccattttgacattcacttcccactagacctggatgtgaagatgaaagccatgatttttggagcttgcttcctcattgacttcatgtattttgaaagatctccaccacaacgttcaagatagagagacacagcaagccatcaactatggttaattttgaaaaatggaaaagttggattgggcttacagtcagcactcagttatttgcaagtgtatttctttgctttgtagagtatttttattgggtgttaactttgacagctgagagtgggcttgcaagaacacaatctaaaagtgtgtttcaattgagtatctctctagtagaataggagttcatcctgaaaagctgtgactcattaacccagtaaacatatacaaagtaagcttaaaacactataaacatgagataagggaaaatgaatccagagttctcatattaataggtagtgaaacaataaggctttttagagcagactttgttggcataaaataacctggcttctatccctaaccctttcctacctttcctctccgtcaacatgtcctcatactgaagacaaacttgtttcaatgatagtcttcatttttaaaaacaaaaaggcaggcagacagaaataatgatgttttcttgcactaagaaggtactacttgtacacatatatcaaaacctcattctgcaaagtttttgaaggtttcaatgggaaatttgattttattacaaaataaaacattttttaatgttaaagtttatatattccatgcttgttttctcattcactggcatggatgatcaggagctgcctatatatgaaggcagaatcagactatcaggaaaggagctggccagggccacagccagtcaagatctctgagcaacttagagacattggtgtcattatatgaagcttgcatttaatacatttatacataatacatttgtacatttaattcataacgtctcttggtcacagatgccttatatataaaataagttgccagatctctaagattgcctagtacacctttgtatctcatttgatgtgatacccagaagagatcattgttttttgtttttgtttttgtttttttcaagaagatccttcgtgatcaccatgctgttctcatggtaagaactggagttatgtttttaaatttggaaatatgacattttatgtagcactttataaaaagtgaaagcgacaaattccaccgctgcttaatactgctttgcttctttttattgacatgatagataaatatgtatctacacagagtaataataataaaacacagtaaacattctatttctctatggtctacagcatgccagtaaataatatgtaggaccaataataaattatcaattacacatttttgtgttaactaattaaaagcatagtgtataagtgagtacactctaattaacttgcttctgttgcactttagttttctacctgcatatggactgcattttttttttttaacacagtcagtatgtagaatgggatgtattcttctgctgctgcttattaaataaagaaagcctgagtgttcttagatggggttattctgagatgagggtcttagcctacagttctttttgaaatgaaaggtgctttgttttttaattatattcatcttttcagggtaaatttgtttttctgagtttctcgtaatgctcatttttacatgctgctactagcttttttttttaaaaaaagtaaaagttgctgctttctaaaatattaattgccttatatttgaaagtgccattgcaatcgtaagtagactatgtatttcctataatgatgtctgatatttaaataggaaatcagacaaacaatattcagaaagtttaagcatataaactttttatttttaacttgcctaaatccctgtattccaaaacctgctgcatcataataaatatatctatatatatttagcataagacgtgatatttttaatttcttttttaaaaaattatatttgtctcttagagttaaaattttctttatataatattgtcatatgtcatagttttaatacaattcacatgatttctatgtttcttaatgatattttgttgtgtaaaattgatcggattgattaaaaaacaaattctctgg

SEQ ID NO: 4702 - protein, 224 aa, Homo sapiens; identical to SEQ ID NO: 4698

SEQ ID NO: 4703 - DNA, 3237 bp, Homo sapiens
cgagacggggaagccgcgcgcggggaaggagggtccaggcgtgccggacccgcccccagaacccgcgcctagccctcccttccgcgcgcttactttgtttataacttgaaaaatcctctccgtctcccttccctgcctcctttcctttccctttcctctgccagtacaactagacccggcgtctggcgtccccggtgcccagcattctgcggggcaggcggattaattggaattcttcaaaatgtcaggtgtggtacccacagcccctgaacagcctgcaggtgaaatggaaaatcaaacaaaaccaccagatccaaggcctgatgctcctcctgaatacaattctcattttttaccaggaccccctggaacagctgtccctccacctactggctacccaggaggcttgcctatgggatactacagtccacagcaacccagtaccttccctttgtaccagccagttggtggtatccatcctgtccggtatcagcctggcaaatatcctatgccaaatcagtctgttccaataacatggatgccagggccaactcctatggcaaactgccctcctggtctggaatacttagttcagttggacaacatacatgttcttcagcattttgagcctctggaaatgatgacatgttttgaaactaataatagatatgatattaaaaacaactcagaccagatggtttacattgtaaccgaagacacagatgactttaccaggaatgcctatcggacactaaggcccttcgtcctccgggtcactgattgtatgggccgagaaatcatgacaatgcagagacccttcagatgcacctgctgttgcttctgttgcccctctgccagacaagagctggaggtgcagtgtcctcctggtgtcaccattggctttgttgcggaacattggaacctgtgcagggcggtgtacagcatccaaaatgagaagaaagaaaatgtgatgagagttcgtgggccatgctcaacctatggctgtggttcagattctgtttttgaggtcaaatcccttgatggcatatccaacatcggcagtattatccggaagtggaatggtttgttatcagcaatggcagatgctgaccattttgacattcacttcccactagacctggatgtgaagatgaaagccatgatttttggagcttgcttcctcattgacttcatgtattttgaaagatctccaccacaacgttcaagatagagagacacagcaagccatcaactatggttaattttgaaaaatggaaaagttggattgggcttacagtcagcactcagttatttgcaagtgtatttctttgctttgtagagtatttttattgggtgttaactttgacagctgagagtgggcttgcaagaacacaatctaaaagtgtgtttcaattgagtatctctctagtagaataggagttcatcctgaaaagctgtgactcattaacccagtaaacatatacaaagtaagcttaaaacactataaacatgagataagggaaaatgaatccagagttctcatattaataggtagtgaaacaataaggctttttagagcagactttgttggcataaaataacctggcttctatccctaaccctttcctacctttcctctccgtcaacatgtcctcatactgaagacaaacttgtttcaatgatagtcttcatttttaaaaacaaaaaggcaggcagacagaaataatgatgttttcttgcactaagaaggtactacttgtacacatatatcaaaacctcattctgcaaagtttttgaaggtttcaatgggaaatttgattttattacaaaataaaacattttttaatgttaaagtttatatattccatgcttgttttctcattcactggcatggatgatcaggagctgcctatatatgaaggcagaatcagactatcaggaaaggagctggccagggccacagccagtcaagatctctgagcaacttagagacattggtgtcattatatgaagcttgcatttaatacatttatacataatacatttgtacatttaattcataacgtctcttggtcacagatgccttatatataaaataagttgccagatctctaagattgcctagtacacctttgtatctcatttgatgtgatacccagaagagatcattgttttttgtttttgtttttgtttttttcaagaagatccttcgtgatcaccatgctgttctcatggtaagaactggagttatgtttttaaatttggaaatatgacattttatgtagcactttataaaaagtgaaagcgacaaattccaccgctgcttaatactgctttgcttctttttattgacatgatagataaatatgtatctacacagagtaataataataaaacacagtaaacattctatttctctatggtctacagcatgccagtaaataatatgtaggaccaataataaattatcaattacacatttttgtgttaactaattaaaagcatagtgtataagtgagtacactctaattaacttgcttctgttgcactttagttttctacctgcatatggactgcattttttttttttaacacagtcagtatgtagaatgggatgtattcttctgctgctgcttattaaataaagaaagcctgagtgttcttagatggggttattctgagatgagggtcttagcctacagttctttttgaaatgaaaggtgctttgttttttaattatattcatcttttcagggtaaatttgtttttctgagtttctcgtaatgctcatttttacatgctgctactagcttttttttttaaaaaaagtaaaagttgctgctttctaaaatattaattgccttatatttgaaagtgccattgcaatcgtaagtagactatgtatttcctataatgatgtctgatatttaaataggaaatcagacaaacaatattcagaaagtttaagcatataaactttttatttttaacttgcctaaatccctgtattccaaaacctgctgcatcataataaatatatctatatatatttagcataagacgtgatatttttaatttcttttttaaaaaattatatttgtctcttagagttaaaattttctttatataatattgtcatatgtcatagttttaatacaattcacatgatttctatgtttcttaatgatattttgttgtgtaaaattgatcggattgattaaaaaacaaattctctgg

SEQ ID NO: 4704 - protein, 329 aa, Homo sapiens; identical to SEQ ID NO: 4700

SEQ ID NO: 4705 - DNA, 3979 bp, Homo sapiens
agaactctgcgctactgcccacgcatctcacaaagtctactacgccgcgcgttctcggtttcaacgcacctccaggattcagggcttcctaagctgcaattcagcagggctcccttgcttgttctcactctgtgcccccggcaacgaccccgcgcgcctacactcccgtgccgcctcagctactagtccgcaacttctagccccaaaacgctggagctcagaacccagctcaggcaagactaactcggtgttgctcctcccggcgctgacttcgaggcccggctatggacggcgagagcgaggtggatttttctagcaacagcataacccctttgtggcggaggcggtcgattcctcagccccaccaggttctgggccggagcaagccgaggccccagtcctaccagagccccaacgggttactaattacggatttcccggtggaggacggagggacgctcctcgcagcgcagattcccgcccaggtgcccaccgcctcggacagcaggacggtacataggagccccctgcttctgggcgcccagcggagagcggtggccaatggtgggacggcatccccggagtacagggctgcctctcctcgacttcgacggcccaagtcacccaagctccccaaagcggtgcctggcggctccccgaaatccccagcaaatggcgcggtgaccttgcctgcgccgccgccgccgccggttctgcgccccccgcggactcctaacgcgcccgccccctgcacccccgaggaggaccttactgggttgactgccagcccggtgccttcgcccactgcaaatggccttgccgctaataacgactctcctgggtcaggttcgcagtccggccggaaggcaaaggaccccgaacgggggctctttcctgggccccagaaaagttcttcggaacaaaaactccccctccaaaggctgccctcccaggagaacgagctcctcgagaatccttccgtggttttgagtacaaacagccccgccgccctcaaagtggggaagcagcagatcattccgaagagtctggcctcggaaattaaaataagtaaatccaacaatcaaaatgtggagccccacaagagactcctcaaggtgcgcagcatggtggagggcctaggaggacccctgggtcacgcaggggaggagagtgaggtcgataacgacgtggatagcccagggtctctgcggagaggcttgcggtccacgtcttatcgcagggcagtggtcagtggctttgattttgacagtcctaccagctcgaagaagaagaacagaatgtcccagcctgttctgaaagtggtgatggaagacaaggagaagttttccagtctgggaaggataaagaaaaaaatgctgaaaggacaaggaacatttgatggggaagaaaatgctgtcctgtatcaaaactacaaggaaaaggcccttgacattgattctgatgaagagtcagagcccaaagaacagaagtcagatgaaaaaattgtgattcaccataagccattgagatccacatggagccaactctctgcggtgaaaagaaagggattatctcagacagtaagccaggaggaaagaaagagacaagaggctatctttgaagtcatatcctctgaacattcatatttactcagcttggagatcttgatacgaatgtttaaaaattctaaagaactgagtgatacaatgactaaaaccgagaggcaccatcttttctccaatattacagatgtctgtgaggcaagcaaaaagttctttatagagttggaagcaagacatcagaataatatcttcatagatgacataagtgacattgtggaaaaacacacagcatccacatttgacccatatgtgaaatactgcacaaatgaagtctaccaacaacgaacactacaaaaattgttagctaccaatccatcctttaaggaagtattgtcaaggattgagtcccatgaagactgtaggaacttacccatgatctcttttctcattctccccatgcagagggtgacccgccttcccctgctgatggatactatctgtcaaaaaacacctaaggactctccgaagtatgaagtctgcaaaagagccttgaaggaagttagcaagttggttcgactatgcaatgagggcgcccggaagatggaaaggactgagatgatgtacacaattaactcccagctggaatttaaaattaagccttttcctttagtctcctcttcccggtggttggtaaaaagaggtgaattgacagcctatgttgaagacactgtgcttttctcaagaaggacatccaaacagcaagtctacttctttctctttaacgatgtgctcattatcaccaagaagaagagtgaagaaagttacaacgtcaatgattattccttaagagatcagctattggtggaatcttgtgacaatgaagagcttaattcttctccagggaagaacagctccacaatgctctattcaagacagagctctgccagtcagtcacctctttactctgacagtccttagtaaccacgcgaatgagaaagtggagatgctactaggagctgagacgcagagcgagcgagcccgctggataactgccctgggacacagcagcgggaagccgcctgcagaccgaacctcactgacccaggtggaaatcgttaggtcatttactgctaagcagccagatgaactctccctgcaggtggctgacgtcgtcctcatctatcaacgtgtcagcgatggctggtatgagggggaacgactacgagatggagaaagaggctggtttcctatggaatgtgccaaggagataacatgtcaagctacaattgataagaatgtggagagaatgggacgcttgctaggactggagaccaacgtgtagtctctcagatggtcttttgttactgcaagatttgcacgacacttaccgggctggttggttctgggctagttttattgttaattttgtcacagcctatttaattaaaagaacgaaaacacttgcctttaagcttgccaggttgttctgctctctcatgagaagagcttggatacagtgagtttgcacagctcagtttttacctaaccacacacttgcagacctcctgaggtacacagaatagctgagcagttcacttcagggatcaggtcatctctgctcctcctagtttcaccatgttctggcaataaaaaacacatattatatcctggttttctctatccttgcattactaaggtgactgtctctctttatacatccttgtatggttctcccagtattagcaagattgtatatctgtaaagaatgtccagttttgtaaatatttccctgcctttttttttctttttttacatctgattttaatgcttcgttaacttcaaaaggaactggtagagttcagaaggtgagctgttgtttttctaaacctcttcccaggaaggggacattgacacttgaatttttgtcacctttttcctcattagaaggaaagtagaaagccttactttaggatttttaaaaaaaaatccatctcaccccatattgttcttaaataagtatagactaattaacctaagctacctttaacaacgtagaatttagatgggttcatatatgtgagaaaaacctgaatataggacaggggtcctacttttttccccacctctgtcgcccaggctagagtatagtggtgtgatcttggcccactgcaacctctgcttcctaggttcaagtgattctcctgcctcagcctcccaagtagctgggattgtaagagtatgccaccacgcccagctactttttgtatttttagtagagacagggtttcatcatgttggccaggatggtctcttaactcctgccctcaagtgatccaccagagaggagatcctcggcctccccaagtgctgggattataggcatgagccaccgtgcccagcctactttctaattaatt

SEQ ID NO: 4706 - protein, 751 aa, Homo sapiens
MDGESEVDFSSNSITPLWRRRSIPQPHQVLGRSKPRPQSYQSPNGLLITDFPVEDGGTLLAAQIPAQVPTASDSRTVHRSPLLLGAQRRAVANGGTASPEYRAASPRLRRPKSPKLPKAVPGGSPKSPANGAVTLPAPPPPPVLRPPRTPNAPAPCTPEEDLTGLTASPVPSPTANGLAANNDSPGSGSQSGRKAKDPERGLFPGPQKSSSEQKLPLQRLPSQENELLENPSVVLSTNSPAALKVGKQQIIPKSLASEIKISKSNNQNVEPHKRLLKVRSMVEGLGGPLGHAGEESEVDNDVDSPGSLRRGLRSTSYRRAVVSGFDFDSPTSSKKKNRMSQPVLKVVMEDKEKFSSLGRIKKKMLKGQGTFDGEENAVLYQNYKEKALDIDSDEESEPKEQKSDEKIVIHHKPLRSTWSQLSAVKRKGLSQTVSQEERKRQEAIFEVISSEHSYLLSLEILIRMFKNSKELSDTMTKTERHHLFSNITDVCEASKKFFIELEARHQNNIFIDDISDIVEKHTASTFDPYVKYCTNEVYQQRTLQKLLATNPSFKEVLSRIESHEDCRNLPMISFLILPMQRVTRLPLLMDTICQKTPKDSPKYEVCKRALKEVSKLVRLCNEGARKMERTEMMYTINSQLEFKIKPFPLVSSSRWLVKRGELTAYVEDTVLFSRRTSKQQVYFFLFNDVLIITKKKSEESYNVNDYSLRDQLLVESCDNEELNSSPGKNSSTMLYSRQSSASQSPLYSDSP

SEQ ID NO: 4707 - DNA, 5258 bp, Homo sapiens
agaactctgcgctactgcccacgcatctcacaaagtctactacgccgcgcgttctcggtttcaacgcacctccaggattcagggcttcctaagctgcaattcagcagggctcccttgcttgttctcactctgtgcccccggcaacgaccccgcgcgcctacactcccgtgccgcctcagctactagtccgcaacttctagccccaaaacgctggagctcagaacccagctcaggcaagactaactcggtgttgctcctcccggcgctgacttcgaggcccggctatggacggcgagagcgaggtggatttttctagcaacagcataacccctttgtggcggaggcggtcgattcctcagccccaccaggttctgggccggagcaagccgaggccccagtcctaccagagccccaacgggttactaattacggatttcccggtggaggacggagggacgctcctcgcagcgcagattcccgcccaggtgcccaccgcctcggacagcaggacggtacataggagccccctgcttctgggcgcccagcggagagcggtggccaatggtgggacggcatccccggagtacagggctgcctctcctcgacttcgacggcccaagtcacccaagctccccaaagcggtgcctggcggctccccgaaatccccagcaaatggcgcggtgaccttgcctgcgccgccgccgccgccggttctgcgccccccgcggactcctaacgcgcccgccccctgcacccccgaggaggaccttactgggttgactgccagcccggtgccttcgcccactgcaaatggccttgccgctaataacgactctcctgggtcaggttcgcagtccggccggaaggcaaaggaccccgaacgggggctctttcctgggccccagaaaagttcttcggaacaaaaactccccctccaaaggctgccctcccaggagaacgagctcctcgagaatccttccgtggttttgagtacaaacagccccgccgccctcaaagtggggaagcagcagatcattccgaagagtctggcctcggaaattaaaataagtaaatccaacaatcaaaatgtggagccccacaagagactcctcaaggtgcgcagcatggtggagggcctaggaggacccctgggtcacgcaggggaggagagtgaggtcgataacgacgtggatagcccagggtctctgcggagaggcttgcggtccacgtcttatcgcagggcagtggtcagtggctttgattttgacagtcctaccagctcgaagaagaagaacagaatgtcccagcctgttctgaaagtggtgatggaagacaaggagaagttttccagtctgggaaggataaagaaaaaaatgctgaaaggacaaggaacatttgatggggaagaaaatgctgtcctgtatcaaaactacaaggaaaaggcccttgacattgattctgatgaagagtcagagcccaaagaacagaagtcagatgaaaaaattgtgattcaccataagccattgagatccacatggagccaactctctgcggtgaaaagaaagggattatctcagacagtaagccaggaggaaagaaagagacaagaggctatctttgaagtcatatcctctgaacattcatatttactcagcttggagatcttgatacgaatgtttaaaaattctaaagaactgagtgatacaatgactaaaaccgagaggcaccatcttttctccaatattacagatgtctgtgaggcaagcaaaaagttctttatagagttggaagcaagacatcagaataatatcttcatagatgacataagtgacattgtggaaaaacacacagcatccacatttgacccatatgtgaaatactgcacaaatgaagtctaccaacaacgaacactacaaaaattgttagctaccaatccatcctttaaggaagtattgtcaaggattgagtcccatgaagactgtaggaacttacccatgatctcttttctcattctccccatgcagagggtgacccgccttcccctgctgatggatactatctgtcaaaaaacacctaaggactctccgaagtatgaagtctgcaaaagagccttgaaggaagttagcaagttggttcgactatgcaatgagggcgcccggaagatggaaaggactgagatgatgtacacaattaactcccagctggaatttaaaattaagccttttcctttagtctcctcttcccggtggttggtaaaaagaggtgaattgacagcctatgttgaagacactgtgcttttctcaagaaggacatccaaacagcaagtctacttctttctctttaacgatgtgctcattatcaccaagaagaagagtgaagaaagttacaacgtcaatgattattccttaagagatcagctattggtggaatcttgtgacaatgaagagcttaattcttctccagggaagaacagctccacaatgctctattcaagacagagctctgccagtcagtcacctctttactctgacagtccttagtaaccacgcgaatgagaaagtggagatgctactaggagctgagacgcagagcgagcgagcccgctggataactgccctgggacacagcagcgggaagccgcctgcagaccgaacctcactgacccaggtggaaatcgttaggtcatttactgctaagcagccagatgaactctccctgcaggtggctgacgtcgtcctcatctatcaacgtgtcagcgatggctggtatgagggggaacgactacgagatggagaaagaggctggtttcctatggaatgtgccaaggagataacatgtcaagctacaattgataagaatgtggagagaatgggacgcttgctaggactggagaccaacgtgtagtctctcagatggtcttttgttactgcaagatttgcacgacacttaccgggctggttggttctgggctagttttattgttaattttgtcacagcctatttaattaaaagaacgaaaacacttgcctttaagcttgccaggttgttctgctctctcatgagaagagcttggatacagtgagtttgcacagctcagtttttacctaaccacacacttgcagacctcctgaggtacacagaatagctgagcagttcacttcagggatcaggtcatctctgctcctcctagtttcaccatgttctggcaataaaaaacacatattatatcctggttttctctatccttgcattactaaggtgactgtctctctttatacatccttgtatggttctcccagtattagcaagattgtatatctgtaaagaatgtccagttttgtaaatatttccctgcctttttttttctttttttacatctgattttaatgcttcgttaacttcaaaaggaactggtagagttcagaaggtgagctgttgtttttctaaacctcttcccaggaaggggacattgacacttgaatttttgtcacctttttcctcattagaaggaaagtagaaagccttactttaggatttttaaaaaaaaatccatctcaccccatattgttcttaaataagtatagactaattaacctaagctacctttaacaacgtagaatttagatgggttcatatatgtgagaaaaacctgaatataggacaggggtcctacttttttccccacctctgtcgcccaggctagagtatagtggtgtgatcttggcccactgcaacctctgcttcctaggttcaagtgattctcctgcctcagcctcccaagtagctgggattgtaagagtatgccaccacgcccagctactttttgtatttttagtagagacagggtttcatcatgttggccaggatggtctcttaactcctgccctcaagtgatccaccagagaggagatcctcggcctccccaagtgctgggattataggcatgagccaccgtgcccagcctactttctaattaattaaaaaaaaaaaaaaaaaaaaaaaaaaaccttcccaaatgagctgataaaaaactgacgtgaggctgctttgccttcaataatacctagttttcagctgttccaactcgtttccaaatagaaattagctggaacacactacagtaatctcaaggaagggaaaattaggccttaaaagataccaagaagtcagcatggtacccaattgaaaccttttgaccttagtgggaattcattctatttgcactaaaagccttaacttgctgtattcagagtccctcttaactgtgagtttctatagaactttactttttccactagtgcacagagagagaaaggttatcttaatagtcggtttcatggagatgaaggatgggagattaagaggggggaaatgatttttactggcagctatattccctctctgttctatttgctttaacaaagggataaaacctggcaaagtgtacattattggaggactcaaatctgtatgtgacatgtcccaactactgtccgctaactagttatccaaattgtaaagctacagaagcccagttgaggggtaagtgtgcctggctcacacagcctgcaccctgtcacctcggcaatgagccagtgtggggcactggggacttctaacccttggattgctctttttgacctgtgcataccttctaattgtaaaatatatttcagaccgtgagtaccttgagatctgagcaactgtgttaatgaagtaatagcaatggtccacagtgaaagatgtgttggggtttgcaaaacaagcattccgtcacctctttaataatgtcacagactttttaaaagagaggctatcaagttgtaatataatctgtcatgttttatttaggaaggaaggtaaatttgtgcttgcacggggatcattttgtattatttttgctaatacccagttgaagctaaaaagcaactatttgaatcctgtgaattaatttataagaatgttaaacagctttggaaatacatgcatcttatgaatcatagccttatttagcaagatcaatgttaaagtgttgttatatggcaagtatttaacacattcacagtgtttgtttgatttcaactgtgaattgtcttaagttttttcaaacctagttgtttctatggacacctgctctgaattgtacattgacttcattactaaagaacaaaaatgttcatttttgtcccagtaaattgagactgcttgtacactttcagaaaaatatgtgaatttataaagattttgtagatacttgt

SEQ ID NO: 4708 - protein, 751 aa, Homo sapiens; identical to SEQ ID NO: 4706

SEQ ID NO: 4709 - DNA, 3906 bp, Homo sapiens
aagtgtgggggcgtagtcaggcgtgggggcgggccggcgccggcgccgcggtcggcggcagcgctctcctaagctctcgcggctgcgcttcggtcccggacccgggccacccacggggtagtgggtgctcctcggccccggacattgcaagccccagaaggcaagactaactcggtgttgctcctcccggcgctgacttcgaggcccggctatggacggcgagagcgaggtggatttttctagcaacagcataacccctttgtggcggaggcggtcgattcctcagccccaccaggttctgggccggagcaagccgaggccccagtcctaccagagccccaacgggttactaattacggatttcccggtggaggacggagggacgctcctcgcagcgcagattcccgcccaggtgcccaccgcctcggacagcaggacggtacataggagccccctgcttctgggcgcccagcggagagcggtggccaatggtgggacggcatccccggagtacagggctgcctctcctcgacttcgacggcccaagtcacccaagctccccaaagcggtgcctggcggctccccgaaatccccagcaaatggcgcggtgaccttgcctgcgccgccgccgccgccggttctgcgccccccgcggactcctaacgcgcccgccccctgcacccccgaggaggaccttactgggttgactgccagcccggtgccttcgcccactgcaaatggccttgccgctaataacgactctcctgggtcaggttcgcagtccggccggaaggcaaaggaccccgaacgggggctctttcctgggccccagaaaagttcttcggaacaaaaactccccctccaaaggctgccctcccaggagaacgagctcctcgagaatccttccgtggttttgagtacaaacagccccgccgccctcaaagtggggaagcagcagatcattccgaagagtctggcctcggaaattaaaataagtaaatccaacaatcaaaatgtggagccccacaagagactcctcaaggtgcgcagcatggtggagggcctaggaggacccctgggtcacgcaggggaggagagtgaggtcgataacgacgtggatagcccagggtctctgcggagaggcttgcggtccacgtcttatcgcagggcagtggtcagtggctttgattttgacagtcctaccagctcgaagaagaagaacagaatgtcccagcctgttctgaaagtggtgatggaagacaaggagaagttttccagtctgggaaggataaagaaaaaaatgctgaaaggacaaggaacatttgatggggaagaaaatgctgtcctgtatcaaaactacaaggaaaaggcccttgacattgattctgatgaagagtcagagcccaaagaacagaagtcagatgaaaaaattgtgattcaccataagccattgagatccacatggagccaactctctgcggtgaaaagaaagggattatctcagacagtaagccaggaggaaagaaagagacaagaggctatctttgaagtcatatcctctgaacattcatatttactcagcttggagatcttgatacgaatgtttaaaaattctaaagaactgagtgatacaatgactaaaaccgagaggcaccatcttttctccaatattacagatgtctgtgaggcaagcaaaaagttctttatagagttggaagcaagacatcagaataatatcttcatagatgacataagtgacattgtggaaaaacacacagcatccacatttgacccatatgtgaaatactgcacaaatgaagtctaccaacaacgaacactacaaaaattgttagctaccaatccatcctttaaggaagtattgtcaaggattgagtcccatgaagactgtaggaacttacccatgatctcttttctcattctccccatgcagagggtgacccgccttcccctgctgatggatactatctgtcaaaaaacacctaaggactctccgaagtatgaagtctgcaaaagagccttgaaggaagttagcaagttggttcgactatgcaatgagggcgcccggaagatggaaaggactgagatgatgtacacaattaactcccagctggaatttaaaattaagccttttcctttagtctcctcttcccggtggttggtaaaaagaggtgaattgacagcctatgttgaagacactgtgcttttctcaagaaggacatccaaacagcaagtctacttctttctctttaacgatgtgctcattatcaccaagaagaagagtgaagaaagttacaacgtcaatgattattccttaagagatcagctattggtggaatcttgtgacaatgaagagcttaattcttctccagggaagaacagctccacaatgctctattcaagacagagctctgccagtcagtcacctctttactctgacagtccttagtaaccacgcgaatgagaaagtggagatgctactaggagctgagacgcagagcgagcgagcccgctggataactgccctgggacacagcagcgggaagccgcctgcagaccgaacctcactgacccaggtggaaatcgttaggtcatttactgctaagcagccagatgaactctccctgcaggtggctgacgtcgtcctcatctatcaacgtgtcagcgatggctggtatgagggggaacgactacgagatggagaaagaggctggtttcctatggaatgtgccaaggagataacatgtcaagctacaattgataagaatgtggagagaatgggacgcttgctaggactggagaccaacgtgtagtctctcagatggtcttttgttactgcaagatttgcacgacacttaccgggctggttggttctgggctagttttattgttaattttgtcacagcctatttaattaaaagaacgaaaacacttgcctttaagcttgccaggttgttctgctctctcatgagaagagcttggatacagtgagtttgcacagctcagtttttacctaaccacacacttgcagacctcctgaggtacacagaatagctgagcagttcacttcagggatcaggtcatctctgctcctcctagtttcaccatgttctggcaataaaaaacacatattatatcctggttttctctatccttgcattactaaggtgactgtctctctttatacatccttgtatggttctcccagtattagcaagattgtatatctgtaaagaatgtccagttttgtaaatatttccctgcctttttttttctttttttacatctgattttaatgcttcgttaacttcaaaaggaactggtagagttcagaaggtgagctgttgtttttctaaacctcttcccaggaaggggacattgacacttgaatttttgtcacctttttcctcattagaaggaaagtagaaagccttactttaggatttttaaaaaaaaatccatctcaccccatattgttcttaaataagtatagactaattaacctaagctacctttaacaacgtagaatttagatgggttcatatatgtgagaaaaacctgaatataggacaggggtcctacttttttccccacctctgtcgcccaggctagagtatagtggtgtgatcttggcccactgcaacctctgcttcctaggttcaagtgattctcctgcctcagcctcccaagtagctgggattgtaagagtatgccaccacgcccagctactttttgtatttttagtagagacagggtttcatcatgttggccaggatggtctcttaactcctgccctcaagtgatccaccagagaggagatcctcggcctccccaagtgctgggattataggcatgagccaccgtgcccagcctactttctaattaatt

SEQ ID NO: 4710 - protein, 751 aa, Homo sapiens; identical to SEQ ID NO: 4706

SEQ ID NO: 4711 - DNA, 5120 bp, Homo sapiens
aagtgtgggggcgtagtcaggcgtgggggcgggccggcgccggcgccgcggtcggcggcagcgctctcctaagctctcgcggctgcgcttcggtcccggacccgggccacccacggggtagtgggtgctcctcggccccggacattgcaagccccagaaggcaagactaactcggtgttgctcctcccggcgctgacttcgaggcccggctatggacggcgagagcgaggtggatttttctagcaacagcataacccctttgtggcggaggcggtcgattcctcagccccaccaggttctgggccggagcaagccgaggccccagtcctaccagagccccaacgggttactaattacggatttcccggtggaggacggagggacgctcctcgcagcgcagattcccgcccaggtgcccaccgcctcggacagcaggacggtacataggagccccctgcttctgggcgcccagcggagagcggtggccaatggtgggacggcatccccggagtacagggctgcctctcctcgacttcgacggcccaagtcacccaagctccccaaagcggtgcctggcggctccccgaaatccccagcaaatggcgcggtgaccttgcctgcgccgccgccgccgccggttctgcgccccccgcggactcctaacgcgcccgccccctgcacccccgaggaggaccttactgggttgactgccagcccggtgccttcgcccactgcaaatggccttgccgctaataacgactctcctgggtcaggttcgcagtccggccggaaggcaaaggaccccgaacgggggctctttcctgggccccagaaaagttcttcggaacaaaaactccccctccaaaggctgccctcccaggagaacgagctcctcgagaatccttccgtggttttgagtacaaacagccccgccgccctcaaagtggggaagcagcagatcattccgaagagtctggcctcggaaattaaaataagtaaatccaacaatcaaaatgtggagccccacaagagactcctcaaggtgcgcagcatggtggagggcctaggaggacccctgggtcacgcaggggaggagagtgaggtcgataacgacgtggatagcccagggtctctgcggagaggcttgcggtccacgtcttatcgcagggcagtggtcagtggctttgattttgacagtcctaccagctcgaagaagaagaacagaatgtcccagcctgttctgaaagtggtgatggaagacaaggagaagttttccagtctgggaaggataaagaaaaaaatgctgaaaggacaaggaacatttgatggggaagaaaatgctgtcctgtatcaaaactacaaggaaaaggcccttgacattgattctgatgaagagtcagagcccaaagaacagaagtcagatgaaaaaattgtgattcaccataagccattgagatccacatggagccaactctctgcggtgaaaagaaagggattatctcagacagtaagccaggaggaaagaaagagacaagaggctatctttgaagtcatatcctctgaacattcatatttactcagcttggagatcttgatacgaatgtttaaaaattctaaagaactgagtgatacaatgactaaaaccgagaggcaccatcttttctccaatattacagatgtctgtgaggcaagcaaaaagttctttatagagttggaagcaagacatcagaataatatcttcatagatgacataagtgacattgtggaaaaacacacagcatccacatttgacccatatgtgaaatactgcacaaatgaagtctaccaacaacgaacactacaaaaattgttagctaccaatccatcctttaaggaagtattgtcaaggattgagtcccatgaagactgtaggaacttacccatgatctcttttctcattctccccatgcagagggtgacccgccttcccctgctgatggatactatctgtcaaaaaacacctaaggactctccgaagtatgaagtctgcaaaagagccttgaaggaagttagcaagttggttcgactatgcaatgagggcgcccggaagatggaaaggactgagatgatgtacacaattaactcccagctggaatttaaaattaagccttttcctttagtctcctcttcccggtggttggtaaaaagaggtgaattgacagcctatgttgaagacactgtgcttttctcaagaaggacatccaaacagcaagtctacttctttctctttaacgatgtgctcattatcaccaagaagaagagtgaagaaagttacaacgtcaatgattattccttaagagatcagctattggtggaatcttgtgacaatgaagagcttaattcttctccagggaagaacagctccacaatgctctattcaagacagagctctgccagtcagtcacctctttactctgacagtccttagtaaccacgcgaatgagaaagtggagatgctactaggagctgagacgcagagcgagcgagcccgctggataactgccctgggacacagcagcgggaagccgcctgcagaccgaacctgtggctgacgtcgtcctcatctatcaacgtgtcagcgatggctggtatgagggggaacgactacgagatggagaaagaggctggtttcctatggaatgtgccaaggagataacatgtcaagctacaattgataagaatgtggagagaatgggacgcttgctaggactggagaccaacgtgtagtctctcagatggtcttttgttactgcaagatttgcacgacacttaccgggctggttggttctgggctagttttattgttaattttgtcacagcctatttaattaaaagaacgaaaacacttgcctttaagcttgccaggttgttctgctctctcatgagaagagcttggatacagtgagtttgcacagctcagtttttacctaaccacacacttgcagacctcctgaggtacacagaatagctgagcagttcacttcagggatcaggtcatctctgctcctcctagtttcaccatgttctggcaataaaaaacacatattatatcctggttttctctatccttgcattactaaggtgactgtctctctttatacatccttgtatggttctcccagtattagcaagattgtatatctgtaaagaatgtccagttttgtaaatatttccctgcctttttttttctttttttacatctgattttaatgcttcgttaacttcaaaaggaactggtagagttcagaaggtgagctgttgtttttctaaacctcttcccaggaaggggacattgacacttgaatttttgtcacctttttcctcattagaaggaaagtagaaagccttactttaggatttttaaaaaaaaatccatctcaccccatattgttcttaaataagtatagactaattaacctaagctacctttaacaacgtagaatttagatgggttcatatatgtgagaaaaacctgaatataggacaggggtcctacttttttccccacctctgtcgcccaggctagagtatagtggtgtgatcttggcccactgcaacctctgcttcctaggttcaagtgattctcctgcctcagcctcccaagtagctgggattgtaagagtatgccaccacgcccagctactttttgtatttttagtagagacagggtttcatcatgttggccaggatggtctcttaactcctgccctcaagtgatccaccagagaggagatcctcggcctccccaagtgctgggattataggcatgagccaccgtgcccagcctactttctaattaattaaaaaaaaaaaaaaaaaaaaaaaaaaaccttcccaaatgagctgataaaaaactgacgtgaggctgctttgccttcaataatacctagttttcagctgttccaactcgtttccaaatagaaattagctggaacacactacagtaatctcaaggaagggaaaattaggccttaaaagataccaagaagtcagcatggtacccaattgaaaccttttgaccttagtgggaattcattctatttgcactaaaagccttaacttgctgtattcagagtccctcttaactgtgagtttctatagaactttactttttccactagtgcacagagagagaaaggttatcttaatagtcggtttcatggagatgaaggatgggagattaagaggggggaaatgatttttactggcagctatattccctctctgttctatttgctttaacaaagggataaaacctggcaaagtgtacattattggaggactcaaatctgtatgtgacatgtcccaactactgtccgctaactagttatccaaattgtaaagctacagaagcccagttgaggggtaagtgtgcctggctcacacagcctgcaccctgtcacctcggcaatgagccagtgtggggcactggggacttctaacccttggattgctctttttgacctgtgcataccttctaattgtaaaatatatttcagaccgtgagtaccttgagatctgagcaactgtgttaatgaagtaatagcaatggtccacagtgaaagatgtgttggggtttgcaaaacaagcattccgtcacctctttaataatgtcacagactttttaaaagagaggctatcaagttgtaatataatctgtcatgttttatttaggaaggaaggtaaatttgtgcttgcacggggatcattttgtattatttttgctaatacccagttgaagctaaaaagcaactatttgaatcctgtgaattaatttataagaatgttaaacagctttggaaatacatgcatcttatgaatcatagccttatttagcaagatcaatgttaaagtgttgttatatggcaagtatttaacacattcacagtgtttgtttgatttcaactgtgaattgtcttaagttttttcaaacctagttgtttctatggacacctgctctgaattgtacattgacttcattactaaagaacaaaaatgttcatttttgtcccagtaaattgagactgcttgtacactttcagaaaaatatgtgaatttataaagattttgtagatacttgt

SEQ ID NO: 4712 - protein, 751 aa, Homo sapiens; identical to SEQ ID NO: 4706

SEQ ID NO: 4713 - DNA, 5185 bp, Homo sapiens
aagtgtgggggcgtagtcaggcgtgggggcgggccggcgccggcgccgcggtcggcggcagcgctctcctaagctctcgcggctgcgcttcggtcccggacccgggccacccacggggtagtgggtgctcctcggccccggacattgcaagccccagaaggcaagactaactcggtgttgctcctcccggcgctgacttcgaggcccggctatggacggcgagagcgaggtggatttttctagcaacagcataacccctttgtggcggaggcggtcgattcctcagccccaccaggttctgggccggagcaagccgaggccccagtcctaccagagccccaacgggttactaattacggatttcccggtggaggacggagggacgctcctcgcagcgcagattcccgcccaggtgcccaccgcctcggacagcaggacggtacataggagccccctgcttctgggcgcccagcggagagcggtggccaatggtgggacggcatccccggagtacagggctgcctctcctcgacttcgacggcccaagtcacccaagctccccaaagcggtgcctggcggctccccgaaatccccagcaaatggcgcggtgaccttgcctgcgccgccgccgccgccggttctgcgccccccgcggactcctaacgcgcccgccccctgcacccccgaggaggaccttactgggttgactgccagcccggtgccttcgcccactgcaaatggccttgccgctaataacgactctcctgggtcaggttcgcagtccggccggaaggcaaaggaccccgaacgggggctctttcctgggccccagaaaagttcttcggaacaaaaactccccctccaaaggctgccctcccaggagaacgagctcctcgagaatccttccgtggttttgagtacaaacagccccgccgccctcaaagtggggaagcagcagatcattccgaagagtctggcctcggaaattaaaataagtaaatccaacaatcaaaatgtggagccccacaagagactcctcaaggtgcgcagcatggtggagggcctaggaggacccctgggtcacgcaggggaggagagtgaggtcgataacgacgtggatagcccagggtctctgcggagaggcttgcggtccacgtcttatcgcagggcagtggtcagtggctttgattttgacagtcctaccagctcgaagaagaagaacagaatgtcccagcctgttctgaaagtggtgatggaagacaaggagaagttttccagtctgggaaggataaagaaaaaaatgctgaaaggacaaggaacatttgatggggaagaaaatgctgtcctgtatcaaaactacaaggaaaaggcccttgacattgattctgatgaagagtcagagcccaaagaacagaagtcagatgaaaaaattgtgattcaccataagccattgagatccacatggagccaactctctgcggtgaaaagaaagggattatctcagacagtaagccaggaggaaagaaagagacaagaggctatctttgaagtcatatcctctgaacattcatatttactcagcttggagatcttgatacgaatgtttaaaaattctaaagaactgagtgatacaatgactaaaaccgagaggcaccatcttttctccaatattacagatgtctgtgaggcaagcaaaaagttctttatagagttggaagcaagacatcagaataatatcttcatagatgacataagtgacattgtggaaaaacacacagcatccacatttgacccatatgtgaaatactgcacaaatgaagtctaccaacaacgaacactacaaaaattgttagctaccaatccatcctttaaggaagtattgtcaaggattgagtcccatgaagactgtaggaacttacccatgatctcttttctcattctccccatgcagagggtgacccgccttcccctgctgatggatactatctgtcaaaaaacacctaaggactctccgaagtatgaagtctgcaaaagagccttgaaggaagttagcaagttggttcgactatgcaatgagggcgcccggaagatggaaaggactgagatgatgtacacaattaactcccagctggaatttaaaattaagccttttcctttagtctcctcttcccggtggttggtaaaaagaggtgaattgacagcctatgttgaagacactgtgcttttctcaagaaggacatccaaacagcaagtctacttctttctctttaacgatgtgctcattatcaccaagaagaagagtgaagaaagttacaacgtcaatgattattccttaagagatcagctattggtggaatcttgtgacaatgaagagcttaattcttctccagggaagaacagctccacaatgctctattcaagacagagctctgccagtcagtcacctctttactctgacagtccttagtaaccacgcgaatgagaaagtggagatgctactaggagctgagacgcagagcgagcgagcccgctggataactgccctgggacacagcagcgggaagccgcctgcagaccgaacctcactgacccaggtggaaatcgttaggtcatttactgctaagcagccagatgaactctccctgcaggtggctgacgtcgtcctcatctatcaacgtgtcagcgatggctggtatgagggggaacgactacgagatggagaaagaggctggtttcctatggaatgtgccaaggagataacatgtcaagctacaattgataagaatgtggagagaatgggacgcttgctaggactggagaccaacgtgtagtctctcagatggtcttttgttactgcaagatttgcacgacacttaccgggctggttggttctgggctagttttattgttaattttgtcacagcctatttaattaaaagaacgaaaacacttgcctttaagcttgccaggttgttctgctctctcatgagaagagcttggatacagtgagtttgcacagctcagtttttacctaaccacacacttgcagacctcctgaggtacacagaatagctgagcagttcacttcagggatcaggtcatctctgctcctcctagtttcaccatgttctggcaataaaaaacacatattatatcctggttttctctatccttgcattactaaggtgactgtctctctttatacatccttgtatggttctcccagtattagcaagattgtatatctgtaaagaatgtccagttttgtaaatatttccctgcctttttttttctttttttacatctgattttaatgcttcgttaacttcaaaaggaactggtagagttcagaaggtgagctgttgtttttctaaacctcttcccaggaaggggacattgacacttgaatttttgtcacctttttcctcattagaaggaaagtagaaagccttactttaggatttttaaaaaaaaatccatctcaccccatattgttcttaaataagtatagactaattaacctaagctacctttaacaacgtagaatttagatgggttcatatatgtgagaaaaacctgaatataggacaggggtcctacttttttccccacctctgtcgcccaggctagagtatagtggtgtgatcttggcccactgcaacctctgcttcctaggttcaagtgattctcctgcctcagcctcccaagtagctgggattgtaagagtatgccaccacgcccagctactttttgtatttttagtagagacagggtttcatcatgttggccaggatggtctcttaactcctgccctcaagtgatccaccagagaggagatcctcggcctccccaagtgctgggattataggcatgagccaccgtgcccagcctactttctaattaattaaaaaaaaaaaaaaaaaaaaaaaaaaaccttcccaaatgagctgataaaaaactgacgtgaggctgctttgccttcaataatacctagttttcagctgttccaactcgtttccaaatagaaattagctggaacacactacagtaatctcaaggaagggaaaattaggccttaaaagataccaagaagtcagcatggtacccaattgaaaccttttgaccttagtgggaattcattctatttgcactaaaagccttaacttgctgtattcagagtccctcttaactgtgagtttctatagaactttactttttccactagtgcacagagagagaaaggttatcttaatagtcggtttcatggagatgaaggatgggagattaagaggggggaaatgatttttactggcagctatattccctctctgttctatttgctttaacaaagggataaaacctggcaaagtgtacattattggaggactcaaatctgtatgtgacatgtcccaactactgtccgctaactagttatccaaattgtaaagctacagaagcccagttgaggggtaagtgtgcctggctcacacagcctgcaccctgtcacctcggcaatgagccagtgtggggcactggggacttctaacccttggattgctctttttgacctgtgcataccttctaattgtaaaatatatttcagaccgtgagtaccttgagatctgagcaactgtgttaatgaagtaatagcaatggtccacagtgaaagatgtgttggggtttgcaaaacaagcattccgtcacctctttaataatgtcacagactttttaaaagagaggctatcaagttgtaatataatctgtcatgttttatttaggaaggaaggtaaatttgtgcttgcacggggatcattttgtattatttttgctaatacccagttgaagctaaaaagcaactatttgaatcctgtgaattaatttataagaatgttaaacagctttggaaatacatgcatcttatgaatcatagccttatttagcaagatcaatgttaaagtgttgttatatggcaagtatttaacacattcacagtgtttgtttgatttcaactgtgaattgtcttaagttttttcaaacctagttgtttctatggacacctgctctgaattgtacattgacttcattactaaagaacaaaaatgttcatttttgtcccagtaaattgagactgcttgtacactttcagaaaaatatgtgaatttataaagattttgtagatacttgt

SEQ ID NO: 4714 - protein, 751 aa, Homo sapiens; identical to SEQ ID NO: 4706

SEQ ID NO: 4715 - DNA, 3110 bp, Homo sapiens
agcttttactttcagtaaacttaaaaggatttcaatttagctttggtcactgggtttttctccttttgtagccttttcctttagtctcctcttcccggtggttggtaaaaagaggtgaattgacagcctatgttgaagacactgtgcttttctcaagaaggacatccaaacagcaagtctacttctttctctttaacgatgtgctcattatcaccaagaagaagagtgaagaaagttacaacgtcaatgattattccttaagagatcagctattggtggaatcttgtgacaatgaagagcttaattcttctccagggaagaacagctccacaatgctctattcaagacagagctctgccagtcagtcacctctttactctgacagtccttagtaaccacgcgaatgagaaagtggagatgctactaggagctgagacgcagagcgagcgagcccgctggataactgccctgggacacagcagcgggaagccgcctgcagaccgaacctcactgacccaggtggaaatcgttaggtcatttactgctaagcagccagatgaactctccctgcaggtggctgacgtcgtcctcatctatcaacgtgtcagcgatggctggtatgagggggaacgactacgagatggagaaagaggctggtttcctatggaatgtgccaaggagataacatgtcaagctacaattgataagaatgtggagagaatgggacgcttgctaggactggagaccaacgtgtagtctctcagatggtcttttgttactgcaagatttgcacgacacttaccgggctggttggttctgggctagttttattgttaattttgtcacagcctatttaattaaaagaacgaaaacacttgcctttaagcttgccaggttgttctgctctctcatgagaagagcttggatacagtgagtttgcacagctcagtttttacctaaccacacacttgcagacctcctgaggtacacagaatagctgagcagttcacttcagggatcaggtcatctctgctcctcctagtttcaccatgttctggcaataaaaaacacatattatatcctggttttctctatccttgcattactaaggtgactgtctctctttatacatccttgtatggttctcccagtattagcaagattgtatatctgtaaagaatgtccagttttgtaaatatttccctgcctttttttttctttttttacatctgattttaatgcttcgttaacttcaaaaggaactggtagagttcagaaggtgagctgttgtttttctaaacctcttcccaggaaggggacattgacacttgaatttttgtcacctttttcctcattagaaggaaagtagaaagccttactttaggatttttaaaaaaaaatccatctcaccccatattgttcttaaataagtatagactaattaacctaagctacctttaacaacgtagaatttagatgggttcatatatgtgagaaaaacctgaatataggacaggggtcctacttttttccccacctctgtcgcccaggctagagtatagtggtgtgatcttggcccactgcaacctctgcttcctaggttcaagtgattctcctgcctcagcctcccaagtagctgggattgtaagagtatgccaccacgcccagctactttttgtatttttagtagagacagggtttcatcatgttggccaggatggtctcttaactcctgccctcaagtgatccaccagagaggagatcctcggcctccccaagtgctgggattataggcatgagccaccgtgcccagcctactttctaattaattaaaaaaaaaaaaaaaaaaaaaaaaaaaccttcccaaatgagctgataaaaaactgacgtgaggctgctttgccttcaataatacctagttttcagctgttccaactcgtttccaaatagaaattagctggaacacactacagtaatctcaaggaagggaaaattaggccttaaaagataccaagaagtcagcatggtacccaattgaaaccttttgaccttagtgggaattcattctatttgcactaaaagccttaacttgctgtattcagagtccctcttaactgtgagtttctatagaactttactttttccactagtgcacagagagagaaaggttatcttaatagtcggtttcatggagatgaaggatgggagattaagaggggggaaatgatttttactggcagctatattccctctctgttctatttgctttaacaaagggataaaacctggcaaagtgtacattattggaggactcaaatctgtatgtgacatgtcccaactactgtccgctaactagttatccaaattgtaaagctacagaagcccagttgaggggtaagtgtgcctggctcacacagcctgcaccctgtcacctcggcaatgagccagtgtggggcactggggacttctaacccttggattgctctttttgacctgtgcataccttctaattgtaaaatatatttcagaccgtgagtaccttgagatctgagcaactgtgttaatgaagtaatagcaatggtccacagtgaaagatgtgttggggtttgcaaaacaagcattccgtcacctctttaataatgtcacagactttttaaaagagaggctatcaagttgtaatataatctgtcatgttttatttaggaaggaaggtaaatttgtgcttgcacggggatcattttgtattatttttgctaatacccagttgaagctaaaaagcaactatttgaatcctgtgaattaatttataagaatgttaaacagctttggaaatacatgcatcttatgaatcatagccttatttagcaagatcaatgttaaagtgttgttatatggcaagtatttaacacattcacagtgtttgtttgatttcaactgtgaattgtcttaagttttttcaaacctagttgtttctatggacacctgctctgaattgtacattgacttcattactaaagaacaaaaatgttcatttttgtcccagtaaattgagactgcttgtacactttcagaaaaatatgtgaatttataaagattttgtagatacttgt

SEQ ID NO: 4716 - protein, 154 aa, Homo sapiens
MKSLILLQGRTAPQCSIQDRALPVSHLFTLTVLSNHANEKVEMLLGAETQSERARWITALGHSSGKPPADRTSLTQVEIVRSFTAKQPDELSLQVADVVLIYQRVSDGWYEGERLRDGERGWFPMECAKEITCQATIDKNVERMGRLLGLETNV

SEQ ID NO: 4717 - DNA, 672 bp, Homo sapiens
ctattaccatgcttcttttgtactttttgcaaatgaaatcctttagtatgtatgcttttgtatttggcttcttttgctcaacatatatccactcaatgctgaaaacacaaggctcacttcctccagtgggggctcctctgatacataaaccaatccttccatctaacccaggcagtctgaaatcaaagaggtggtgttacgcagcaggtgtttacaaaataatgatggaaggcaggaagggtggaaactgtggtatcttgaaagacaggcattttcaaagattaagatgaggctgggccttgatcaagatggtgtgtcaagtagtaatatgcacaatttatatagaagccaaggctcctgtcttgcttttaaaacctctctctctctctctctctctaatacaggacaaagggctttacaatagttctgtaagaaataagcaaagcacaacttcatgtaaaataattcccaggcaaacacttgtatctttgctatgatgtctttattgggaataagatctattttttacacaggctcaagtggaatttgcaaagtacaaagccaatcgaaaacaaaatacctcatgaatagaagtgttgctcaccaagagaaatctaaaatgatccatttgtgtctctctatgccatactgaaacaaattatacatagccta

SEQ ID NO: 4718 - protein, 93 aa, Homo sapiens
MLLLYFLQMKSFSMYAFVFGFFCSTYIHSMLKTQGSLPPVGAPLIHKPILPSNPGSLKSKRWCYAAGVYKIMMEGRKGGNCGILKDRHFQRLR

SEQ ID NO: 4719 - DNA, 465 bp, Homo sapiens
taggagggagtcaaacagattccaagtgagaaaaggagttaacatgccattgctgctttgaagatggaaggagcctgtggcgaggatatgaagggcctctagaagctgtgagcagcccccagctcacagccagcaagcaaacaaggacctcagctcagcaacagcaaggacgtgaatcctgccaataacagaaatgagcttgaaagaagacaccaagctccagaacatggtgaaactaggaggagcagagatgacctgatccctgaagtgaactgctcagctattctgtgtacctcaggaggtctgcaagtgtgtggttaggtaaaaactgagctgtgcaaactcactgtatccaagctcttctcatgagagagcagaacaacctggcaagcttaaaggcaagtgttttcgttcttttaattaaataggctgtgacaaaattaacaataaaactagcccagaacc

SEQ ID NO: 4720 - protein, 69 aa, Homo sapiens
AAPSSQPASKQGPQLSNSKDVNPANNRNELERRHQAPEHGETRRSRDDLIPEVNCSAILCTSGGLQVCG

SEQ ID NO: 4721 - DNA, 1406 bp, Homo sapiens
gtgatcttggttcactgcagcctcgacttcctgggttcaagtgatccttctgcctcagcctcccaaatagctgggactataggcatgcatcaccacacccagctaatttctgtattttttgtagagacaccgtttcaccatgttgcccaggctggtctcaaaactcctgtgctcaagcagtctgcccgccttggcttcccaaagtgctgacattacaggtatgagccactgcacccggtccctagtagggtatttttaacttggcaaaaagggtattaatcagaaacatacactatccatcactgagtattatactcttgattttgcaatgtaagagttttaacctatttgtctgacagaaggtgtaaaagtgctggacatgctgcagaaagaaacaggaaaagcatcttgctgcactccaaagaatgcaaattttaatgtgccttccaataaatgcaaggaaaccgaaagagttaatagtatcatacaatgactgggatgtattgataatgctacagtgatccattaacagcacttgttcaggtactgctcccaatcctgggaatgtgtgttacctgttatgtctcaaatcctttatcttggctgttcttctaaaagtgatctgtctgtcattgaatgctggcattagagtcatgtcacaatattagagcatactggttttgcctctaacgtcgaggtgaccatctggtctttcttgctctgtaagagtttctgtttgtgcttttttttcccttacttttattatccagtttaaatccagtcagttggccaaaatggtcttggaagaaaggatttagagattctgtaaaaaagattattagttggttctgtgtttgcaaaccagtatgtaattcccatatgaatggggaaaatgttcctgaggaattatttaattgatgaggcattcacagagattaaagcagttattgttacctccaatttatgtcttctgcacagctgattaggttggacattttaatccaagtgctgggattacaggcgtgaaccaccacacccagctgatatagaacatttgtatcacctaaaaatttcccttttacccctttgtagtcaatccctcacccccacttctatcccctcgaaacccattgatctgcgttttgtcacttttcgttttgccttttctagaatttcaaataaccagtcttttgtgtccagcttctttcacttaatgtaatacttttgagatactgatattgttacatgtattagtaggtagttcctgttttatcttctattcagtagtatttgcattgtatagttataccacagtttgttaattcatttaccagttgatggacatttgagttgttttcagtttttttgctgttatgaataaagctgctatgaacatatgtatataa

SEQ ID NO: 4722 - protein, 41 aa, Homo sapiens
MHHHTQLISVFFVETPFHHVAQAGLKTPVLKQSARLGFPKC

SEQ ID NO: 4723 - DNA, 4380 bp, Homo sapiens
ggcttccgggcccggacgccatttccagcggttgctggttctgacgggttgtagtctgccaggacaatgagttatgactaccatcagaactggggccgtgatgggggtccccgcagctccggtgggggctatggaggggggccagcagggggtcatggaggtaaccgaggctccggaggaggcggcggcggcggagggggtggtcgaggcggcaggggccggcatcccgggcacctgaaaggccgcgaaatcggcatgtggtacgcgaaaaaacaggggcagaagaacaaggaagcggagaggcaagagagagctgtagtacacatggatgaacgacgagaagaacaaattgtacagttactgaattctgttcaagcgaagaatgataaagagtcagaagcacagatatcctggtttgctcctgaggatcatggatacggtactgaagtttctactaagaacacaccatgctcagagaacaaacttgacatccaggaaaagaagttgataaatcaagaaaaaaaaatgtttagaatcaggaacagatcatatattgaccgagattctgagtatctcttgcaagaaaatgaaccagatggaactttagaccaaaaattattggaagatttacaaaagaaaaaaaatgaccttcggtatattgaaatgcagcatttcagagaaaagctgccttcgtatggaatgcaaaaggaattggtaaatttaattgataaccatcaggtaacagtaataagtggtgaaactggttgtggcaaaaccactcaagttactcagttcattttggataactacattgaaagaggaaaaggatctgcttgcagaatagtttgtactcagccaagaagaattagtgccatttcagttgcggaaagagtagctgcagaaagggcagaatcttgtggcagtggtaatagtactggatatcaaattcgtctccagagtcggttgccaaggaaacagggttctatcttatactgtacaacaggaatcatccttcagtggctccagtcagacccgtatttgtccagtgttagtcatatcgtacttgatgaaatccatgaaagaaatctgcagtcagatgttttaatgactgttgttaaagaccttctcaattttcgatctgacttgaaagtaatattgatgagtgcaacattgaatgcagaaaagttttcagaatattttggtaactgtccaatgatacatatacctggttttacctttccggttgtggaatatcttttggaagatgtaattgaaaaaataaggtatgttccagaacaaaaagaacacagatcccagtttaagaggggtttcatgcaagggcatgtaaatagacaagaaaaagaagaaaaagaagcaatatataaagaacgttggccagattatgtaagggaactgcgaagaaggtattctgcaagtactgtagatgttatagaaatgatggaggatgataaagttgatctgaatttgattgttgccctcatccgatacattgttttggaagaagaggatggtgcgatactggtctttctgccaggctgggacaatatcagcactttacatgatctcttgatgtcacaagtaatgtttaaatcagttaaccagacacaggtgtttaaaagaacccctcctggtgttcggaaaatagtaattgctaccaacattgcggagactagcattaccatagatgatgtcgtttatgtgatagatggaggaaaaataaaagagacgcattttgatactcagaacaatatcagtacaatgtccgctgagtgggttagtaaagctaatgccaaacagagaaaaggtcgagctggaagagttcaacctggtcattgctatcatctgtataatggtcttagagcaagtcttctagatgactatcaactgccagaaattttgagaactcctttggaagaactttgtttacaaataaagattttaaggctaggtggaattgcttattttctgagtagattaatggacccaccatcaaatgaggcagtgttactctccataagacacctgatggagctgaacgctttggataaacaagaagaattgacacctcttggagtccacttggcacgattacccgttgagccacatattggaaaaatgattctttttggagcactgttctgctgcttagacccagtactcactattgctgctagtctcagtttcaaagatccatttgtcattccactgggaaaagaaaagattgcagatgcaagaagaaaggaattggcaaaggatactagaagtgatcacttaacagttgtgaatgcgtttgagggctgggaagaggctaggcgacgtggtttcagatacgaaaaggactattgctgggaatattttctgtcttcaaacacactgcagatgctgcataacatgaaaggacagtttgctgagcatcttcttggagctggatttgtaagcagtagaaatcctaaagatccagaatctaatataaattcagataatgagaagataattaaagctgtcatctgtgctggtttatatcccaaagttgctaaaattcgactaaatttgggtaaaaaaagaaaaatggtaaaagtttacacaaaaaccgatggcctggttgctgttcatcctaaatctgttaatgtggagcaaacagactttcactacaactggcttatctatcacctaaagatgagaacaagcagtatatacttgtatgactgcacagaggtttccccatactgtctcttgttttttggaggtgacatttccatccagaaggataacgatcaggaaactattgctgtagatgagtggattgtatttcagtctccagcaagaattgcccatcttgttaaggaattaagaaaggaactagatattcttctgcaagagaagattgaaagtcctcatcctgtagactggaatgacactaaatccagagactgtgcagtactgtcagctattatagacttgatcaaaacacaggaaaaggcaactcccaggaactttccgccacgattccaggatggatattacagctgacagcttttcaggggtggtctgaaaagccagtttgacagccattcttcatcattgtttaaattttggctggatgccaaaccctgggacatgaacaattttcatgtgtaaggtagaagccttcagtaggtagtaaagacttaatgtgcatgacttgatgttatatgtagagatatatatatatatatatatataccataaaagcaatatgttctctgatcatatactctgctgtggtcatgcccactctttgggagtatattccctttatatatattgagtattgtaccacttgagaaattcctttgttctgttatacaaaattaatctttctgctcataatgattgatgataccaccagtaaaaataggatgtttaccccaaaacaagtgtcaattaagaatttgaacacaaccacattttttaaaatgaaacttctatcggaagtaaattaatttgttgtaataaagtccagtatttaataaaatgtacaatgttaaatctcagccaacctcttggattggtttctacattttcacctatggcttggttcatttgatatttttactatttttaaaacacgtgccctttttatatcaccctgtgcctcataatacagcaattgagagcacggtctggagcctgattacctcagttccagtctcagctctgtcagttagtcagtgtcttggcttctctcctttttccttatcttgtaagatacagttggcccttcatatccatgcattccacatctgtggattcaaacaactgtggatagaagatatttggggaaaaaaaggatggttgtgtctatactgaacatgtgcagacttttttccttgtcattccctaaacaatacagtttaacagctatttatatagtatttacattgtattaggtattataaataatctagagatgacttaaagaatatgggaggttgtgcctaggtaacatgcaaatactacgccattttattataaaagacttgagcatccatggatttaggtatttgaggggttggggttggaaaccagtcccccacagatactgagggacaactgtacatgtaacagttgtgaggatgaagtacattaatacatgtaaagcacataggctagtgcctgtactctctgaatcttagttgttatttgtccctgaaatattttcgtaaatgtctaacaatctattatattacactttttattttattgctacttatcttcttcgccaaggaatagtgtaacaacacatgctgtacattttcagccctatcagattgtgataaatactgttggttgccggccagcaactattttgtccctccc

SEQ ID NO: 4724 - protein, 994 aa, Homo sapiens
MSYDYHQNWGRDGGPRSSGGGYGGGPAGGHGGNRGSGGGGGGGGGGRGGRGRHPGHLKGREIGMWYAKKQGQKNKEAERQERAVVHMDERREEQIVQLLNSVQAKNDKESEAQISWFAPEDHGYGTEVSTKNTPCSENKLDIQEKKLINQEKKMFRIRNRSYIDRDSEYLLQENEPDGTLDQKLLEDLQKKKNDLRYIEMQHFREKLPSYGMQKELVNLIDNHQVTVISGETGCGKTTQVTQFILDNYIERGKGSACRIVCTQPRRISAISVAERVAAERAESCGSGNSTGYQIRLQSRLPRKQGSILYCTTGIILQWLQSDPYLSSVSHIVLDEIHERNLQSDVLMTVVKDLLNFRSDLKVILMSATLNAEKFSEYFGNCPMIHIPGFTFPVVEYLLEDVIEKIRYVPEQKEHRSQFKRGFMQGHVNRQEKEEKEAIYKERWPDYVRELRRRYSASTVDVIEMMEDDKVDLNLIVALIRYIVLEEEDGAILVFLPGWDNISTLHDLLMSQVMFKSVNQTQVFKRTPPGVRKIVIATNIAETSITIDDVVYVIDGGKIKETHFDTQNNISTMSAEWVSKANAKQRKGRAGRVQPGHCYHLYNGLRASLLDDYQLPEILRTPLEELCLQIKILRLGGIAYFLSRLMDPPSNEAVLLSIRHLMELNALDKQEELTPLGVHLARLPVEPHIGKMILFGALFCCLDPVLTIAASLSFKDPFVIPLGKEKIADARRKELAKDTRSDHLTVVNAFEGWEEARRRGFRYEKDYCWEYFLSSNTLQMLHNMKGQFAEHLLGAGFVSSRNPKDPESNINSDNEKIIKAVICAGLYPKVAKIRLNLGKKRKMVKVYTKTDGLVAVHPKSVNVEQTDFHYNWLIYHLKMRTSSIYLYDCTEVSPYCLLFFGGDISIQKDNDQETIAVDEWIVFQSPARIAHLVKELRKELDILLQEKIESPHPVDWNDTKSRDCAVLSAIIDLIKTQEKATPRNFPPRFQDGYYS

SEQ ID NO: 4725 - DNA, 4422 bp, Homo sapiens
ggcttccgggcccggacgccatttccagcggttgctggttctgacgggttgtagtctgccaggacaatgagttatgactaccatcagaactggggccgtgatgggggtccccgcagctccggtgggggctatggaggggggccagcagggggtcatggaggtaaccgaggctccggaggaggcggcggcggcggagggggtggtcgaggcggcaggggccggcatcccgggcacctgaaaggccgcgaaatcggcatgtggtacgcgaaaaaacaggggcagaagaacaaggaagcggagaggcaagagagagctgtagtacacatggatgaacgacgagaagaacaaattgtacagttactgaattctgttcaagcgaagaatgataaagagtcagaagcacagatatcctggtttgctcctgaggatcatggatacggtactgaagtttctactaagaacacaccatgctcagagaacaaacttgacatccaggaaaagaagttgataaatcaagaaaaaaaaatgtttagaatcaggaacagatcatatattgaccgagattctgagtatctcttgcaagaaaatgaaccagatggaactttagaccaaaaattattggaagatttacaaaagaaaaaaaatgaccttcggtatattgaaatgcagcatttcagagaaaagctgccttcgtatggaatgcaaaaggaattggtaaatttaattgataaccatcaggtaacagtaataagtggtgaaactggttgtggcaaaaccactcaagttactcagttcattttggataactacattgaaagaggaaaaggatctgcttgcagaatagtttgtactcagccaagaagaattagtgccatttcagttgcggaaagagtagctgcagaaagggcagaatcttgtggcagtggtaatagtactggatatcaaattcgtctccagagtcggttgccaaggaaacagggttctatcttatactgtacaacaggaatcatccttcagtggctccagtcagacccgtatttgtccagtgttagtcatatcgtacttgatgaaatccatgaaagaaatctgcagtcagatgttttaatgactgttgttaaagaccttctcaattttcgatctgacttgaaagtaatattgatgagtgcaacattgaatgcagaaaagttttcagaatattttggtaactgtccaatgatacatatacctggttttacctttccggttgtggaatatcttttggaagatgtaattgaaaaaataaggtatgttccagaacaaaaagaacacagatcccagtttaagaggggtttcatgcaagggcatgtaaatagacaagaaaaagaagaaaaagaagcaatatataaagaacgttggccagattatgtaagggaactgcgaagaaggtattctgcaagtactgtagatgttatagaaatgatggaggatgataaagttgatctgaatttgattgttgccctcatccgatacattgttttggaagaagaggatggtgcgatactggtctttctgccaggctgggacaatatcagcactttacatgatctcttgatgtcacaagtaatgtttaaatcagataaatttttaattatacctttacattcactgatgcctacagttaaccagacacaggtgtttaaaagaacccctcctggtgttcggaaaatagtaattgctaccaacattgcggagactagcattaccatagatgatgtcgtttatgtgatagatggaggaaaaataaaagagacgcattttgatactcagaacaatatcagtacaatgtccgctgagtgggttagtaaagctaatgccaaacagagaaaaggtcgagctggaagagttcaacctggtcattgctatcatctgtataatggtcttagagcaagtcttctagatgactatcaactgccagaaattttgagaactcctttggaagaactttgtttacaaataaagattttaaggctaggtggaattgcttattttctgagtagattaatggacccaccatcaaatgaggcagtgttactctccataagacacctgatggagctgaacgctttggataaacaagaagaattgacacctcttggagtccacttggcacgattacccgttgagccacatattggaaaaatgattctttttggagcactgttctgctgcttagacccagtactcactattgctgctagtctcagtttcaaagatccatttgtcattccactgggaaaagaaaagattgcagatgcaagaagaaaggaattggcaaaggatactagaagtgatcacttaacagttgtgaatgcgtttgagggctgggaagaggctaggcgacgtggtttcagatacgaaaaggactattgctgggaatattttctgtcttcaaacacactgcagatgctgcataacatgaaaggacagtttgctgagcatcttcttggagctggatttgtaagcagtagaaatcctaaagatccagaatctaatataaattcagataatgagaagataattaaagctgtcatctgtgctggtttatatcccaaagttgctaaaattcgactaaatttgggtaaaaaaagaaaaatggtaaaagtttacacaaaaaccgatggcctggttgctgttcatcctaaatctgttaatgtggagcaaacagactttcactacaactggcttatctatcacctaaagatgagaacaagcagtatatacttgtatgactgcacagaggtttccccatactgtctcttgttttttggaggtgacatttccatccagaaggataacgatcaggaaactattgctgtagatgagtggattgtatttcagtctccagcaagaattgcccatcttgttaaggaattaagaaaggaactagatattcttctgcaagagaagattgaaagtcctcatcctgtagactggaatgacactaaatccagagactgtgcagtactgtcagctattatagacttgatcaaaacacaggaaaaggcaactcccaggaactttccgccacgattccaggatggatattacagctgacagcttttcaggggtggtctgaaaagccagtttgacagccattcttcatcattgtttaaattttggctggatgccaaaccctgggacatgaacaattttcatgtgtaaggtagaagccttcagtaggtagtaaagacttaatgtgcatgacttgatgttatatgtagagatatatatatatatatatatataccataaaagcaatatgttctctgatcatatactctgctgtggtcatgcccactctttgggagtatattccctttatatatattgagtattgtaccacttgagaaattcctttgttctgttatacaaaattaatctttctgctcataatgattgatgataccaccagtaaaaataggatgtttaccccaaaacaagtgtcaattaagaatttgaacacaaccacattttttaaaatgaaacttctatcggaagtaaattaatttgttgtaataaagtccagtatttaataaaatgtacaatgttaaatctcagccaacctcttggattggtttctacattttcacctatggcttggttcatttgatatttttactatttttaaaacacgtgccctttttatatcaccctgtgcctcataatacagcaattgagagcacggtctggagcctgattacctcagttccagtctcagctctgtcagttagtcagtgtcttggcttctctcctttttccttatcttgtaagatacagttggcccttcatatccatgcattccacatctgtggattcaaacaactgtggatagaagatatttggggaaaaaaaggatggttgtgtctatactgaacatgtgcagacttttttccttgtcattccctaaacaatacagtttaacagctatttatatagtatttacattgtattaggtattataaataatctagagatgacttaaagaatatgggaggttgtgcctaggtaacatgcaaatactacgccattttattataaaagacttgagcatccatggatttaggtatttgaggggttggggttggaaaccagtcccccacagatactgagggacaactgtacatgtaacagttgtgaggatgaagtacattaatacatgtaaagcacataggctagtgcctgtactctctgaatcttagttgttatttgtccctgaaatattttcgtaaatgtctaacaatctattatattacactttttattttattgctacttatcttcttcgccaaggaatagtgtaacaacacatgctgtacattttcagccctatcagattgtgataaatactgttggttgccggccagcaactattttgtccctccc

SEQ ID NO: 4726 - protein, 1008 aa, Homo sapiens
MSYDYHQNWGRDGGPRSSGGGYGGGPAGGHGGNRGSGGGGGGGGGGRGGRGRHPGHLKGREIGMWYAKKQGQKNKEAERQERAVVHMDERREEQIVQLLNSVQAKNDKESEAQISWFAPEDHGYGTEVSTKNTPCSENKLDIQEKKLINQEKKMFRIRNRSYIDRDSEYLLQENEPDGTLDQKLLEDLQKKKNDLRYIEMQHFREKLPSYGMQKELVNLIDNHQVTVISGETGCGKTTQVTQFILDNYIERGKGSACRIVCTQPRRISAISVAERVAAERAESCGSGNSTGYQIRLQSRLPRKQGSILYCTTGIILQWLQSDPYLSSVSHIVLDEIHERNLQSDVLMTVVKDLLNFRSDLKVILMSATLNAEKFSEYFGNCPMIHIPGFTFPVVEYLLEDVIEKIRYVPEQKEHRSQFKRGFMQGHVNRQEKEEKEAIYKERWPDYVRELRRRYSASTVDVIEMMEDDKVDLNLIVALIRYIVLEEEDGAILVFLPGWDNISTLHDLLMSQVMFKSDKFLIIPLHSLMPTVNQTQVFKRTPPGVRKIVIATNIAETSITIDDVVYVIDGGKIKETHFDTQNNISTMSAEWVSKANAKQRKGRAGRVQPGHCYHLYNGLRASLLDDYQLPEILRTPLEELCLQIKILRLGGIAYFLSRLMDPPSNEAVLLSIRHLMELNALDKQEELTPLGVHLARLPVEPHIGKMILFGALFCCLDPVLTIAASLSFKDPFVIPLGKEKIADARRKELAKDTRSDHLTVVNAFEGWEEARRRGFRYEKDYCWEYFLSSNTLQMLHNMKGQFAEHLLGAGFVSSRNPKDPESNINSDNEKIIKAVICAGLYPKVAKIRLNLGKKRKMVKVYTKTDGLVAVHPKSVNVEQTDFHYNWLIYHLKMRTSSIYLYDCTEVSPYCLLFFGGDISIQKDNDQETIAVDEWIVFQSPARIAHLVKELRKELDILLQEKIESPHPVDWNDTKSRDCAVLSAIIDLIKTQEKATPRNFPPRFQDGYYS

SEQ ID NO: 4727 - DNA, 3599 bp, Homo sapiens
ggcttccgggcccggacgccatttccagcggttgctggttctgacgggttgtagtctgccaggacaatgagttatgactaccatcagaactggggccgtgatgggggtccccgcagctccggtgggggctatggaggggggccagcagggggtcatggaggtaaccgaggctccggaggaggcggcggcggcggagggggtggtcgaggcggcaggggccggcatcccgggcacctgaaaggccgcgaaatcggcatgtggtacgcgaaaaaacaggggcagaagaacaaggaagcggagaggcaagagagagctgtagtacacatggatgaacgacgagaagaacaaattgtacagttactgaattctgttcaagcgaagaatgataaagagtcagaagcacagatatcctggtttgctcctgaggatcatggatacggtactgaagtttctactaagaacacaccatgctcagagaacaaacttgacatccaggaaaagaagttgataaatcaagaaaaaaaaatgtttagaatcaggaacagatcatatattgaccgagattctgagtatctcttgcaagaaaatgaaccagatggaactttagaccaaaaattattggaagatttacaaaagaaaaaaaatgaccttcggtatattgaaatgcagcatttcagagaaaagctgccttcgtatggaatgcaaaaggaattggtaaatttaattgataaccatcaggtaacagtaataagtggtgaaactggttgtggcaaaaccactcaagttactcagttcattttggataactacattgaaagaggaaaaggatctgcttgcagaatagtttgtactcagccaagaagaattagtgccatttcagttgcggaaagagtagctgcagaaagggcagaatcttgtggcagtggtaatagtactggatatcaaattcgtctccagagtcggttgccaaggaaacagggttctatcttatactgtacaacaggaatcatccttcagtggctccagtcagacccgtatttgtccagtgttagtcatatcgtacttgatgaaatccatgaaagaaatctgcagtcagatgttttaatgactgttgttaaagaccttctcaattttcgatctgacttgaaagtaatattgatgagtgcaacattgaatgcagaaaagttttcagaatattttggtaactgtccaatgatacatatacctggttttacctttccggttgtggaatatcttttggaagatgtaattgaaaaaataaggtatgttccagaacaaaaagaacacagatcccagtttaagaggggtttcatgcaagggcatgtaaatagacaagaaaaagaagaaaaagaagcaatatataaagaacgttggccagattatgtaagggaactgcgaagaaggtattctgcaagtactgtagatgttatagaaatgatggaggatgataaagttgatctgaatttgattgttgccctcatccgatacattgttttggaagaagaggatggtgcgatactggtctttctgccaggctgggacaatatcagcactttacatgatctcttgatgtcacaagtaatgtttaaatcagataaatttttaattatacctttacattcactgatgcctacagttaaccagacacaggtgtttaaaagaacccctcctggtgttcggaaaatagtaattgctaccaacattgcggagactagcattaccatagatgatgtcgtttatgtgatagatggaggaaaaataaaagagacgcattttgatactcagaacaatatcagtacaatgtccgctgagtgggttagtaaagctaatgccaaacagagaaaaggtcgagctggaagagttcaacctggtcattgctatcatctgtataatggtcttagagcaagtcttctagatgactatcaactgccagaaattttgagaactcctttggaagaactttgtttacaaataaagattttaaggctaggtggaattgcttattttctgagtagattaatggacccaccatcaaatgaggcagtgttactctccataagacacctgatggagctgaacgctttggataaacaagaagaattgacacctcttggagtccacttggcacgattacccgttgagccacatattggaaaaatgattctttttggagcactgttctgctgcttagacccagtactcactattgctgctagtctcagtttcaaagatccatttgtcattccactgggaaaagaaaagattgcagatgcaagaagaaaggaattggcaaaggatactagaagtgatcacttaacagttgtgaatgcgtttgagggctgggaagaggctaggcgacgtggtttcagatacgaaaaggactattgctgggaatattttctgtcttcaaacacactgcagatgctgcataacatgaaaggacagtttgctgagcatcttcttggagctggatttgtaagcagtagaaatcctaaagatccagaatctaatataaattcagataatgagaagataattaaagctgtcatctgtgctggtttatatcccaaagttgctaaaattcgactaaatttgggtaaaaaaagaaaaatggtaaaagtttacacaaaaaccgatggcctggttgctgttcatcctaaatctgttaatgtggagcaaacagactttcactacaactggcttatctatcacctaaagatgagaacaagcagtatatacttgtatgactgcacagaggtttccccatactgtctcttgttttttggaggtgacatttccatccagaaggataacgatcaggaaactattgctgtagatgagtggattgtatttcagtctccagcaagaattgcccatcttgttaaggaattaagaaaggaactagatattcttctgcaagagaagattgaaagtcctcatcctgtagactggaatgacactaaatccagagactgtgcagtactgtcagctattatagacttgatcaaaacacaggaaaaggcaactcccaggaactttccgccacgattccaggatggatattacagctgacagcttttcaggggtggtctgaaaagccagtttgacagccattcttcatcattgtttaaattttggctggatgccaaaccctgggacatgaacaattttcatgtgtaaggtagaagccttcagtaggtagtaaagacttaatgtgcatgacttgatgttatatgtagagatatatatatatatatatatataccataaaagcaatatgttctctgatcatatactctgctgtggtcatgcccactctttgggagtatattccctttatatatattgagtattgtaccacttgagaaattcctttgttctgttatacaaaattaatctttctgctcataatgattgatgataccaccagtaaaaataggatgtttaccccaaaacaagtgtcaattaagaatttgaacacaaccacattttttaaaatgaaacttctatcggaagtaaattaatttgttgtaataaagtccagtatttaataaaatgtacaatgttaaatctcagcc

SEQ ID NO: 4728 - protein, 1008 aa, Homo sapiens; identical to SEQ ID NO: 4726

SEQ ID NO: 4729 - DNA, 3557 bp, Homo sapiens
ggcttccgggcccggacgccatttccagcggttgctggttctgacgggttgtagtctgccaggacaatgagttatgactaccatcagaactggggccgtgatgggggtccccgcagctccggtgggggctatggaggggggccagcagggggtcatggaggtaaccgaggctccggaggaggcggcggcggcggagggggtggtcgaggcggcaggggccggcatcccgggcacctgaaaggccgcgaaatcggcatgtggtacgcgaaaaaacaggggcagaagaacaaggaagcggagaggcaagagagagctgtagtacacatggatgaacgacgagaagaacaaattgtacagttactgaattctgttcaagcgaagaatgataaagagtcagaagcacagatatcctggtttgctcctgaggatcatggatacggtactgaagtttctactaagaacacaccatgctcagagaacaaacttgacatccaggaaaagaagttgataaatcaagaaaaaaaaatgtttagaatcaggaacagatcatatattgaccgagattctgagtatctcttgcaagaaaatgaaccagatggaactttagaccaaaaattattggaagatttacaaaagaaaaaaaatgaccttcggtatattgaaatgcagcatttcagagaaaagctgccttcgtatggaatgcaaaaggaattggtaaatttaattgataaccatcaggtaacagtaataagtggtgaaactggttgtggcaaaaccactcaagttactcagttcattttggataactacattgaaagaggaaaaggatctgcttgcagaatagtttgtactcagccaagaagaattagtgccatttcagttgcggaaagagtagctgcagaaagggcagaatcttgtggcagtggtaatagtactggatatcaaattcgtctccagagtcggttgccaaggaaacagggttctatcttatactgtacaacaggaatcatccttcagtggctccagtcagacccgtatttgtccagtgttagtcatatcgtacttgatgaaatccatgaaagaaatctgcagtcagatgttttaatgactgttgttaaagaccttctcaattttcgatctgacttgaaagtaatattgatgagtgcaacattgaatgcagaaaagttttcagaatattttggtaactgtccaatgatacatatacctggttttacctttccggttgtggaatatcttttggaagatgtaattgaaaaaataaggtatgttccagaacaaaaagaacacagatcccagtttaagaggggtttcatgcaagggcatgtaaatagacaagaaaaagaagaaaaagaagcaatatataaagaacgttggccagattatgtaagggaactgcgaagaaggtattctgcaagtactgtagatgttatagaaatgatggaggatgataaagttgatctgaatttgattgttgccctcatccgatacattgttttggaagaagaggatggtgcgatactggtctttctgccaggctgggacaatatcagcactttacatgatctcttgatgtcacaagtaatgtttaaatcagttaaccagacacaggtgtttaaaagaacccctcctggtgttcggaaaatagtaattgctaccaacattgcggagactagcattaccatagatgatgtcgtttatgtgatagatggaggaaaaataaaagagacgcattttgatactcagaacaatatcagtacaatgtccgctgagtgggttagtaaagctaatgccaaacagagaaaaggtcgagctggaagagttcaacctggtcattgctatcatctgtataatggtcttagagcaagtcttctagatgactatcaactgccagaaattttgagaactcctttggaagaactttgtttacaaataaagattttaaggctaggtggaattgcttattttctgagtagattaatggacccaccatcaaatgaggcagtgttactctccataagacacctgatggagctgaacgctttggataaacaagaagaattgacacctcttggagtccacttggcacgattacccgttgagccacatattggaaaaatgattctttttggagcactgttctgctgcttagacccagtactcactattgctgctagtctcagtttcaaagatccatttgtcattccactgggaaaagaaaagattgcagatgcaagaagaaaggaattggcaaaggatactagaagtgatcacttaacagttgtgaatgcgtttgagggctgggaagaggctaggcgacgtggtttcagatacgaaaaggactattgctgggaatattttctgtcttcaaacacactgcagatgctgcataacatgaaaggacagtttgctgagcatcttcttggagctggatttgtaagcagtagaaatcctaaagatccagaatctaatataaattcagataatgagaagataattaaagctgtcatctgtgctggtttatatcccaaagttgctaaaattcgactaaatttgggtaaaaaaagaaaaatggtaaaagtttacacaaaaaccgatggcctggttgctgttcatcctaaatctgttaatgtggagcaaacagactttcactacaactggcttatctatcacctaaagatgagaacaagcagtatatacttgtatgactgcacagaggtttccccatactgtctcttgttttttggaggtgacatttccatccagaaggataacgatcaggaaactattgctgtagatgagtggattgtatttcagtctccagcaagaattgcccatcttgttaaggaattaagaaaggaactagatattcttctgcaagagaagattgaaagtcctcatcctgtagactggaatgacactaaatccagagactgtgcagtactgtcagctattatagacttgatcaaaacacaggaaaaggcaactcccaggaactttccgccacgattccaggatggatattacagctgacagcttttcaggggtggtctgaaaagccagtttgacagccattcttcatcattgtttaaattttggctggatgccaaaccctgggacatgaacaattttcatgtgtaaggtagaagccttcagtaggtagtaaagacttaatgtgcatgacttgatgttatatgtagagatatatatatatatatatatataccataaaagcaatatgttctctgatcatatactctgctgtggtcatgcccactctttgggagtatattccctttatatatattgagtattgtaccacttgagaaattcctttgttctgttatacaaaattaatctttctgctcataatgattgatgataccaccagtaaaaataggatgtttaccccaaaacaagtgtcaattaagaatttgaacacaaccacattttttaaaatgaaacttctatcggaagtaaattaatttgttgtaataaagtccagtatttaataaaatgtacaatgttaaatctcagcc

SEQ ID NO: 4730 - protein, 994 aa, Homo sapiens; identical to SEQ ID NO: 4724

SEQ ID NO: 4731 - DNA, 3512 bp, Homo sapiens
ggcttccgggcccggacgccatttccagcggttgctggttctgacgggttgtagtctgccaggacaatgagttatgactaccatcagaactggggccgtgatgggggtccccgcagctccggtgggggctatggaggggggccagcagggggtcatggaggtaaccgaggctccggaggaggcggcggcggcggagggggtggtcgaggcggcaggggccggcatcccgggcacctgaaaggccgcgaaatcggcatgtggtacgcgaaaaaacaggggcagaagaacaaggaagcggagaggcaagagagagctgtagtacacatggatgaacgacgagaagaacaaattgtacagttactgaattctgttcaagcgaagaatgataaagagtcagaagcacagatatcctggtttgctcctgaggatcatggatacggtactgaagtttctactaagaacacaccatgctcagagaacaaacttgacatccaggaaaagaagttgataaatcaagaaaaaaaaatgtttagaatcaggaacagatcatatattgaccgagattctgagtatctcttgcaagaaaatgaaccagatggaactttagaccaaaaattattggaagatttacaaaagaaaaaaaatgaccttcggtatattgaaatgcagcatttcagagaaaagctgccttcgtatggaatgcaaaaggaattggtaaatttaattgataaccatcaggtaacagtaataagtggtgaaactggttgtggcaaaaccactcaagttactcagttcattttggataactacattgaaagaggaaaaggatctgcttgcagaatagtttgtactcagccaagaagaattagtgccatttcagttgcggaaagagtagctgcagaaagggcagaatcttgtggcagtggtaatagtactggatatcaaattcgtctccagagtcggttgccaaggaaacagggttctatcttatactgtacaacaggaatcatccttcagtggctccagtcagacccgtatttgtccagtgttagtcatatcgtacttgatgaaatccatgaaagaaatctgcagtcagatgttttaatgactgttgttaaagaccttctcaattttcgatctgacttgaaagtaatattgatgagtgcaacattgaatgcagaaaagttttcagaatattttggtaactgtccaatgatacatatacctggttttacctttccggttgtggaatatcttttggaagatgtaattgaaaaaataaggtatgttccagaacaaaaagaacacagatcccagtttaagaggggtttcatgcaagggcatgtaaatagacaagaaaaagaagaaaaagaagcaatatataaagaacgttggccagattatgtaagggaactgcgaagaaggtattctgcaagtactgtagatgttatagaaatgatggaggatgataaagttgatctgaatttgattgttgccctcatccgatacattgttttggaagaagaggatggtgcgatactggtctttctgccaggctgggacaatatcagcactttacatgatctcttgatgtcacaagtaatgtttaaatcagataaatttttaattatacctttacattcactgatgcctacagttaaccagacacaggtgtttaaaagaacccctcctggtgttcggaaaatagtaattgctaccaacattgcggagactagcattaccatagatgatgtcgtttatgtgatagatggaggaaaaataaaagagacgcattttgatactcagaacaatatcagtacaatgtccgctgagtgggttagtaaagctaatgccaaacagagaaaaggtcgagctggaagagttcaacctggtcattgctatcatctgtataatggtcttagagcaagtcttctagatgactatcaactgccagaaattttgagaactcctttggaagaactttgtttacaaataaagattttaaggctaggtggaattgcttattttctgagtagattaatggacccaccatcaaatgaggcagtgttactctccataagacacctgatggagctgaacgctttggataaacaagaagaattgacacctcttggagtccacttggcacgattacccgttgagccacatattggaaaaatgattctttttggagcactgttctgctgcttagacccagtactcactattgctgctagtctcagtttcaaagatccatttgtcattccactgggctgggaagaggctaggcgacgtggtttcagatacgaaaaggactattgctgggaatattttctgtcttcaaacacactgcagatgctgcataacatgaaaggacagtttgctgagcatcttcttggagctggatttgtaagcagtagaaatcctaaagatccagaatctaatataaattcagataatgagaagataattaaagctgtcatctgtgctggtttatatcccaaagttgctaaaattcgactaaatttgggtaaaaaaagaaaaatggtaaaagtttacacaaaaaccgatggcctggttgctgttcatcctaaatctgttaatgtggagcaaacagactttcactacaactggcttatctatcacctaaagatgagaacaagcagtatatacttgtatgactgcacagaggtttccccatactgtctcttgttttttggaggtgacatttccatccagaaggataacgatcaggaaactattgctgtagatgagtggattgtatttcagtctccagcaagaattgcccatcttgttaaggaattaagaaaggaactagatattcttctgcaagagaagattgaaagtcctcatcctgtagactggaatgacactaaatccagagactgtgcagtactgtcagctattatagacttgatcaaaacacaggaaaaggcaactcccaggaactttccgccacgattccaggatggatattacagctgacagcttttcaggggtggtctgaaaagccagtttgacagccattcttcatcattgtttaaattttggctggatgccaaaccctgggacatgaacaattttcatgtgtaaggtagaagccttcagtaggtagtaaagacttaatgtgcatgacttgatgttatatgtagagatatatatatatatatatatataccataaaagcaatatgttctctgatcatatactctgctgtggtcatgcccactctttgggagtatattccctttatatatattgagtattgtaccacttgagaaattcctttgttctgttatacaaaattaatctttctgctcataatgattgatgataccaccagtaaaaataggatgtttaccccaaaacaagtgtcaattaagaatttgaacacaaccacattttttaaaatgaaacttctatcggaagtaaattaatttgttgtaataaagtccagtatttaataaaatgtacaatgttaaatctcagcc

SEQ ID NO: 4732 - protein, 979 aa, Homo sapiens
MSYDYHQNWGRDGGPRSSGGGYGGGPAGGHGGNRGSGGGGGGGGGGRGGRGRHPGHLKGREIGMWYAKKQGQKNKEAERQERAVVHMDERREEQIVQLLNSVQAKNDKESEAQISWFAPEDHGYGTEVSTKNTPCSENKLDIQEKKLINQEKKMFRIRNRSYIDRDSEYLLQENEPDGTLDQKLLEDLQKKKNDLRYIEMQHFREKLPSYGMQKELVNLIDNHQVTVISGETGCGKTTQVTQFILDNYIERGKGSACRIVCTQPRRISAISVAERVAAERAESCGSGNSTGYQIRLQSRLPRKQGSILYCTTGIILQWLQSDPYLSSVSHIVLDEIHERNLQSDVLMTVVKDLLNFRSDLKVILMSATLNAEKFSEYFGNCPMIHIPGFTFPVVEYLLEDVIEKIRYVPEQKEHRSQFKRGFMQGHVNRQEKEEKEAIYKERWPDYVRELRRRYSASTVDVIEMMEDDKVDLNLIVALIRYIVLEEEDGAILVFLPGWDNISTLHDLLMSQVMFKSDKFLIIPLHSLMPTVNQTQVFKRTPPGVRKIVIATNIAETSITIDDVVYVIDGGKIKETHFDTQNNISTMSAEWVSKANAKQRKGRAGRVQPGHCYHLYNGLRASLLDDYQLPEILRTPLEELCLQIKILRLGGIAYFLSRLMDPPSNEAVLLSIRHLMELNALDKQEELTPLGVHLARLPVEPHIGKMILFGALFCCLDPVLTIAASLSFKDPFVIPLGWEEARRRGFRYEKDYCWEYFLSSNTLQMLHNMKGQFAEHLLGAGFVSSRNPKDPESNINSDNEKIIKAVICAGLYPKVAKIRLNLGKKRKMVKVYTKTDGLVAVHPKSVNVEQTDFHYNWLIYHLKMRTSSIYLYDCTEVSPYCLLFFGGDISIQKDNDQETIAVDEWIVFQSPARIAHLVKELRKELDILLQEKIESPHPVDWNDTKSRDCAVLSAIIDLIKTQEKATPRNFPPRFQDGYYS

SEQ ID NO: 4733 - DNA, 488 bp, Homo sapiens
agcggttgctggttctgacgggttgtagtctgccaggacaatgagttatgactaccatcagaactggggccgtgatgggggtccccgcagctccggtgggggctatggaggggggccagcagggggtcatggaggtaaccgaggctccggaggaggcggcggcggcggagggggtggtcgaggcggcaggggccggcatcccgggcacctgaaaggccgcgaaatcggcatgtggtacgcgaaaaaacaggggcagaagaacaaggaagcggagaggcaagagagagctgtagtacacatggatgaacgacgagaagaacaaattgtacagttactgaattctgttcaagcgaagaatgataaagagtcagaagcacagatatcctggtttgctcctgaggatcatggatacggtactgaagtttctactaagaacacaccatgctcagagaacaaacttgacatccaggaaaagaagttgataaatc

SEQ ID NO: 4734 - protein, 148 aa, Homo sapiens
MSYDYHQNWGRDGGPRSSGGGYGGGPAGGHGGNRGSGGGGGGGGGGRGGRGRHPGHLKGREIGMWYAKKQGQKNKEAERQERAVVHMDERREEQIVQLLNSVQAKNDKESEAQISWFAPEDHGYGTEVSTKNTPCSENKLDIQEKKLI

SEQ ID NO: 4735 - DNA, 265 bp, Homo sapiens
gctgctaaatacatttttggagattcactattctgtttagaaacgttcctgctgacaccagtgttctgaggggccttatcttccacccccaaggagtttatatgcatcctaagagaaattcacacatgggctataaagctaaaattttcacattattttgtacaaagtcaaaatgacttgaatactaaccacagaatattaagtggcttccactagatcagcattcccaatgtgtatcctgtgccccaatcctgtgagtaaattt

SEQ ID NO: 4736 - protein, 48 aa, Homo sapiens
GALSSTPKEFICILREIHTWAIKLKFSHYFVQSQNDLNTNHRILSGFH

SEQ ID NO: 4737 - DNA, 1256 bp, Homo sapiens
cagtcactgtacgaacacggcagactttagcctacacagtagactgtgttaggcacttctggtaacattgacactgtatcttgacaccactaagcaacaggaaggaataaattccaatattgagacagagatttatttcattttgctcccaaaggcactgacaacatgagtccttgtgattaggcccacctgatcaaatgtaaaaacatgcatgggatatttgattacgtaacaaccagctaaaactgagagcacacagccttcggaaacccccaaggtgtcgaggaggatcagatccagataagagaagatgattccttctagtcctgtaaaatttcctgtcatccttagctgctgggttgattgaaatttgatctctacatttcaaaatcaaactagtgaatacagtttgtctttcaagagaatcagaggcatcgtaactcctaccaagttaatgaggaaactgaggctcagatcagatgagaactcacttaaatccactcaatgtgtagatggtagagctgggactagcaacattgctgcagcccattgttggcctctctcttcactttatcattgcccaagaatgaggatatgcagtaaacagaattcaggcaagatacctctaagctgttttgaaccctctgatattttgtatttatgtgtttgtctgtctccccctactagaatgtaagctccatggggcagggacttcactgtattttgttcatagtgtatccccagagcctggaccagtgcttggcacataggagatggcaataaatgcttgtagaattaataaacaaggtgaaggagagagctaatgaaatgaaaatcttagtctcatataagaagtcttactactgctttctatggcaagttccttttctattgcatcttcccaaagacaagatgctcatctgcaaaggggtgataagatttacttggagggattttatggaaaattcagtgcaataattgcttttttttttttttttgcagtagcagtttacatagtacagcattctgcaaaaattgcatgaaatgtggacacaagatgtactgtatgacttaattacctgtcattctctgacaccattactacctactagaagttcaaataatttatctttaacattgcaatatctgataaactttttaaaatgtaaataattcaaagccttgaaaatctatcatgaatctgctcaacatttcaaagtgactattttgaaatgcctataaatgctatatacctg

SEQ ID NO: 4738 - protein, 79 aa, Homo sapiens
MRKLRLRSDENSLKSTQCVDGRAGTSNIAAAHCWPLSSLYHCPRMRICSKQNSGKIPLSCFEPSDILYLCVCLSPPTRM

SEQ ID NO: 4739 - DNA, 5985 bp, Homo sapiens
gagccctgagagtccgccgccaacgcgcaggtgctagcggccccttcgccctgcagcccctttgcttttactctgtccaaagttaacatgtcactgaaaaacgagccacgggtaaatacctctgcactgcagaaaattgctgctgacatgagtaatatcatagaaaatctggacacgcgggaactccactttgagggagaggaggtagactacgacgtgtctcccagcgatcccaagatacaagaagtgtatatccctttctctgctatttataacactcaaggatttaaggagcctaatatacagacgtatctctccggctgtccaataaaagcacaagttctggaagtggaacgcttcacatctacaacaagggtaccaagtattaatctttacactattgaattaacacatggggaatttaaatggcaagttaagaggaaattcaagcattttcaagaatttcacagagagctgctcaagtacaaagcctttatccgcatccccattcccactagaagacacacgtttaggaggcaaaacgtcagagaggagcctcgagagatgcccagtttgccccgttcatctgaaaacatgataagagaagaacaattccttggtagaagaaaacaactggaagattacttgacaaagatactaaaaatgcccatgtatagaaactatcatgccacaacagagtttcttgatataagccagctgtctttcatccatgatttgggaccaaagggcatagaaggtatgataatgaaaagatctggaggacacagaataccaggcttgaattgctgtggtcagggaagagcctgctacagatggtcaaaaagatggttaatagtgaaagattcctttttattgtatatgaaaccagacagcggtgccattgccttcgtcctgctggtagacaaagaattcaaaattaaggtggggaagaaggagacagaaacgaaatatggaatccgaattgataatctttcaaggacacttattttaaaatgcaacagctatagacatgctcggtggtggggaggggctatagaagaattcatccagaaacatggcaccaactttctcaaagatcatcgatttgggtcatatgctgctatccaagagaatgctttagctaaatggtatgttaatgccaaaggatattttgaagatgtggcaaatgcaatggaagaggcaaatgaagagatttttatcacagactggtggctgagtccagaaatcttcctgaaacgcccagtggttgagggaaatcgttggaggttggactgcattcttaaacgaaaagcacaacaaggagtgaggatcttcataatgctctacaaagaggtggaactcgctcttggcatcaatagtgaatacaccaagaggactttgatgcgtctacatcccaacataaaggtgatgagacacccggatcatgtgtcatccaccgtctatttgtgggctcaccatgagaagcttgtcatcattgaccaatcggtggcctttgtgggagggattgacctggcctatggaaggtgggacgacaatgagcacagactcacagacgtgggcagtgtgaagcgggtcacttcaggaccgtctctgggttccctcccacctgccgcaatggagtctatggaatccttaagactcaaagataaaaatgagcctgttcaaaacctacccatccagaagagtattgatgatgtggattcaaaactgaaaggaataggaaagccaagaaagttctccaaatttagtctctacaagcagctccacaggcaccacctgcacgacgcagatagcatcagcagcattgacagcacctccagttattttaatcactatagaagtcatcacaatttaatccatggtttaaaaccccacttcaaactctttcacccgtccagtgagtctgagcaaggactcactagacctcatgctgataccgggtccatccgtagtttacagacaggtgtgggagagctgcatggggaaaccagattctggcatggaaaggactactgcaatttcgtcttcaaagactgggttcaacttgataaaccttttgctgatttcattgacaggtactccacgccccggatgccctggcatgacattgcctctgcagtccacgggaaggcggctcgtgatgtggcacgtcacttcatccagcgctggaacttcacaaaaattatgaaatcaaaatatcggtccctttcttatccttttctgcttccaaagtctcaaacaacagcccatgagttgagatatcaagtgcctgggtctgtccatgctaacgtacagttgctccgctctgctgctgattggtctgctggtataaagtaccatgaagagtccatccacgccgcttacgtccatgtgatagagaacagcaggcactatatctatatcgaaaaccagtttttcataagctgtgctgatgacaaagttgtgttcaacaagataggcgatgccattgcccagaggatcctgaaagctcacagggaaaaccagaaataccgggtatatgtcgtgataccacttctgccagggttcgaaggagacatttcaaccggcggaggaaatgctctacaggcaatcatgcacttcaactacagaaccatgtgcagaggagaaaattccatccttggacagttaaaagcagagcttggtaatcagtggataaattacatatcattctgtggtcttagaacacatgcagagctcgaaggaaacctagtaactgagcttatctatgtccacagcaagttgttaattgctgatgataacactgttattattggctctgccaacataaatgaccgcagcatgctgggaaagcgtgacagtgaaatggctgtcattgtgcaagatacagagactgttccttcagtaatggatggaaaagagtaccaagctggccggtttgcccgaggacttcggctacagtgctttagggttgtccttggctatcttgatgacccaagtgaggacattcaggatccagtgagtgacaaattcttcaaggaggtgtgggtttcaacagcagctcgaaatgctacaatttatgacaaggttttccggtgccttcccaatgatgaagtacacaatttaattcagctgagagactttataaacaagcccgtattagctaaggaagatcccattcgagctgaggaggaactgaagaagatccgtggatttttggtgcaattccccttttatttcttgtctgaagaaagcctactgccttctgttgggaccaaagaggccatagtgcccatggaggtttggacttaagagatattcattggcagctcaaagacttccaccctggagaccacactgcacacagtgacttcctggggatgtcatagccaaagccaggcctgacgcattctcgtatccaacccaaggaccttttggaatgactggggagggctgcagtcacattgatgtaaggactgtaaacatcagcaagactttataattccttctgcctaacttgtaaaaagggggctgcattcttgttggtagcatgtactctgttgagtaaaacacatattcaaattccgtataccaaaatccatttcctttgtaacaagaatttaccagtaactgtgatctaggttgccaaaagttgtctgaatctccttattcttctctgatcttcatttatgcagccaatgtctagctggacctgccctcatcttgcagttcatacaggcactgtttgagagattgtttattattagatgttgtaatgctgcttcaagattcttcatggttacatgggatgcccctgctcatctggtcctgaagtagtaacattcacccaaatgaggatatagtcattattccttttcagtcactgtacgaacacggcagactttagcctacacagtagactgtgttaggcacttctggtaacattgacactgtatcttgacaccactaagcaacaggaaggaataaattccaatattgagacagagatttatttcattttgctcccaaaggcactgacaacatgagtccttgtgattaggcccacctgatcaaatgtaaaaacatgcatgggatatttgattacgtaacaaccagctaaaactgagagcacacagccttcggaaacccccaaggtgtcgaggaggatcagatccagataagagaagatgattccttctagtcctgtaaaatttcctgtcatccttagctgctgggttgattgaaatttgatctctacatttcaaaatcaaactagtgaatacagtttgtctttcaagagaatcagaggcatcgtaactcctaccaagttagtaagtatgagtctaaccttgtttgacattcaggtcttctgctacattatcttctttgagaaaaattaattgattataaaatatgtgctacttcacttacattattaaatatgtattaacgcctctcaccagggcttccagtgaagttacaatgccctagtctgtgaattagtctggaaacgtgtttttccttttcggatgttagagtaccctttgataaactaaattttactaagctgaacaactctgacagtctaaagagctaatgtgggttaccaaaaggcctgtacctgtaaaacaaaatgcaggtgtaatgattatacatgtctatggattacctggacatactctcatttgggttgttcttcaaagaagcaagcagccgatccctgttttcataaagctaatacttcagttggaaaaattaaacaggagcacaaagtcagggataggggttagcagaagagagaaatagtgtcacatcaagggcaggatctcatagctagggaacatttcacaaataaggtgagattttgtaaccaataataaaaatgaatgtttttataagtaaataacttatttttcatatggctaaagatggtaaaatgacttcattctatagccattgtaaataagaatttgctattgatgaaagaagttcagattggcatttgaagtattgagtgtatgggatctctaaggatttcttagattttatatttaaatattttttaaaccttagaggagtcaacaaactggctcttgattttcagcaccctactctcatgaaaaaagcctgaaaggaccctttcccttataagtaatttaatccaatttctccccattttatagatgaggaaactgaggctcagatcagatgagaactcacttaaatccactcaatgtgtagatggtagagctgggactagcaacattgctgcagcccattgttggcctctctcttcactttatcattgcccaagaatgaggatatgcagtaaacagaattcaggcaagatacctctaagctgttttgaaccctctgatattttgtatttatgtgtttgtctgtctccccctactagaatgtaagctccatggggcagggacttcactgtattttgttcatagtgtatccccagagcctggaccagtgcttggcacataggagatggcaataaatgcttgtagaattaataaacaaggtgaaggagagagctaatgaaatgaaaatcttagtctcatataagaagtcttactactgctttctatggcaagttccttttctattgcatcttcccaaagacaagatgctcatctgcaaaggggtgataagatttacttggagggattttatggaaaattcagtgcaataattgcttttttttttttttttgcagtagcagtttacatagtacagcattctgcaaaaattgcatgaaatgtggacacaagatgtactgtatgacttaattacctgtcattctctgacaccattactacctactagaagttcaaataatttatctttaacattgcaatatctgataaactttttaaaatgtaaataattcaaagccttgaaaatctatcatgaatctgctcaacatttcaaagtgactattttgaaatgcctataaatgctatatacctg

SEQ ID NO: 4740 - protein, 1074 aa, Homo sapiens; identical to SEQ ID NO: 482

SEQ ID NO: 4741 - DNA, 5578 bp, Homo sapiens
gagccctgagagtccgccgccaacgcgcaggtgctagcggccccttcgccctgcagcccctttgcttttactctgtccaaagttaacatgtcactgaaaaacgagccacgggtaaatacctctgcactgcagaaaattgctgctgacatgagtaatatcatagaaaatctggacacgcgggaactccactttgagggagaggaggtagactacgacgtgtctcccagcgatcccaagatacaagaagtgtatatccctttctctgctatttataacactcaaggatttaaggagcctaatatacagacgtatctctccggctgtccaataaaagcacaagttctggaagtggaacgcttcacatctacaacaagggtaccaagtattaatctttacactattgaattaacacatggggaatttaaatggcaagttaagaggaaattcaagcattttcaagaatttcacagagagctgctcaagtacaaagcctttatccgcatccccattcccactagaagacacacgtttaggaggcaaaacgtcagagaggagcctcgagagatgcccagtttgccccgttcatctgaaaacatgataagagaagaacaattccttggtagaagaaaacaactggaagattacttgacaaagatactaaaaatgcccatgtatagaaactatcatgccacaacagagtttcttgatataagccagctgtctttcatccatgatttgggaccaaagggcatagaaggtatgataatgaaaagatctggaggacacagaataccaggcttgaattgctgtggtcagggaagagcctgctacagatggtcaaaaagatggttaatagtgaaagattcctttttattgtatatgaaaccagacagcggtgccattgccttcgtcctgctggtagacaaagaattcaaaattaaggtggggaagaaggagacagaaacgaaatatggaatccgaattgataatctttcaaggacacttattttaaaatgcaacagctatagacatgctcggtggtggggaggggctatagaagaattcatccagaaacatggcaccaactttctcaaagatcatcgatttgggtcatatgctgctatccaagagaatgctttagctaaatggtatgttaatgccaaaggatattttgaagatgtggcaaatgcaatggaagaggcaaatgaagagatttttatcacagactggtggctgagtccagaaatcttcctgaaacgcccagtggttgagggaaatcgttggaggttggactgcattcttaaacgaaaagcacaacaaggagtgaggatcttcataatgctctacaaagaggtggaactcgctcttggcatcaatagtgaatacaccaagaggactttgatgcgtctacatcccaacataaaggtgatgagacacccggatcatgtgtcatccaccgtctatttgtgggctcaccatgagaagcttgtcatcattgaccaatcggtggcctttgtgggagggattgacctggcctatggaaggtgggacgacaatgagcacagactcacagacgtgggcagtgtgaagcgggtcacttcaggaccgtctctgggttccctcccacctgccgcaatggagtctatggaatccttaagactcaaagataaaaatgagcctgttcaaaacctacccatccagaagagtattgatgatgtggattcaaaactgaaaggaataggaaagccaagaaagttctccaaatttagtctctacaagcagctccacaggcaccacctgcacgacgcagatagcatcagcagcattgacagcacctccagttattttaatcactatagaagtcatcacaatttaatccatggtttaaaaccccacttcaaactctttcacccgtccagtgagtctgagcaaggactcactagacctcatgctgataccgggtccatccgtagtttacagacaggtgtgggagagctgcatggggaaaccagattctggcatggaaaggactactgcaatttcgtcttcaaagactgggttcaacttgataaaccttttgctgatttcattgacaggtactccacgccccggatgccctggcatgacattgcctctgcagtccacgggaaggcggctcgtgatgtggcacgtcacttcatccagcgctggaacttcacaaaaattatgaaatcaaaatatcggtccctttcttatccttttctgcttccaaagtctcaaacaacagcccatgagttgagatatcaagtgcctgggtctgtccatgctaacgtacagttgctccgctctgctgctgattggtctgctggtataaagtaccatgaagagtccatccacgccgcttacgtccatgtgatagagaacagcaggcactatatctatatcgaaaaccagtttttcataagctgtgctgatgacaaagttgtgttcaacaagataggcgatgccattgcccagaggatcctgaaagctcacagggaaaaccagaaataccgggtatatgtcgtgataccacttctgccagggttcgaaggagacatttcaaccggcggaggaaatgctctacaggcaatcatgcacttcaactacagaaccatgtgcagaggagaaaattccatccttggacagttaaaagcagagcttggtaatcagtggataaattacatatcattctgtggtcttagaacacatgcagagctcgaaggaaacctagtaactgagcttatctatgtccacagcaagttgttaattgctgatgataacactgttattattggctctgccaacataaatgaccgcagcatgctgggaaagcgtgacagtgaaatggctgtcattgtgcaagatacagagactgttccttcagtaatggatggaaaagagtaccaagctggccggtttgcccgaggacttcggctacagtgctttagggttgtccttggctatcttgatgacccaagtgaggacattcaggatccagtgagtgacaaattcttcaaggaggtgtgggtttcaacagcagctcgaaatgctacaatttatgacaaggttttccggtgccttcccaatgatgaagtacacaatttaattcagctgagagactttataaacaagcccgtattagctaaggaagatcccattcgagctgaggaggaactgaagaagatccgtggatttttggtgcaattccccttttatttcttgtctgaagaaagcctactgccttctgttgggaccaaagaggccatagtgcccatggaggtttggacttaagagatattcattggcagctcaaagacttccaccctggagaccacactgcacacagtgacttcctggggatgtcatagccaaagccaggcctgacgcattctcgtatccaacccaaggaccttttggaatgactggggagggctgcagtcacattgatgtaaggactgtaaacatcagcaagactttataattccttctgcctaacttgtaaaaagggggctgcattcttgttggtagcatgtactctgttgagtaaaacacatattcaaattccgtataccaaaatccatttcctttgtaacaagaatttaccagtaactgtgatctaggttgccaaaagttgtctgaatctccttattcttctctgatcttcatttatgcagccaatgtctagctggacctgccctcatcttgcagttcatacaggcactgtttgagagattgtttattattagatgttgtaatgctgcttcaagattcttcatggttacatgggatgcccctgctcatctggtcctgaagtagtaacattcacccaaatgaggatatagtcattattccttttcagtcactgtacgaacacggcagactttagcctacacagtagactgtgttaggcacttctggtaacattgacactgtatcttgacaccactaagcaacaggaaggaataaattccaatattgagacagagatttatttcattttgctcccaaaggcactgacaacatgagtccttgtgattaggcccacctgatcaaatgtaaaaacatgcatgggatatttgattacgtaacaaccagctaaaactgagagcacacagccttcggaaacccccaaggtgtcgaggaggatcagatccagataagagaagatgattccttctagtcctgtaaaatttcctgtcatccttagctgctgggttgattgaaatttgatctctacatttcaaaatcaaactagtgaatacagtttgtctttcaagagaatcagaggcatcgtaactcctaccaagttagtaagtatgagtctaaccttgtttgacattcaggtcttctgctacattatcttctttgagaaaaattaattgattataaaatatgtgctacttcacttacattattaaatatgtattaacgcctctcaccagggcttccagtgaagttacaatgccctagtctgtgaattagtctggaaacgtgtttttccttttcggatgttagagtaccctttgataaactaaattttactaagctgaacaactctgacagtctaaagagctaatgtgggttaccaaaaggcctgtacctgtaaaacaaaatgcaggtgtaatgattatacatgtctatggattacctggacatactctcatttgggttgttcttcaaagaagcaagcagccgatccctgttttcataaagctaatacttcagttggaaaaattaaacaggagcacaaagtcagggataggggttagcagaagagagaaatagtgtcacatcaagggcaggatctcatagctagggaacatttcacaaataaggtgagattttgtaaccaataataaaaatgaatgtttttataagtaaataacttatttttcatatggctaaagatggtaaaatgacttcattctatagccattgtaaataagaatttgctattgatgaaagaagttcagattggcatttgaagtattgagtgtatgggatctctaaggatttcttagattttatatttaaatattttttaaaccttagaggagtcaacaaactggctcttgattttcagcaccctactctcatgaaaaaagcctgaaaggaccctttcccttataagtaatttaatccaatttctccccattttatagatgaggaaactgaggctcagatcagatgagaactcacttaaatccactcaatgtgtagatggtagagctgggactagcaacattgctgcagcccattgttggcctctctcttcactttatcattgcccaagaatgaggatatgcagtaaacagaattcaggcaagatacctctaagctgttttgaaccctctgatattttgtatttatgtgtttgtctgtctccccctactagaatgtaagctccatggggcagggacttcactgtattttgttcatagtgtatccccagagcctggaccagtgcttggcacataggagatggcaataaatgcttgtagaattaataaacaaggtgaaggagagagctaatgaaatgaaaatcttagtctcatat

SEQ ID NO: 4742 - protein, 1074 aa, Homo sapiens; identical to SEQ ID NO: 482

SEQ ID NO: 4743 - DNA, 831 bp, Homo sapiens
cagtcactgtacgaacacggcagactttagcctacacagtagactgtgttaggcacttctggtaacattgacactgtatcttgacaccactaagcaacaggaaggaataaattccaatattgagacagagatttatttcattttgctcccaaaggcactgacaacatgagtccttgtgattaggcccacctgatcaaatgtaaaaacatgcatgggatatttgattacgtaacaaccagctaaaactgagagcacacagccttcggaaacccccaaggtgtcgaggaggatcagatccagataagagaagatgattccttctagtcctgtaaaatttcctgtcatccttagctgctgggttgattgaaatttgatctctacatttcaaaatcaaactagtgaatacagtttgtctttcaagagaatcagaggcatcgtaactcctaccaagttaatgaggaaactgaggctcagatcagatgagaactcacttaaatccactcaatgtgtagatggtagagctgggactagcaacattgctgcagcccattgttggcctctctcttcactttatcattgcccaagaatgaggatatgcagtaaacagaattcaggcaagatacctctaagctgttttgaaccctctgatattttgtatttatgtgtttgtctgtctccccctactagaatgtaagctccatggggcagggacttcactgtattttgttcatagtgtatccccagagcctggaccagtgcttggcacataggagatggcaataaatgcttgtagaattaataaacaaggtgaaggagagagctaatgaaatg

SEQ ID NO: 4744 - protein, 79 aa, Homo sapiens; identical to SEQ ID NO: 4738

SEQ ID NO: 4745 - DNA, 5533 bp, Homo sapiens
gagccctgagagtccgccgccaacgcgcaggtgctagcggccccttcgccctgcagcccctttgcttttactctgtccaaagttaacatgtcactgaaaaacgagccacgggtaaatacctctgcactgcagaaaattgctgctgacatgagtaatatcatagaaaatctggacacgcgggaactccactttgagggagaggaggtagactacgacgtgtctcccagcgatcccaagatacaagaagtgtatatccctttctctgctatttataacactcaaggatttaaggagcctaatatacagacgtatctctccggctgtccaataaaagcacaagttctggaagtggaacgcttcacatctacaacaagggtaccaagtattaatctttacactattgaattaacacatggggaatttaaatggcaagttaagaggaaattcaagcattttcaagaatttcacagagagctgctcaagtacaaagcctttatccgcatccccattcccactagaagacacacgtttaggaggcaaaacgtcagagaggagcctcgagagatgcccagtttgccccgttcatctgaaaacatgataagagaagaacaattccttggtagaagaaaacaactggaagattacttgacaaagatactaaaaatgcccatgtatagaaactatcatgccacaacagagtttcttgatataagccagctgtctttcatccatgatttgggaccaaagggcatagaaggtatgataatgaaaagatctggaggacacagaataccaggcttgaattgctgtggtcagggaagagcctgctacagatggtcaaaaagatggttaatagtgaaagattcctttttattgtatatgaaaccagacagcggtgccattgccttcgtcctgctggtagacaaagaattcaaaattaaggtggggaagaaggagacagaaacgaaatatggaatccgaattgataatctttcaaggacacttattttaaaatgcaacagctatagacatgctcggtggtggggaggggctatagaagaattcatccagaaacatggcaccaactttctcaaagatcatcgatttgggtcatatgctgctatccaagagaatgctttagctaaatggtatgttaatgccaaaggatattttgaagatgtggcaaatgcaatggaagaggcaaatgaagagatttttatcacagactggtggctgagtccagaaatcttcctgaaacgcccagtggttgagggaaatcgttggaggttggactgcattcttaaacgaaaagcacaacaaggagtgaggatcttcataatgctctacaaagaggtggaactcgctcttggcatcaatagtgaatacaccaagaggactttgatgcgtctacatcccaacataaaggtgatgagacacccggatcatgtgtcatccaccgtctatttgtgggctcaccatgagaagcttgtcatcattgaccaatcggtggcctttgtgggagggattgacctggcctatggaaggtgggacgacaatgagcacagactcacagacgtgggcagtgtgaagcgggtcacttcaggaccgtctctgggttccctcccacctgccgcaatggagtctatggaatccttaagactcaaagataaaaatgagcctgttcaaaacctacccatccagaagagtattgatgatgtggattcaaaactgaaaggaataggaaagccaagaaagttctccaaatttagtctctacaagcagctccacaggcaccacctgcacgacgcagatagcatcagcagcattgacagcacctccagttattttaatcactatagaagtcatcacaatttaatccatggtttaaaaccccacttcaaactctttcacccgtccagtgagtctgagcaaggactcactagacctcatgctgataccgggtccatccgtagtttacagacaggtgtgggagagctgcatggggaaaccagattctggcatggaaaggactactgcaatttcgtcttcaaagactgggttcaacttgataaaccttttgctgatttcattgacaggtactccacgccccggatgccctggcatgacattgcctctgcagtccacgggaaggcggctcgtgatgtggcacgtcacttcatccagcgctggaacttcacaaaaattatgaaatcaaaatatcggtccctttcttatccttttctgcttccaaagtctcaaacaacagcccatgagttgagatatcaagtgcctgggtctgtccatgctaacgtacagttgctccgctctgctgctgattggtctgctggtataaagtaccatgaagagtccatccacgccgcttacgtccatgtgatagagaacagcaggcactatatctatatcgaaaaccagtttttcataagctgtgctgatgacaaagttgtgttcaacaagataggcgatgccattgcccagaggatcctgaaagctcacagggaaaaccagaaataccgggtatatgtcgtgataccacttctgccagggttcgaaggagacatttcaaccggcggaggaaatgctctacaggcaatcatgcacttcaactacagaaccatgtgcagaggagaaaattccatccttggacagttaaaagcagagcttggtaatcagtggataaattacatatcattctgtggtcttagaacacatgcagagctcgaaggaaacctagtaactgagcttatctatgtccacagcaagttgttaattgctgatgataacactgttattattggctctgccaacataaatgaccgcagcatgctgggaaagcgtgacagtgaaatggctgtcattgtgcaagatacagagactgttccttcagtaatggatggaaaagagtaccaagctggccggtttgcccgaggacttcggctacagtgctttagggttgtccttggctatcttgatgacccaagtgaggacattcaggatccagtgagtgacaaattcttcaaggaggtgtgggtttcaacagcagctcgaaatgctacaatttatgacaaggttttccggtgccttcccaatgatgaagtacacaatttaattcagctgagagactttataaacaagcccgtattagctaaggaagatcccattcgagctgaggaggaactgaagaagatccgtggatttttggtgcaattccccttttatttcttgtctgaagaaagcctactgccttctgttgggaccaaagaggccatagtgcccatggaggtttggacttaagagatattcattggcagctcaaagacttccaccctggagaccacactgcacacagtgacttcctggggatgtcatagccaaagccaggcctgacgcattctcgtatccaacccaaggaccttttggaatgactggggagggctgcagtcacattgatgtaaggactgtaaacatcagcaagactttataattccttctgcctaacttgtaaaaagggggctgcattcttgttggtagcatgtactctgttgagtaaaacacatattcaaattccgtataccaaaatccatttcctttgtaacaagaatttaccagtaactgtgatctaggttgccaaaagttgtctgaatctccttattcttctctgatcttcatttatgcagccaatgtctagctggacctgccctcatcttgcagttcatacaggcactgtttgagagattgtttattattagatgttgtaatgctgcttcaagattcttcatggttacatgggatgcccctgctcatctggtcctgaagtagtaacattcacccaaatgaggatatagtcattattccttttcagtcactgtacgaacacggcagactttagcctacacagtagactgtgttaggcacttctggtaacattgacactgtatcttgacaccactaagcaacaggaaggaataaattccaatattgagacagagatttatttcattttgctcccaaaggcactgacaacatgagtccttgtgattaggcccacctgatcaaatgtaaaaacatgcatgggatatttgattacgtaacaaccagctaaaactgagagcacacagccttcggaaacccccaaggtgtcgaggaggatcagatccagataagagaagatgattccttctagtcctgtaaaatttcctgtcatccttagctgctgggttgattgaaatttgatctctacatttcaaaatcaaactagtgaatacagtttgtctttcaagagaatcagaggcatcgtaactcctaccaagttagtaagtatgagtctaaccttgtttgacattcaggtcttctgctacattatcttctttgagaaaaattaattgattataaaatatgtgctacttcacttacattattaaatatgtattaacgcctctcaccagggcttccagtgaagttacaatgccctagtctgtgaattagtctggaaacgtgtttttccttttcggatgttagagtaccctttgataaactaaattttactaagctgaacaactctgacagtctaaagagctaatgtgggttaccaaaaggcctgtacctgtaaaacaaaatgcaggtgtaatgattatacatgtctatggattacctggacatactctcatttgggttgttcttcaaagaagcaagcagccgatccctgttttcataaagctaatacttcagttggaaaaattaaacaggagcacaaagtcagggataggggttagcagaagagagaaatagtgtcacatcaagggcaggatctcatagctagggaacatttcacaaataaggtgagattttgtaaccaataataaaaatgaatgtttttataagtaaataacttatttttcatatggctaaagatggtaaaatgacttcattctatagccattgtaaataagaatttgctattgatgaaagaagttcagattggcatttgaagtattgagtgtatgggatctctaaggatttcttagattttatatttaaatattttttaaaccttagaggagtcaacaaactggctcttgattttcagcaccctactctcatgaaaaaagcctgaaaggaccctttcccttataagtaatttaatccaatttctccccattttatagatgaggaaactgaggctcagatcagatgagaactcacttaaatccactcaatgtgtagatggtagagctgggactagcaacattgctgcagcccattgttggcctctctcttcactttatcattgcccaagaatgaggatatgcagtaaacagaattcaggcaagatacctctaagctgttttgaaccctctgatattttgtatttatgtgtttgtctgtctccccctactagaatgtaagctccatggggcagggacttcactgtattttgttcatagtgtatccccagagcctggaccagtgcttggcacataggagatggcaataaatgcttgtagaattaataaac

SEQ ID NO: 4746 - protein, 1074 aa, Homo sapiens; identical to SEQ ID NO: 482

SEQ ID NO: 4747 - DNA, 3588 bp, Homo sapiens
gagccctgagagtccgccgccaacgcgcaggtgctagcggccccttcgccctgcagcccctttgcttttactctgtccaaagttaacatgtcactgaaaaacgagccacgggtaaatacctctgcactgcagaaaattgctgctgacatgagtaatatcatagaaaatctggacacgcgggaactccactttgagggagaggaggtagactacgacgtgtctcccagcgatcccaagatacaagaagtgtatatccctttctctgctatttataacactcaaggatttaaggagcctaatatacagacgtatctctccggctgtccaataaaagcacaagttctggaagtggaacgcttcacatctacaacaagggtaccaagtattaatctttacactattgaattaacacatggggaatttaaatggcaagttaagaggaaattcaagcattttcaagaatttcacagagagctgctcaagtacaaagcctttatccgcatccccattcccactagaagacacacgtttaggaggcaaaacgtcagagaggagcctcgagagatgcccagtttgccccgttcatctgaaaacatgataagagaagaacaattccttggtagaagaaaacaactggaagattacttgacaaagatactaaaaatgcccatgtatagaaactatcatgccacaacagagtttcttgatataagccagctgtctttcatccatgatttgggaccaaagggcatagaaggtatgataatgaaaagatctggaggacacagaataccaggcttgaattgctgtggtcagggaagagcctgctacagatggtcaaaaagatggttaatagtgaaagattcctttttattgtatatgaaaccagacagcggtgccattgccttcgtcctgctggtagacaaagaattcaaaattaaggtggggaagaaggagacagaaacgaaatatggaatccgaattgataatctttcaaggacacttattttaaaatgcaacagctatagacatgctcggtggtggggaggggctatagaagaattcatccagaaacatggcaccaactttctcaaagatcatcgatttgggtcatatgctgctatccaagagaatgctttagctaaatggtatgttaatgccaaaggatattttgaagatgtggcaaatgcaatggaagaggcaaatgaagagatttttatcacagactggtggctgagtccagaaatcttcctgaaacgcccagtggttgagggaaatcgttggaggttggactgcattcttaaacgaaaagcacaacaaggagtgaggatcttcataatgctctacaaagaggtggaactcgctcttggcatcaatagtgaatacaccaagaggactttgatgcgtctacatcccaacataaaggtgatgagacacccggatcatgtgtcatccaccgtctatttgtgggctcaccatgagaagcttgtcatcattgaccaatcggtggcctttgtgggagggattgacctggcctatggaaggtgggacgacaatgagcacagactcacagacgtgggcagtgtgaagcgggtcacttcaggaccgtctctgggttccctcccacctgccgcaatggagtctatggaatccttaagactcaaagataaaaatgagcctgttcaaaacctacccatccagaagagtattgatgatgtggattcaaaactgaaaggaataggaaagccaagaaagttctccaaatttagtctctacaagcagctccacaggcaccacctgcacgacgcagatagcatcagcagcattgacagcacctccagttattttaatcactatagaagtcatcacaatttaatccatggtttaaaaccccacttcaaactctttcacccgtccagtgagtctgagcaaggactcactagacctcatgctgataccgggtccatccgtagtttacagacaggtgtgggagagctgcatggggaaaccagattctggcatggaaaggactactgcaatttcgtcttcaaagactgggttcaacttgataaaccttttgctgatttcattgacaggtactccacgccccggatgccctggcatgacattgcctctgcagtccacgggaaggcggctcgtgatgtggcacgtcacttcatccagcgctggaacttcacaaaaattatgaaatcaaaatatcggtccctttcttatccttttctgcttccaaagtctcaaacaacagcccatgagttgagatatcaagtgcctgggtctgtccatgctaacgtacagttgctccgctctgctgctgattggtctgctggtataaagtaccatgaagagtccatccacgccgcttacgtccatgtgatagagaacagcaggcactatatctatatcgaaaaccagtttttcataagctgtgctgatgacaaagttgtgttcaacaagataggcgatgccattgcccagaggatcctgaaagctcacagggaaaaccagaaataccgggtatatgtcgtgataccacttctgccagggttcgaaggagacatttcaaccggcggaggaaatgctctacaggcaatcatgcacttcaactacagaaccatgtgcagaggagaaaattccatccttggacagttaaaagcagagcttggtaatcagtggataaattacatatcattctgtggtcttagaacacatgcagagctcgaaggaaacctagtaactgagcttatctatgtccacagcaagttgttaattgctgatgataacactgttattattggctctgccaacataaatgaccgcagcatgctgggaaagcgtgacagtgaaatggctgtcattgtgcaagatacagagactgttccttcagtaatggatggaaaagagtaccaagctggccggtttgcccgaggacttcggctacagtgctttagggttgtccttggctatcttgatgacccaagtgaggacattcaggatccagtgagtgacaaattcttcaaggaggtgtgggtttcaacagcagctcgaaatgctacaatttatgacaaggttttccggtgccttcccaatgatgaagtacacaatttaattcagctgagagactttataaacaagcccgtattagctaaggaagatcccattcgagctgaggaggaactgaagaagatccgtggatttttggtgcaattccccttttatttcttgtctgaagaaagcctactgccttctgttgggaccaaagaggccatagtgcccatggaggtttggacttaagagatattcattggcagctcaaagacttccaccctggagaccacactgcacacagtgacttcctggggatgtcatagccaaagccaggcctgacgcattctcgtatccaacccaaggaccttttggaatgactggggagggctgcagtcacattgatgtaaggactgtaaacatcagcaagactttataattccttctgcctaacttgtaaaaagggggctgcattcttgttggtagcatgtactctgttgagtaaaacacatattcaaattccgt

SEQ ID NO: 4748 - protein, 1074 aa, Homo sapiens; identical to SEQ ID NO: 482

SEQ ID NO: 4749 - DNA, 936 bp, Homo sapiens
gcggcggcggcggctggaggaggagagcggcggcggcgggagcagcgaagggggcggcagggatcctccaggctgccggctgggaaggcgtgggcgacccggtgtgtggcgcgcccagagccccgcgtttcagccctagggaaggaagccagttgagggaagttctccatgaatgtacgtcacaatgatgatgaccgaccaaatccctctggaactgccaccattgctgaacggagaggtagccatgatgccccacttggtgaatggagatgcagctcagcaggttattctcgttcaagttaatccaggtgagactttcacaataagagcagaggatggaacacttcagtgcattcaagatgaagtggtgaagagagcctgcgattgaagattttttcatctcagctttttcccccttaccttgttctctctcatgtttcatgatctgtgtcatagatatttcttcattacgagcacttcgcggtgtggcttttcaatgtctgaagtggattaagtggcccacagtcagttctgtgacttgagtttcaaaagtaaaattaccatcaacaatgtgattcaattttattttctatactagctaaaagcaaggaactatattattaacaatcttggctttactgtagtttaaggcaggtgatgatgatgcttattagtccacctgaaagagtccttccaggtttttggaagctttattcctgcttattaccttgcccttgagaagtccttcatggaaagtggaaacactgggttgacttcttttccccatatcctagttgaaagggacagcttatatgtatgttagactgtccaaaagtgtttgtagaacctcattttaaaaaatcaactgtattgtactttttaaaaaatgggatcttaaactctttattaaaaataataaatggaaatgtgttaagc

SEQ ID NO: 4750 - protein, 71 aa, Homo sapiens
MYVTMMMTDQIPLELPPLLNGEVAMMPHLVNGDAAQQVILVQVNPGETFTIRAEDGTLQCIQDEVVKRACD

SEQ ID NO: 4751 - DNA, 5078 bp, Homo sapiens
aggagagcggcggcggcgggagcagcgaagggggcggcagggatcctccaggctgccggctgggaaggcgtgggcgacccggtgtgtggcgcgcccagagccccgcgtttcagccctagggaaggaagccagttgagggaagttctccatgaatgtacgtcacaatgatgatgaccgaccaaatccctctggaactgccaccattgctgaacggagaggtagccatgatgccccacttggtgaatggagatgcagctcagcaggttattctcgttcaagttaatccaggtgagactttcacaataagagcagaggatggaacacttcagtgcattcaaggacctgctgaagttcccatgatgtcacccaatggatccattcctcccattcatgtgcctccaggttatatctcacaggtgattgaagatagtactggagtccgccgggtggtggtcacaccccagtctcctgagtgttatcccccaagctacccctcagccatgtctccaacccatcatctccctccctatctgactcaccatccacattttattcataactcacacacggcttactacccacctgttaccggacctggagatatgccgcctcagttttttccccagcatcatcttccccacacaatatatggtgagcaagaaattataccattttatggaatgtcaacctacatcacccgagaagaccagtacagcaagcctccgcacaaaaaactgaaagaccgccagatcgatcgccagaaccgcctcaacagccctccttcttctatctacaaaagcagctgcacaacagtatacaatggctatgggaagggccatagtggtggaagtggcggaggcggcagcggtagtggtcccggaattaagaaaacagagcgacgagcaagaagcagcccaaagtcgaatgattcagacttgcaagaatatgagttggaagtaaagagggtgcaagacattctttcgggaatagagaaaccacaggtttctaatattcaggcaagagcagttgtgttgtcctgggctccccctgttggactttcctgtggaccccacagtggtctttccttcccctacagttacgaggtggccttatcagacaaaggacgagatggaaaatacaagataatttacagtggagaagaattagaatgtaacctgaaagatcttagaccagcaacagattatcatgtgagggtgtatgccatgtacaattccgtaaagggatcctgctccgagcctgttagcttcaccacccacagctgtgcacccgagtgtcctttcccccctaagctggcacataggagcaaaagttcactaaccctgcagtggaaggcaccaattgacaacggttcaaaaatcaccaactaccttttagagtgggatgagggaaaaagaaatagtggtttcagacagtgcttcttcgggagccagaagcactgcaagttgacaaagctttgtccggcaatggggtacacattcaggctggccgctcgaaacgacattggtaccagtggttatagccaagaggtggtgtgctacacattaggaaatatccctcagatgccttctgcaccaaggctggttcgagctggcatcacatgggtcacgttgcagtggagtaagccagaaggctgttcacccgaggaagtgatcacctacaccttggaaattcaggaggatgaaaatgataaccttttccacccaaaatacactggagaggatttaacctgtactgtgaaaaatctcaaaagaagcacacagtataaattcaggctgactgcttctaatacggaaggaaaaagctgtccaagcgaagttcttgtttgtacgacgagtcctgacaggcctggacctcctaccagaccgcttgtcaaaggcccagttacatctcatggctttagtgtcaaatgggatccccctaaggacaatggtggttcagaaatcctcaagtacttgctagagattactgatggaaattctgaagcgaatcagtgggaagtggcctacagtgggtcggctaccgaatacaccttcacccacttgaaaccaggcactttgtacaaactccgagcatgctgcatcagtaccggcggacacagccagtgttctgaaagtctccctgttcgcacactaagcattgcaccaggtcaatgtcgaccaccgagggttttgggtagaccaaagcacaaagaagtccacttagagtgggatgttcctgcatcggaaagtggctgtgaggtctcagagtacagcgtggagatgacggagcccgaagacgtagcctcggaagtgtaccatggcccagagctggagtgcaccgtcggcaacctgcttcctggaaccgtgtatcgcttccgggtgagggctctgaatgatggagggtatggtccctattctgatgtctcagaaattaccactgctgcagggcctcctggacaatgcaaagcaccttgtatttcttgtacacctgatggatgtgtcttagtgggttgggagagtcctgatagttctggtgctgacatctcagagtacaggttggaatggggagaagatgaagaatccttagaactcatttatcatgggacagacacccgttttgaaataagagacctgttgcctgctgcacagtattgctgtagactacaggccttcaatcaagcaggggcagggccgtacagtgaacttgtcctttgccagacgccagcgtctgcccctgaccccgtctccactctctgtgtcctggaggaggagccccttgatgcctaccctgattcaccttctgcgtgccttgtactgaactgggaagagccgtgcaataacggatctgaaatccttgcttacaccattgatctaggagacactagcattaccgtgggcaacaccaccatgcatgttatgaaagatctccttccagaaaccacctaccggatcagaattcaggctataaatgaaattggagctggaccatttagtcagttcattaaagcaaaaactcggccattaccacccttgcctcctaggctagaatgtgctgctgctggtcctcagagcctgaagctaaaatggggagacagtaactccaagacacatgctgctgaggacattgtgtacacactacagctggaggacagaaacaagaggtttatttcaatctacagaggacccagccacacctacaaggtccagagactgacggaattcacatgctactccttcagaatccaggcagcaagcgaggctggagaagggcccttctcagaaacctataccttcagcacaaccaaaagtgtcccccccaccatcaaagcacctcgagtaacacagttagaaggaaattcatgtgaaattttatgggagacggtaccatcaatgaaaggtgaccctgttaactacattctgcaggtattggttggaagagaatctgagtacaaacaggtgtacaagggagaagaagccacattccaaatctcaggcctccagaccaacacagactacaggttccgcgtatgtgcgtgtcgtcgctgtttagacacctctcaggagctaagcggagccttcagcccctctgcggcttttgtattacaacgaagtgaggtcatgcttacaggggacatggggagcttagatgatcccaaaatgaagagcatgatgcctactgatgaacagtttgcagccatcattgtgcttggctttgcaactttgtccattttatttgcctttatattacagtacttcttaatgaagtaaacccaacaaaactagaggtatgaattaatgctacacattttaatacacacatttattcagatactcccctttttaaagcccttttgttttttgatttatatactctgttttacagatttagctagaaaaaaaatgtcagtgttttggtgcacctttttgaaatgcaaaactaggaaaaggttaaactggatttttttttttaaaaaaaagaaaaaaaaagaagaaaagtataccagataccaaaagctagctttcttatgttttcctttaaattttcagatttaccttcattctgttttcactgatgtcttttgcaagcctttgatttttttttttttgttacagtttagtaatttatattcaccagtcacttcatatgtcttgaacatctgtatctgtaaacatgaatcaccgtgtgtgtacttacagggctaggatttcagtgttgtcagagtattaccacacagcaacagcaacatacagaagatatgttcactcagataagactgccctaaacaaccattttgtcactcagttatttaactgtgtttagctcatttaaatcaaaatgtgtactttaatctaaaatgttttaataatctgtatttcttataattttaacactatgagctgcctgtataagaaatcaagtaaccagaatgcacctataaattatggagcattgtagattttaccacatcaattcatagcagtaactttaagagggcattgtgcaatagttagttgttttcttgttcagctattttaaaggctgctttaacttgtttgtttgtctttgtatataactacttctaatctaatcactagagttattatattctgttatgtttgaccagaattatatgacaagaactggtgacagtttagtgcctctgcccattgtccatgatttacactaattgtgagcagtcttcttatgtgtcagctcattatttttgaaacatttgcctttaggctgttctttgaggtatcaatgaagtgattgaatttcaataccttaattcagtgcacataatactaatgtaacagcagatgaaaattgataaaacccaaaagagagtcatctaaatttgtagttcctatttctgtgggtttgcctggccatggttggagagggaatggtgtttgatggtaaacacagggtgtttggggatcaaggagcctagattctctccctggatctgtcactaacttgctgcgtgacctgaacacgtcactttacctctctgtgcctcagttttcccatgcatgaaaaataaaataaaataaaacggggattctaatgtttgt

SEQ ID NO: 4752 - protein, 1204 aa, Homo sapiens
MYVTMMMTDQIPLELPPLLNGEVAMMPHLVNGDAAQQVILVQVNPGETFTIRAEDGTLQCIQGPAEVPMMSPNGSIPPIHVPPGYISQVIEDSTGVRRVVVTPQSPECYPPSYPSAMSPTHHLPPYLTHHPHFIHNSHTAYYPPVTGPGDMPPQFFPQHHLPHTIYGEQEIIPFYGMSTYITREDQYSKPPHKKLKDRQIDRQNRLNSPPSSIYKSSCTTVYNGYGKGHSGGSGGGGSGSGPGIKKTERRARSSPKSNDSDLQEYELEVKRVQDILSGIEKPQVSNIQARAVVLSWAPPVGLSCGPHSGLSFPYSYEVALSDKGRDGKYKIIYSGEELECNLKDLRPATDYHVRVYAMYNSVKGSCSEPVSFTTHSCAPECPFPPKLAHRSKSSLTLQWKAPIDNGSKITNYLLEWDEGKRNSGFRQCFFGSQKHCKLTKLCPAMGYTFRLAARNDIGTSGYSQEVVCYTLGNIPQMPSAPRLVRAGITWVTLQWSKPEGCSPEEVITYTLEIQEDENDNLFHPKYTGEDLTCTVKNLKRSTQYKFRLTASNTEGKSCPSEVLVCTTSPDRPGPPTRPLVKGPVTSHGFSVKWDPPKDNGGSEILKYLLEITDGNSEANQWEVAYSGSATEYTFTHLKPGTLYKLRACCISTGGHSQCSESLPVRTLSIAPGQCRPPRVLGRPKHKEVHLEWDVPASESGCEVSEYSVEMTEPEDVASEVYHGPELECTVGNLLPGTVYRFRVRALNDGGYGPYSDVSEITTAAGPPGQCKAPCISCTPDGCVLVGWESPDSSGADISEYRLEWGEDEESLELIYHGTDTRFEIRDLLPAAQYCCRLQAFNQAGAGPYSELVLCQTPASAPDPVSTLCVLEEEPLDAYPDSPSACLVLNWEEPCNNGSEILAYTIDLGDTSITVGNTTMHVMKDLLPETTYRIRIQAINEIGAGPFSQFIKAKTRPLPPLPPRLECAAAGPQSLKLKWGDSNSKTHAAEDIVYTLQLEDRNKRFISIYRGPSHTYKVQRLTEFTCYSFRIQAASEAGEGPFSETYTFSTTKSVPPTIKAPRVTQLEGNSCEILWETVPSMKGDPVNYILQVLVGRESEYKQVYKGEEATFQISGLQTNTDYRFRVCACRRCLDTSQELSGAFSPSAAFVLQRSEVMLTGDMGSLDDPKMKSMMPTDEQFAAIIVLGFATLSILFAFILQYFLMK

SEQ ID NO: 4753 - DNA, 5685 bp, Homo sapiens
aggagagcggcggcggcgggagcagcgaagggggcggcagggatcctccaggctgccggctgggaaggcgtgggcgacccggtgtgtggcgcgcccagagccccgcgtttcagccctagggaaggaagccagttgagggaagttctccatgaatgtacgtcacaatgatgatgaccgaccaaatccctctggaactgccaccattgctgaacggagaggtagccatgatgccccacttggtgaatggagatgcagctcagcaggttattctcgttcaagttaatccaggtgagactttcacaataagagcagaggatggaacacttcagtgcattcaaggacctgctgaagttcccatgatgtcacccaatggatccattcctcccattcatgtgcctccaggttatatctcacaggtgattgaagatagtactggagtccgccgggtggtggtcacaccccagtctcctgagtgttatcccccaagctacccctcagccatgtctccaacccatcatctccctccctatctgactcaccatccacattttattcataactcacacacggcttactacccacctgttaccggacctggagatatgccgcctcagttttttccccagcatcatcttccccacacaatatatggtgagcaagaaattataccattttatggaatgtcaacctacatcacccgagaagaccagtacagcaagcctccgcacaaaaaactgaaagaccgccagatcgatcgccagaaccgcctcaacagccctccttcttctatctacaaaagcagctgcacaacagtatacaatggctatgggaagggccatagtggtggaagtggcggaggcggcagcggtagtggtcccggaattaagaaaacagagcgacgagcaagaagcagcccaaagtcgaatgattcagacttgcaagaatatgagttggaagtaaagagggtgcaagacattctttcgggaatagagaaaccacaggtttctaatattcaggcaagagcagttgtgttgtcctgggctccccctgttggactttcctgtggaccccacagtggtctttccttcccctacagttacgaggtggccttatcagacaaaggacgagatggaaaatacaagataatttacagtggagaagaattagaatgtaacctgaaagatcttagaccagcaacagattatcatgtgagggtgtatgccatgtacaattccgtaaagggatcctgctccgagcctgttagcttcaccacccacagctgtgcacccgagtgtcctttcccccctaagctggcacataggagcaaaagttcactaaccctgcagtggaaggcaccaattgacaacggttcaaaaatcaccaactaccttttagagtgggatgagggaaaaagaaatagtggtttcagacagtgcttcttcgggagccagaagcactgcaagttgacaaagctttgtccggcaatggggtacacattcaggctggccgctcgaaacgacattggtaccagtggttatagccaagaggtggtgtgctacacattaggaaatatccctcagatgccttctgcaccaaggctggttcgagctggcatcacatgggtcacgttgcagtggagtaagccagaaggctgttcacccgaggaagtgatcacctacaccttggaaattcaggaggatgaaaatgataaccttttccacccaaaatacactggagaggatttaacctgtactgtgaaaaatctcaaaagaagcacacagtataaattcaggctgactgcttctaatacggaaggaaaaagctgtccaagcgaagttcttgtttgtacgacgagtcctgacaggcctggacctcctaccagaccgcttgtcaaaggcccagttacatctcatggctttagtgtcaaatgggatccccctaaggacaatggtggttcagaaatcctcaagtacttgctagagattactgatggaaattctgaagcgaatcagtgggaagtggcctacagtgggtcggctaccgaatacaccttcacccacttgaaaccaggcactttgtacaaactccgagcatgctgcatcagtaccggcggacacagccagtgttctgaaagtctccctgttcgcacactaagcattgcaccaggtcaatgtcgaccaccgagggttttgggtagaccaaagcacaaagaagtccacttagagtgggatgttcctgcatcggaaagtggctgtgaggtctcagagtacagcgtggagatgacggagcccgaagacgtagcctcggaagtgtaccatggcccagagctggagtgcaccgtcggcaacctgcttcctggaaccgtgtatcgcttccgggtgagggctctgaatgatggagggtatggtccctattctgatgtctcagaaattaccactgctgcagggcctcctggacaatgcaaagcaccttgtatttcttgtacacctgatggatgtgtcttagtgggttgggagagtcctgatagttctggtgctgacatctcagagtacaggttggaatggggagaagatgaagaatccttagaactcatttatcatgggacagacacccgttttgaaataagagacctgttgcctgctgcacagtattgctgtagactacaggccttcaatcaagcaggggcagggccgtacagtgaacttgtcctttgccagacgccagcgtctgcccctgaccccgtctccactctctgtgtcctggaggaggagccccttgatgcctaccctgattcaccttctgcgtgccttgtactgaactgggaagagccgtgcaataacggatctgaaatccttgcttacaccattgatctaggagacactagcattaccgtgggcaacaccaccatgcatgttatgaaagatctccttccagaaaccacctaccggatcagaattcaggctataaatgaaattggagctggaccatttagtcagttcattaaagcaaaaactcggccattaccacccttgcctcctaggctagaatgtgctgctgctggtcctcagagcctgaagctaaaatggggagacagtaactccaagacacatgctgctgaggacattgtgtacacactacagctggaggacagaaacaagaggtttatttcaatctacagaggacccagccacacctacaaggtccagagactgacggaattcacatgctactccttcagaatccaggcagcaagcgaggctggagaagggcccttctcagaaacctataccttcagcacaaccaaaagtgtcccccccaccatcaaagcacctcgagtaacacagttagaaggaaattcatgtgaaattttatgggagacggtaccatcaatgaaaggtgaccctgttaactacattctgcaggtattggttggaagagaatctgagtacaaacaggtgtacaagggagaagaagccacattccaaatctcaggcctccagaccaacacagactacaggttccgcgtatgtgcgtgtcgtcgctgtttagacacctctcaggagctaagcggagccttcagcccctctgcggcttttgtattacaacgaagtgaggtcatgcttacaggggacatggggagcttagatgatcccaaaatgaagagcatgatgcctactgatgaacagtttgcagccatcattgtgcttggctttgcaactttgtccattttatttgcctttatattacagtacttcttaatgaagtaaacccaacaaaactagaggtatgaattaatgctacacattttaatacacacatttattcagatactcccctttttaaagcccttttgttttttgatttatatactctgttttacagatttagctagaaaaaaaatgtcagtgttttggtgcacctttttgaaatgcaaaactaggaaaaggttaaactggatttttttttttaaaaaaaagaaaaaaaaagaagaaaagtataccagataccaaaagctagctttcttatgttttcctttaaattttcagatttaccttcattctgttttcactgatgtcttttgcaagcctttgatttttttttttttgttacagtttagtaatttatattcaccagtcacttcatatgtcttgaacatctgtatctgtaaacatgaatcaccgtgtgtgtacttacagggctaggatttcagtgttgtcagagtattaccacacagcaacagcaacatacagaagatatgttcactcagataagactgccctaaacaaccattttgtcactcagttatttaactgtgtttagctcatttaaatcaaaatgtgtactttaatctaaaatgttttaataatctgtatttcttataattttaacactatgagctgcctgtataagaaatcaagtaaccagaatgcacctataaattatggagcattgtagattttaccacatcaattcatagcagtaactttaagagggcattgtgcaatagttagttgttttcttgttcagctattttaaaggctgctttaacttgtttgtttgtctttgtatataactacttctaatctaatcactagagttattatattctgttatgtttgaccagaattatatgacaagaactggtgacagtttagtgcctctgcccattgtccatgatttacactaattgtgagcagtcttcttatgtgtcagctcattatttttgaaacatttgcctttaggctgttctttgaggtatcaatgaagtgattgaatttcaataccttaattcagtgcacataatactaatgtaacagcagatgaaaattgataaaacccaaaagagagtcatctaaatttgtagttcctatttctgtgggtttgcctggccatggttggagagggaatggtgtttgatggtaaacacagggtgtttggggatcaaggagcctagattctctccctggatctgtcactaacttgctgcgtgacctgaacacgtcactttacctctctgtgcctcagttttcccatgcatgaaaaataaaataaaataaaacggggattctaatgtttgtaagtgctttgagatctttgaccaacaggtgctattggagtgcaaagtgttactcttacgtgtttattttgagtcatgagataatcaattttaacccaaagtcattggattatttatatgaagtccataatgttcgagtacctcagggacatttaagagttggaggtgcaaatatattccaaaagggtgcaacagacacagtgtatccccctgcttctgtttttgtatatttttgctacttggtttttcttgatcatagctattttgtgcttgatctttattgtctaagatgcagtatcctgtactagcttataatattcccataccaaagtcatggggaaacaaacattattttgtttttggtttatttatactatattctgcatacagtactttaaatgccaattacagtgcaatctttatttattgtaaaattttttaagtgtacttatgtactaattttcccttgtagcatgttatatttttgtgttttatacttttgtaattttaggtcagtcttgttccttggcaacatctgtagtattattaatcttctgacattttcttatgtttttaaaaagataagagcatctagtgcattaaatgcc

SEQ ID NO: 4754 - protein, 1204 aa, Homo sapiens; identical to SEQ ID NO: 4752

SEQ ID NO: 4755 - DNA, 6997 bp, Homo sapiens
aggagagcggcggcggcgggagcagcgaagggggcggcagggatcctccaggctgccggctgggaaggcgtgggcgacccggtgtgtggcgcgcccagagccccgcgtttcagccctagggaaggaagccagttgagggaagttctccatgaatgtacgtcacaatgatgatgaccgaccaaatccctctggaactgccaccattgctgaacggagaggtagccatgatgccccacttggtgaatggagatgcagctcagcaggttattctcgttcaagttaatccaggtgagactttcacaataagagcagaggatggaacacttcagtgcattcaaggacctgctgaagttcccatgatgtcacccaatggatccattcctcccattcatgtgcctccaggttatatctcacaggtgattgaagatagtactggagtccgccgggtggtggtcacaccccagtctcctgagtgttatcccccaagctacccctcagccatgtctccaacccatcatctccctccctatctgactcaccatccacattttattcataactcacacacggcttactacccacctgttaccggacctggagatatgccgcctcagttttttccccagcatcatcttccccacacaatatatggtgagcaagaaattataccattttatggaatgtcaacctacatcacccgagaagaccagtacagcaagcctccgcacaaaaaactgaaagaccgccagatcgatcgccagaaccgcctcaacagccctccttcttctatctacaaaagcagctgcacaacagtatacaatggctatgggaagggccatagtggtggaagtggcggaggcggcagcggtagtggtcccggaattaagaaaacagagcgacgagcaagaagcagcccaaagtcgaatgattcagacttgcaagaatatgagttggaagtaaagagggtgcaagacattctttcgggaatagagaaaccacaggtttctaatattcaggcaagagcagttgtgttgtcctgggctccccctgttggactttcctgtggaccccacagtggtctttccttcccctacagttacgaggtggccttatcagacaaaggacgagatggaaaatacaagataatttacagtggagaagaattagaatgtaacctgaaagatcttagaccagcaacagattatcatgtgagggtgtatgccatgtacaattccgtaaagggatcctgctccgagcctgttagcttcaccacccacagctgtgcacccgagtgtcctttcccccctaagctggcacataggagcaaaagttcactaaccctgcagtggaaggcaccaattgacaacggttcaaaaatcaccaactaccttttagagtgggatgagggaaaaagaaatagtggtttcagacagtgcttcttcgggagccagaagcactgcaagttgacaaagctttgtccggcaatggggtacacattcaggctggccgctcgaaacgacattggtaccagtggttatagccaagaggtggtgtgctacacattaggaaatatccctcagatgccttctgcaccaaggctggttcgagctggcatcacatgggtcacgttgcagtggagtaagccagaaggctgttcacccgaggaagtgatcacctacaccttggaaattcaggaggatgaaaatgataaccttttccacccaaaatacactggagaggatttaacctgtactgtgaaaaatctcaaaagaagcacacagtataaattcaggctgactgcttctaatacggaaggaaaaagctgtccaagcgaagttcttgtttgtacgacgagtcctgacaggcctggacctcctaccagaccgcttgtcaaaggcccagttacatctcatggctttagtgtcaaatgggatccccctaaggacaatggtggttcagaaatcctcaagtacttgctagagattactgatggaaattctgaagcgaatcagtgggaagtggcctacagtgggtcggctaccgaatacaccttcacccacttgaaaccaggcactttgtacaaactccgagcatgctgcatcagtaccggcggacacagccagtgttctgaaagtctccctgttcgcacactaagcattgcaccaggtcaatgtcgaccaccgagggttttgggtagaccaaagcacaaagaagtccacttagagtgggatgttcctgcatcggaaagtggctgtgaggtctcagagtacagcgtggagatgacggagcccgaagacgtagcctcggaagtgtaccatggcccagagctggagtgcaccgtcggcaacctgcttcctggaaccgtgtatcgcttccgggtgagggctctgaatgatggagggtatggtccctattctgatgtctcagaaattaccactgctgcagggcctcctggacaatgcaaagcaccttgtatttcttgtacacctgatggatgtgtcttagtgggttgggagagtcctgatagttctggtgctgacatctcagagtacaggttggaatggggagaagatgaagaatccttagaactcatttatcatgggacagacacccgttttgaaataagagacctgttgcctgctgcacagtattgctgtagactacaggccttcaatcaagcaggggcagggccgtacagtgaacttgtcctttgccagacgccagcgtctgcccctgaccccgtctccactctctgtgtcctggaggaggagccccttgatgcctaccctgattcaccttctgcgtgccttgtactgaactgggaagagccgtgcaataacggatctgaaatccttgcttacaccattgatctaggagacactagcattaccgtgggcaacaccaccatgcatgttatgaaagatctccttccagaaaccacctaccggatcagaattcaggctataaatgaaattggagctggaccatttagtcagttcattaaagcaaaaactcggccattaccacccttgcctcctaggctagaatgtgctgctgctggtcctcagagcctgaagctaaaatggggagacagtaactccaagacacatgctgctgaggacattgtgtacacactacagctggaggacagaaacaagaggtttatttcaatctacagaggacccagccacacctacaaggtccagagactgacggaattcacatgctactccttcagaatccaggcagcaagcgaggctggagaagggcccttctcagaaacctataccttcagcacaaccaaaagtgtcccccccaccatcaaagcacctcgagtaacacagttagaaggaaattcatgtgaaattttatgggagacggtaccatcaatgaaaggtgaccctgttaactacattctgcaggtattggttggaagagaatctgagtacaaacaggtgtacaagggagaagaagccacattccaaatctcaggcctccagaccaacacagactacaggttccgcgtatgtgcgtgtcgtcgctgtttagacacctctcaggagctaagcggagccttcagcccctctgcggcttttgtattacaacgaagtgaggtcatgcttacaggggacatggggagcttagatgatcccaaaatgaagagcatgatgcctactgatgaacagtttgcagccatcattgtgcttggctttgcaactttgtccattttatttgcctttatattacagtacttcttaatgaagtaaacccaacaaaactagaggtatgaattaatgctacacattttaatacacacatttattcagatactcccctttttaaagcccttttgttttttgatttatatactctgttttacagatttagctagaaaaaaaatgtcagtgttttggtgcacctttttgaaatgcaaaactaggaaaaggttaaactggatttttttttttaaaaaaaagaaaaaaaaagaagaaaagtataccagataccaaaagctagctttcttatgttttcctttaaattttcagatttaccttcattctgttttcactgatgtcttttgcaagcctttgatttttttttttttgttacagtttagtaatttatattcaccagtcacttcatatgtcttgaacatctgtatctgtaaacatgaatcaccgtgtgtgtacttacagggctaggatttcagtgttgtcagagtattaccacacagcaacagcaacatacagaagatatgttcactcagataagactgccctaaacaaccattttgtcactcagttatttaactgtgtttagctcatttaaatcaaaatgtgtactttaatctaaaatgttttaataatctgtatttcttataattttaacactatgagctgcctgtataagaaatcaagtaaccagaatgcacctataaattatggagcattgtagattttaccacatcaattcatagcagtaactttaagagggcattgtgcaatagttagttgttttcttgttcagctattttaaaggctgctttaacttgtttgtttgtctttgtatataactacttctaatctaatcactagagttattatattctgttatgtttgaccagaattatatgacaagaactggtgacagtttagtgcctctgcccattgtccatgatttacactaattgtgagcagtcttcttatgtgtcagctcattatttttgaaacatttgcctttaggctgttctttgaggtatcaatgaagtgattgaatttcaataccttaattcagtgcacataatactaatgtaacagcagatgaaaattgataaaacccaaaagagagtcatctaaatttgtagttcctatttctgtgggtttgcctggccatggttggagagggaatggtgtttgatggtaaacacagggtgtttggggatcaaggagcctagattctctccctggatctgtcactaacttgctgcgtgacctgaacacgtcactttacctctctgtgcctcagttttcccatgcatgaaaaataaaataaaataaaacggggattctaatgtttgtaagtgctttgagatctttgaccaacaggtgctattggagtgcaaagtgttactcttacgtgtttattttgagtcatgagataatcaattttaacccaaagtcattggattatttatatgaagtccataatgttcgagtacctcagggacatttaagagttggaggtgcaaatatattccaaaagggtgcaacagacacagtgtatccccctgcttctgtttttgtatatttttgctacttggtttttcttgatcatagctattttgtgcttgatctttattgtctaagatgcagtatcctgtactagcttataatattcccataccaaagtcatggggaaacaaacattattttgtttttggtttatttatactatattctgcatacagtactttaaatgccaattacagtgcaatctttatttattgtaaaattttttaagtgtacttatgtactaattttcccttgtagcatgttatatttttgtgttttatacttttgtaattttaggtcagtcttgttccttggcaacatctgtagtattattaatcttctgacattttcttatgtttttaaaaagataagagcatctagtgcattaaatgccaaaaaaaaaatacattatcagtgattgaaacgtttacatgtacccaaaaaccataatcatctcttggaagaaaatgctgagatcaatgaattattctgtgtgcctatattgacgtagtgagtactagagagttctgtattttattattgactataataattagtttaattagctttgcaaactgatggcatcaaggtaaatatatttttgccaaagttctggccttccaaaactcacccccttatttaaatgtgtgctatgacccactatgaccacagcatctgcattttctaaaaaattccatgcaggtgttttggggagaggtattttttaagcaatgaaaattcaactgagtacaaagccccctcttggggggttggggaagtctcttttttgaaacacttcagaactgctgctataaagaaattctctaattggttgaattttttttttaagtaaatagtactttaggccaaaatttatatgaatatttgatcttcttgagattttcatactatcatttaaccaccaggaagctgaagtgtgtgaagtacaaagctgacagcactttattttattgctctccattatttggtattcattatattccttcagtcagaaaattattactctctatggcactgttttttatcacaaatatgtatatgtgatattgatatataactatatatattgccatcacacacgaacaataaaataaagtgttctattaacctgatctctttgcccttttgctatgtgaggagtgaatgagtggccttctgatgctctgactcttctctgtatgtcaaactcatccctggcacaagaaattccagtcatgtgaagcaaactgccctttgtcctcaaagaaattgttgaaaaagaaaactttttaaagagattttttgcatattctctgccttgttcttatcaacttgaaatgttggcattttctaaccttgttttgttggctacaataattcagtattcatgtcaaaattgagaagtgccctaattgaatgtgtttgaatgttatccttgcacaattctttaaattgaaagataaaatgttttacctcactgttggacatacattccaagcttttcaactctaggagaaaaagaaaatcatgttttcctgtattgtaaattttagactatttcatatacattgtattaaaactgccatatcaattttaatgtatagattttgcaaatattatgctatatgtaatacctaactgtatctgtagtgtatatgtaatatatttatgcccaataaatgttttaattctttctgacttaaata

SEQ ID NO: 4756 - protein, 1204 aa, Homo sapiens; identical to SEQ ID NO: 4752

SEQ ID NO: 4757 - DNA, 1067 bp, Homo sapiens
ggagagcggcggcggcgggagcagcgaagggggcggcagggatcctccaggctgccggctgggaaggcgtgggcgacccggtgtgtggcgcgcccagagccccgcgtttcagccctagggaaggaagccagttgagggaagttctccatgaatgtacgtcacaatgatgatgaccgaccaaatccctctggaactgccaccattgctgaacggagaggtagccatgatgccccacttggtgaatggagatgcagctcagcaggttattctcgttcaagttaatccaggtgagactttcacaataagagcagaggatggaacacttcagtgcattcaagatgaagtggtgaagagagcctgcgattgaagattttttcatctcagctttttcccccttaccttgttctctctcatgtttcatgatctgtgtcatagatatttcttcattacgagcacttcgcggtgtggcttttcaatgtctgaagtggattaagtggcccacagtcagttctgtgacttgagtttcaaaagtaaaattaccatcaacaatgtgattcaattttattttctatactagctaaaagcaaggaactatattattaacaatcttggctttactgtagtttaaggcaggtgatgatgatgcttattagtccacctgaaagagtccttccaggtttttggaagctttattcctgcttattaccttgcccttgagaagtccttcatggaaagtggaaacactgggttgacttcttttccccatatcctagttgaaagggacagcttatatgtatgttagactgtccaaaagtgtttgtagaacctcattttaaaaaatcaactgtattgtactttttaaaaaatgggatcttaaactctttattaaaaataataaatggaaatgtgttaagcaaaaacattacttgacctcttcttattcattgtgtaataataacgtataaaataattgctttatttacatctgtattgaccatggctgaacttcttgccagtaggggtgtcgtgagtcctgttcatctctctgccccttggtgggatgccta

SEQ ID NO: 4758 - protein, 71 aa, Homo sapiens; identical to SEQ ID NO: 4750

SEQ ID NO: 4759 - DNA, 862 bp, Homo sapiens
agctcgggcgggggagcggggcgcggcgggaaggagcgggcgacccggtgtgtgggccagcggagctccggaagccagttgagggaagttctccatgaatgtacgtcacaatgatgatgaccgaccaaatccctctggaactgccaccattgctgaacggagaggtagccatgatgccccacttggtgaatggagatgcagctcagcaggttattctcgttcaagttaatccaggtgagactttcacaataagagcagaggatggaacacttcagtgcattcaagatgaagtggtgaagagagcctgcgattgaagattttttcatctcagctttttcccccttaccttgttctctctcatgtttcatgatctgtgtcatagatatttcttcattacgagcacttcgcggtgtggcttttcaatgtctgaagtggattaagtggcccacagtcagttctgtgacttgagtttcaaaagtaaaattaccatcaacaatgtgattcaattttattttctatactagctaaaagcaaggaactatattattaacaatcttggctttactgtagtttaaggcaggtgatgatgatgcttattagtccacctgaaagagtccttccaggtttttggaagctttattcctgcttattaccttgcccttgagaagtccttcatggaaagtggaaacactgggttgacttcttttccccatatcctagttgaaagggacagcttatatgtatgttagactgtccaaaagtgtttgtagaacctcattttaaaaaatcaactgtattgtactttttaaaaaatgggatcttaaactctttattaaaaataataaatggaaatgtgttaagc

SEQ ID NO: 4760 - protein, 71 aa, Homo sapiens; identical to SEQ ID NO: 4750

SEQ ID NO: 4761 - DNA, 1014 bp, Homo sapiens
agctcgggcgggggagcggggcgcggcgggaaggagcgggcgacccggtgtgtgggccagcggagctccggaagccagttgagggaagttctccatgaatgtacgtcacaatgatgatgaccgaccaaatccctctggaactgccaccattgctgaacggagaggtagccatgatgccccacttggtgaatggagatgcagctcagcaggttattctcgttcaagttaatccaggtgagactttcacaataagagcagaggatggaacacttcagtgcattcaagatgaagtggtgaagagagcctgcgattgaagattttttcatctcagctttttcccccttaccttgttctctctcatgtttcatgatctgtgtcatagatatttcttcattacgagcacttcgcggtgtggcttttcaatgtctgaagtggattaagtggcccacagtcagttctgtgacttgagtttcaaaagtaaaattaccatcaacaatgtgattcaattttattttctatactagctaaaagcaaggaactatattattaacaatcttggctttactgtagtttaaggcaggtgatgatgatgcttattagtccacctgaaagagtccttccaggtttttggaagctttattcctgcttattaccttgcccttgagaagtccttcatggaaagtggaaacactgggttgacttcttttccccatatcctagttgaaagggacagcttatatgtatgttagactgtccaaaagtgtttgtagaacctcattttaaaaaatcaactgtattgtactttttaaaaaatgggatcttaaactctttattaaaaataataaatggaaatgtgttaagcaaaaacattacttgacctcttcttattcattgtgtaataataacgtataaaataattgctttatttacatctgtattgaccatggctgaacttcttgccagtaggggtgtcgtgagtcctgttcatctctctgccccttggtgggatgccta

SEQ ID NO: 4762 - protein, 71 aa, Homo sapiens; identical to SEQ ID NO: 4750

SEQ ID NO: 4763 - DNA, 5019 bp, Homo sapiens
gggcgggggagcggggcgcggcgggaaggagcgggcgacccggtgtgtgggccagcggagctccggaagccagttgagggaagttctccatgaatgtacgtcacaatgatgatgaccgaccaaatccctctggaactgccaccattgctgaacggagaggtagccatgatgccccacttggtgaatggagatgcagctcagcaggttattctcgttcaagttaatccaggtgagactttcacaataagagcagaggatggaacacttcagtgcattcaaggacctgctgaagttcccatgatgtcacccaatggatccattcctcccattcatgtgcctccaggttatatctcacaggtgattgaagatagtactggagtccgccgggtggtggtcacaccccagtctcctgagtgttatcccccaagctacccctcagccatgtctccaacccatcatctccctccctatctgactcaccatccacattttattcataactcacacacggcttactacccacctgttaccggacctggagatatgccgcctcagttttttccccagcatcatcttccccacacaatatatggtgagcaagaaattataccattttatggaatgtcaacctacatcacccgagaagaccagtacagcaagcctccgcacaaaaaactgaaagaccgccagatcgatcgccagaaccgcctcaacagccctccttcttctatctacaaaagcagctgcacaacagtatacaatggctatgggaagggccatagtggtggaagtggcggaggcggcagcggtagtggtcccggaattaagaaaacagagcgacgagcaagaagcagcccaaagtcgaatgattcagacttgcaagaatatgagttggaagtaaagagggtgcaagacattctttcgggaatagagaaaccacaggtttctaatattcaggcaagagcagttgtgttgtcctgggctccccctgttggactttcctgtggaccccacagtggtctttccttcccctacagttacgaggtggccttatcagacaaaggacgagatggaaaatacaagataatttacagtggagaagaattagaatgtaacctgaaagatcttagaccagcaacagattatcatgtgagggtgtatgccatgtacaattccgtaaagggatcctgctccgagcctgttagcttcaccacccacagctgtgcacccgagtgtcctttcccccctaagctggcacataggagcaaaagttcactaaccctgcagtggaaggcaccaattgacaacggttcaaaaatcaccaactaccttttagagtgggatgagggaaaaagaaatagtggtttcagacagtgcttcttcgggagccagaagcactgcaagttgacaaagctttgtccggcaatggggtacacattcaggctggccgctcgaaacgacattggtaccagtggttatagccaagaggtggtgtgctacacattaggaaatatccctcagatgccttctgcaccaaggctggttcgagctggcatcacatgggtcacgttgcagtggagtaagccagaaggctgttcacccgaggaagtgatcacctacaccttggaaattcaggaggatgaaaatgataaccttttccacccaaaatacactggagaggatttaacctgtactgtgaaaaatctcaaaagaagcacacagtataaattcaggctgactgcttctaatacggaaggaaaaagctgtccaagcgaagttcttgtttgtacgacgagtcctgacaggcctggacctcctaccagaccgcttgtcaaaggcccagttacatctcatggctttagtgtcaaatgggatccccctaaggacaatggtggttcagaaatcctcaagtacttgctagagattactgatggaaattctgaagcgaatcagtgggaagtggcctacagtgggtcggctaccgaatacaccttcacccacttgaaaccaggcactttgtacaaactccgagcatgctgcatcagtaccggcggacacagccagtgttctgaaagtctccctgttcgcacactaagcattgcaccaggtcaatgtcgaccaccgagggttttgggtagaccaaagcacaaagaagtccacttagagtgggatgttcctgcatcggaaagtggctgtgaggtctcagagtacagcgtggagatgacggagcccgaagacgtagcctcggaagtgtaccatggcccagagctggagtgcaccgtcggcaacctgcttcctggaaccgtgtatcgcttccgggtgagggctctgaatgatggagggtatggtccctattctgatgtctcagaaattaccactgctgcagggcctcctggacaatgcaaagcaccttgtatttcttgtacacctgatggatgtgtcttagtgggttgggagagtcctgatagttctggtgctgacatctcagagtacaggttggaatggggagaagatgaagaatccttagaactcatttatcatgggacagacacccgttttgaaataagagacctgttgcctgctgcacagtattgctgtagactacaggccttcaatcaagcaggggcagggccgtacagtgaacttgtcctttgccagacgccagcgtctgcccctgaccccgtctccactctctgtgtcctggaggaggagccccttgatgcctaccctgattcaccttctgcgtgccttgtactgaactgggaagagccgtgcaataacggatctgaaatccttgcttacaccattgatctaggagacactagcattaccgtgggcaacaccaccatgcatgttatgaaagatctccttccagaaaccacctaccggatcagaattcaggctataaatgaaattggagctggaccatttagtcagttcattaaagcaaaaactcggccattaccacccttgcctcctaggctagaatgtgctgctgctggtcctcagagcctgaagctaaaatggggagacagtaactccaagacacatgctgctgaggacattgtgtacacactacagctggaggacagaaacaagaggtttatttcaatctacagaggacccagccacacctacaaggtccagagactgacggaattcacatgctactccttcagaatccaggcagcaagcgaggctggagaagggcccttctcagaaacctataccttcagcacaaccaaaagtgtcccccccaccatcaaagcacctcgagtaacacagttagaaggaaattcatgtgaaattttatgggagacggtaccatcaatgaaaggtgaccctgttaactacattctgcaggtattggttggaagagaatctgagtacaaacaggtgtacaagggagaagaagccacattccaaatctcaggcctccagaccaacacagactacaggttccgcgtatgtgcgtgtcgtcgctgtttagacacctctcaggagctaagcggagccttcagcccctctgcggcttttgtattacaacgaagtgaggtcatgcttacaggggacatggggagcttagatgatcccaaaatgaagagcatgatgcctactgatgaacagtttgcagccatcattgtgcttggctttgcaactttgtccattttatttgcctttatattacagtacttcttaatgaagtaaacccaacaaaactagaggtatgaattaatgctacacattttaatacacacatttattcagatactcccctttttaaagcccttttgttttttgatttatatactctgttttacagatttagctagaaaaaaaatgtcagtgttttggtgcacctttttgaaatgcaaaactaggaaaaggttaaactggatttttttttttaaaaaaaagaaaaaaaaagaagaaaagtataccagataccaaaagctagctttcttatgttttcctttaaattttcagatttaccttcattctgttttcactgatgtcttttgcaagcctttgatttttttttttttgttacagtttagtaatttatattcaccagtcacttcatatgtcttgaacatctgtatctgtaaacatgaatcaccgtgtgtgtacttacagggctaggatttcagtgttgtcagagtattaccacacagcaacagcaacatacagaagatatgttcactcagataagactgccctaaacaaccattttgtcactcagttatttaactgtgtttagctcatttaaatcaaaatgtgtactttaatctaaaatgttttaataatctgtatttcttataattttaacactatgagctgcctgtataagaaatcaagtaaccagaatgcacctataaattatggagcattgtagattttaccacatcaattcatagcagtaactttaagagggcattgtgcaatagttagttgttttcttgttcagctattttaaaggctgctttaacttgtttgtttgtctttgtatataactacttctaatctaatcactagagttattatattctgttatgtttgaccagaattatatgacaagaactggtgacagtttagtgcctctgcccattgtccatgatttacactaattgtgagcagtcttcttatgtgtcagctcattatttttgaaacatttgcctttaggctgttctttgaggtatcaatgaagtgattgaatttcaataccttaattcagtgcacataatactaatgtaacagcagatgaaaattgataaaacccaaaagagagtcatctaaatttgtagttcctatttctgtgggtttgcctggccatggttggagagggaatggtgtttgatggtaaacacagggtgtttggggatcaaggagcctagattctctccctggatctgtcactaacttgctgcgtgacctgaacacgtcactttacctctctgtgcctcagttttcccatgcatgaaaaataaaataaaataaaacggggattctaatgtttgt

SEQ ID NO: 4764 - protein, 1204 aa, Homo sapiens; identical to SEQ ID NO: 4752

SEQ ID NO: 4765 - DNA, 5626 bp, Homo sapiens
gggcgggggagcggggcgcggcgggaaggagcgggcgacccggtgtgtgggccagcggagctccggaagccagttgagggaagttctccatgaatgtacgtcacaatgatgatgaccgaccaaatccctctggaactgccaccattgctgaacggagaggtagccatgatgccccacttggtgaatggagatgcagctcagcaggttattctcgttcaagttaatccaggtgagactttcacaataagagcagaggatggaacacttcagtgcattcaaggacctgctgaagttcccatgatgtcacccaatggatccattcctcccattcatgtgcctccaggttatatctcacaggtgattgaagatagtactggagtccgccgggtggtggtcacaccccagtctcctgagtgttatcccccaagctacccctcagccatgtctccaacccatcatctccctccctatctgactcaccatccacattttattcataactcacacacggcttactacccacctgttaccggacctggagatatgccgcctcagttttttccccagcatcatcttccccacacaatatatggtgagcaagaaattataccattttatggaatgtcaacctacatcacccgagaagaccagtacagcaagcctccgcacaaaaaactgaaagaccgccagatcgatcgccagaaccgcctcaacagccctccttcttctatctacaaaagcagctgcacaacagtatacaatggctatgggaagggccatagtggtggaagtggcggaggcggcagcggtagtggtcccggaattaagaaaacagagcgacgagcaagaagcagcccaaagtcgaatgattcagacttgcaagaatatgagttggaagtaaagagggtgcaagacattctttcgggaatagagaaaccacaggtttctaatattcaggcaagagcagttgtgttgtcctgggctccccctgttggactttcctgtggaccccacagtggtctttccttcccctacagttacgaggtggccttatcagacaaaggacgagatggaaaatacaagataatttacagtggagaagaattagaatgtaacctgaaagatcttagaccagcaacagattatcatgtgagggtgtatgccatgtacaattccgtaaagggatcctgctccgagcctgttagcttcaccacccacagctgtgcacccgagtgtcctttcccccctaagctggcacataggagcaaaagttcactaaccctgcagtggaaggcaccaattgacaacggttcaaaaatcaccaactaccttttagagtgggatgagggaaaaagaaatagtggtttcagacagtgcttcttcgggagccagaagcactgcaagttgacaaagctttgtccggcaatggggtacacattcaggctggccgctcgaaacgacattggtaccagtggttatagccaagaggtggtgtgctacacattaggaaatatccctcagatgccttctgcaccaaggctggttcgagctggcatcacatgggtcacgttgcagtggagtaagccagaaggctgttcacccgaggaagtgatcacctacaccttggaaattcaggaggatgaaaatgataaccttttccacccaaaatacactggagaggatttaacctgtactgtgaaaaatctcaaaagaagcacacagtataaattcaggctgactgcttctaatacggaaggaaaaagctgtccaagcgaagttcttgtttgtacgacgagtcctgacaggcctggacctcctaccagaccgcttgtcaaaggcccagttacatctcatggctttagtgtcaaatgggatccccctaaggacaatggtggttcagaaatcctcaagtacttgctagagattactgatggaaattctgaagcgaatcagtgggaagtggcctacagtgggtcggctaccgaatacaccttcacccacttgaaaccaggcactttgtacaaactccgagcatgctgcatcagtaccggcggacacagccagtgttctgaaagtctccctgttcgcacactaagcattgcaccaggtcaatgtcgaccaccgagggttttgggtagaccaaagcacaaagaagtccacttagagtgggatgttcctgcatcggaaagtggctgtgaggtctcagagtacagcgtggagatgacggagcccgaagacgtagcctcggaagtgtaccatggcccagagctggagtgcaccgtcggcaacctgcttcctggaaccgtgtatcgcttccgggtgagggctctgaatgatggagggtatggtccctattctgatgtctcagaaattaccactgctgcagggcctcctggacaatgcaaagcaccttgtatttcttgtacacctgatggatgtgtcttagtgggttgggagagtcctgatagttctggtgctgacatctcagagtacaggttggaatggggagaagatgaagaatccttagaactcatttatcatgggacagacacccgttttgaaataagagacctgttgcctgctgcacagtattgctgtagactacaggccttcaatcaagcaggggcagggccgtacagtgaacttgtcctttgccagacgccagcgtctgcccctgaccccgtctccactctctgtgtcctggaggaggagccccttgatgcctaccctgattcaccttctgcgtgccttgtactgaactgggaagagccgtgcaataacggatctgaaatccttgcttacaccattgatctaggagacactagcattaccgtgggcaacaccaccatgcatgttatgaaagatctccttccagaaaccacctaccggatcagaattcaggctataaatgaaattggagctggaccatttagtcagttcattaaagcaaaaactcggccattaccacccttgcctcctaggctagaatgtgctgctgctggtcctcagagcctgaagctaaaatggggagacagtaactccaagacacatgctgctgaggacattgtgtacacactacagctggaggacagaaacaagaggtttatttcaatctacagaggacccagccacacctacaaggtccagagactgacggaattcacatgctactccttcagaatccaggcagcaagcgaggctggagaagggcccttctcagaaacctataccttcagcacaaccaaaagtgtcccccccaccatcaaagcacctcgagtaacacagttagaaggaaattcatgtgaaattttatgggagacggtaccatcaatgaaaggtgaccctgttaactacattctgcaggtattggttggaagagaatctgagtacaaacaggtgtacaagggagaagaagccacattccaaatctcaggcctccagaccaacacagactacaggttccgcgtatgtgcgtgtcgtcgctgtttagacacctctcaggagctaagcggagccttcagcccctctgcggcttttgtattacaacgaagtgaggtcatgcttacaggggacatggggagcttagatgatcccaaaatgaagagcatgatgcctactgatgaacagtttgcagccatcattgtgcttggctttgcaactttgtccattttatttgcctttatattacagtacttcttaatgaagtaaacccaacaaaactagaggtatgaattaatgctacacattttaatacacacatttattcagatactcccctttttaaagcccttttgttttttgatttatatactctgttttacagatttagctagaaaaaaaatgtcagtgttttggtgcacctttttgaaatgcaaaactaggaaaaggttaaactggatttttttttttaaaaaaaagaaaaaaaaagaagaaaagtataccagataccaaaagctagctttcttatgttttcctttaaattttcagatttaccttcattctgttttcactgatgtcttttgcaagcctttgatttttttttttttgttacagtttagtaatttatattcaccagtcacttcatatgtcttgaacatctgtatctgtaaacatgaatcaccgtgtgtgtacttacagggctaggatttcagtgttgtcagagtattaccacacagcaacagcaacatacagaagatatgttcactcagataagactgccctaaacaaccattttgtcactcagttatttaactgtgtttagctcatttaaatcaaaatgtgtactttaatctaaaatgttttaataatctgtatttcttataattttaacactatgagctgcctgtataagaaatcaagtaaccagaatgcacctataaattatggagcattgtagattttaccacatcaattcatagcagtaactttaagagggcattgtgcaatagttagttgttttcttgttcagctattttaaaggctgctttaacttgtttgtttgtctttgtatataactacttctaatctaatcactagagttattatattctgttatgtttgaccagaattatatgacaagaactggtgacagtttagtgcctctgcccattgtccatgatttacactaattgtgagcagtcttcttatgtgtcagctcattatttttgaaacatttgcctttaggctgttctttgaggtatcaatgaagtgattgaatttcaataccttaattcagtgcacataatactaatgtaacagcagatgaaaattgataaaacccaaaagagagtcatctaaatttgtagttcctatttctgtgggtttgcctggccatggttggagagggaatggtgtttgatggtaaacacagggtgtttggggatcaaggagcctagattctctccctggatctgtcactaacttgctgcgtgacctgaacacgtcactttacctctctgtgcctcagttttcccatgcatgaaaaataaaataaaataaaacggggattctaatgtttgtaagtgctttgagatctttgaccaacaggtgctattggagtgcaaagtgttactcttacgtgtttattttgagtcatgagataatcaattttaacccaaagtcattggattatttatatgaagtccataatgttcgagtacctcagggacatttaagagttggaggtgcaaatatattccaaaagggtgcaacagacacagtgtatccccctgcttctgtttttgtatatttttgctacttggtttttcttgatcatagctattttgtgcttgatctttattgtctaagatgcagtatcctgtactagcttataatattcccataccaaagtcatggggaaacaaacattattttgtttttggtttatttatactatattctgcatacagtactttaaatgccaattacagtgcaatctttatttattgtaaaattttttaagtgtacttatgtactaattttcccttgtagcatgttatatttttgtgttttatacttttgtaattttaggtcagtcttgttccttggcaacatctgtagtattattaatcttctgacattttcttatgtttttaaaaagataagagcatctagtgcattaaatgcc

SEQ ID NO: 4766 - protein, 1204 aa, Homo sapiens; identical to SEQ ID NO: 4752

SEQ ID NO: 4767 - DNA, 6938 bp, Homo sapiens
gggcgggggagcggggcgcggcgggaaggagcgggcgacccggtgtgtgggccagcggagctccggaagccagttgagggaagttctccatgaatgtacgtcacaatgatgatgaccgaccaaatccctctggaactgccaccattgctgaacggagaggtagccatgatgccccacttggtgaatggagatgcagctcagcaggttattctcgttcaagttaatccaggtgagactttcacaataagagcagaggatggaacacttcagtgcattcaaggacctgctgaagttcccatgatgtcacccaatggatccattcctcccattcatgtgcctccaggttatatctcacaggtgattgaagatagtactggagtccgccgggtggtggtcacaccccagtctcctgagtgttatcccccaagctacccctcagccatgtctccaacccatcatctccctccctatctgactcaccatccacattttattcataactcacacacggcttactacccacctgttaccggacctggagatatgccgcctcagttttttccccagcatcatcttccccacacaatatatggtgagcaagaaattataccattttatggaatgtcaacctacatcacccgagaagaccagtacagcaagcctccgcacaaaaaactgaaagaccgccagatcgatcgccagaaccgcctcaacagccctccttcttctatctacaaaagcagctgcacaacagtatacaatggctatgggaagggccatagtggtggaagtggcggaggcggcagcggtagtggtcccggaattaagaaaacagagcgacgagcaagaagcagcccaaagtcgaatgattcagacttgcaagaatatgagttggaagtaaagagggtgcaagacattctttcgggaatagagaaaccacaggtttctaatattcaggcaagagcagttgtgttgtcctgggctccccctgttggactttcctgtggaccccacagtggtctttccttcccctacagttacgaggtggccttatcagacaaaggacgagatggaaaatacaagataatttacagtggagaagaattagaatgtaacctgaaagatcttagaccagcaacagattatcatgtgagggtgtatgccatgtacaattccgtaaagggatcctgctccgagcctgttagcttcaccacccacagctgtgcacccgagtgtcctttcccccctaagctggcacataggagcaaaagttcactaaccctgcagtggaaggcaccaattgacaacggttcaaaaatcaccaactaccttttagagtgggatgagggaaaaagaaatagtggtttcagacagtgcttcttcgggagccagaagcactgcaagttgacaaagctttgtccggcaatggggtacacattcaggctggccgctcgaaacgacattggtaccagtggttatagccaagaggtggtgtgctacacattaggaaatatccctcagatgccttctgcaccaaggctggttcgagctggcatcacatgggtcacgttgcagtggagtaagccagaaggctgttcacccgaggaagtgatcacctacaccttggaaattcaggaggatgaaaatgataaccttttccacccaaaatacactggagaggatttaacctgtactgtgaaaaatctcaaaagaagcacacagtataaattcaggctgactgcttctaatacggaaggaaaaagctgtccaagcgaagttcttgtttgtacgacgagtcctgacaggcctggacctcctaccagaccgcttgtcaaaggcccagttacatctcatggctttagtgtcaaatgggatccccctaaggacaatggtggttcagaaatcctcaagtacttgctagagattactgatggaaattctgaagcgaatcagtgggaagtggcctacagtgggtcggctaccgaatacaccttcacccacttgaaaccaggcactttgtacaaactccgagcatgctgcatcagtaccggcggacacagccagtgttctgaaagtctccctgttcgcacactaagcattgcaccaggtcaatgtcgaccaccgagggttttgggtagaccaaagcacaaagaagtccacttagagtgggatgttcctgcatcggaaagtggctgtgaggtctcagagtacagcgtggagatgacggagcccgaagacgtagcctcggaagtgtaccatggcccagagctggagtgcaccgtcggcaacctgcttcctggaaccgtgtatcgcttccgggtgagggctctgaatgatggagggtatggtccctattctgatgtctcagaaattaccactgctgcagggcctcctggacaatgcaaagcaccttgtatttcttgtacacctgatggatgtgtcttagtgggttgggagagtcctgatagttctggtgctgacatctcagagtacaggttggaatggggagaagatgaagaatccttagaactcatttatcatgggacagacacccgttttgaaataagagacctgttgcctgctgcacagtattgctgtagactacaggccttcaatcaagcaggggcagggccgtacagtgaacttgtcctttgccagacgccagcgtctgcccctgaccccgtctccactctctgtgtcctggaggaggagccccttgatgcctaccctgattcaccttctgcgtgccttgtactgaactgggaagagccgtgcaataacggatctgaaatccttgcttacaccattgatctaggagacactagcattaccgtgggcaacaccaccatgcatgttatgaaagatctccttccagaaaccacctaccggatcagaattcaggctataaatgaaattggagctggaccatttagtcagttcattaaagcaaaaactcggccattaccacccttgcctcctaggctagaatgtgctgctgctggtcctcagagcctgaagctaaaatggggagacagtaactccaagacacatgctgctgaggacattgtgtacacactacagctggaggacagaaacaagaggtttatttcaatctacagaggacccagccacacctacaaggtccagagactgacggaattcacatgctactccttcagaatccaggcagcaagcgaggctggagaagggcccttctcagaaacctataccttcagcacaaccaaaagtgtcccccccaccatcaaagcacctcgagtaacacagttagaaggaaattcatgtgaaattttatgggagacggtaccatcaatgaaaggtgaccctgttaactacattctgcaggtattggttggaagagaatctgagtacaaacaggtgtacaagggagaagaagccacattccaaatctcaggcctccagaccaacacagactacaggttccgcgtatgtgcgtgtcgtcgctgtttagacacctctcaggagctaagcggagccttcagcccctctgcggcttttgtattacaacgaagtgaggtcatgcttacaggggacatggggagcttagatgatcccaaaatgaagagcatgatgcctactgatgaacagtttgcagccatcattgtgcttggctttgcaactttgtccattttatttgcctttatattacagtacttcttaatgaagtaaacccaacaaaactagaggtatgaattaatgctacacattttaatacacacatttattcagatactcccctttttaaagcccttttgttttttgatttatatactctgttttacagatttagctagaaaaaaaatgtcagtgttttggtgcacctttttgaaatgcaaaactaggaaaaggttaaactggatttttttttttaaaaaaaagaaaaaaaaagaagaaaagtataccagataccaaaagctagctttcttatgttttcctttaaattttcagatttaccttcattctgttttcactgatgtcttttgcaagcctttgatttttttttttttgttacagtttagtaatttatattcaccagtcacttcatatgtcttgaacatctgtatctgtaaacatgaatcaccgtgtgtgtacttacagggctaggatttcagtgttgtcagagtattaccacacagcaacagcaacatacagaagatatgttcactcagataagactgccctaaacaaccattttgtcactcagttatttaactgtgtttagctcatttaaatcaaaatgtgtactttaatctaaaatgttttaataatctgtatttcttataattttaacactatgagctgcctgtataagaaatcaagtaaccagaatgcacctataaattatggagcattgtagattttaccacatcaattcatagcagtaactttaagagggcattgtgcaatagttagttgttttcttgttcagctattttaaaggctgctttaacttgtttgtttgtctttgtatataactacttctaatctaatcactagagttattatattctgttatgtttgaccagaattatatgacaagaactggtgacagtttagtgcctctgcccattgtccatgatttacactaattgtgagcagtcttcttatgtgtcagctcattatttttgaaacatttgcctttaggctgttctttgaggtatcaatgaagtgattgaatttcaataccttaattcagtgcacataatactaatgtaacagcagatgaaaattgataaaacccaaaagagagtcatctaaatttgtagttcctatttctgtgggtttgcctggccatggttggagagggaatggtgtttgatggtaaacacagggtgtttggggatcaaggagcctagattctctccctggatctgtcactaacttgctgcgtgacctgaacacgtcactttacctctctgtgcctcagttttcccatgcatgaaaaataaaataaaataaaacggggattctaatgtttgtaagtgctttgagatctttgaccaacaggtgctattggagtgcaaagtgttactcttacgtgtttattttgagtcatgagataatcaattttaacccaaagtcattggattatttatatgaagtccataatgttcgagtacctcagggacatttaagagttggaggtgcaaatatattccaaaagggtgcaacagacacagtgtatccccctgcttctgtttttgtatatttttgctacttggtttttcttgatcatagctattttgtgcttgatctttattgtctaagatgcagtatcctgtactagcttataatattcccataccaaagtcatggggaaacaaacattattttgtttttggtttatttatactatattctgcatacagtactttaaatgccaattacagtgcaatctttatttattgtaaaattttttaagtgtacttatgtactaattttcccttgtagcatgttatatttttgtgttttatacttttgtaattttaggtcagtcttgttccttggcaacatctgtagtattattaatcttctgacattttcttatgtttttaaaaagataagagcatctagtgcattaaatgccaaaaaaaaaatacattatcagtgattgaaacgtttacatgtacccaaaaaccataatcatctcttggaagaaaatgctgagatcaatgaattattctgtgtgcctatattgacgtagtgagtactagagagttctgtattttattattgactataataattagtttaattagctttgcaaactgatggcatcaaggtaaatatatttttgccaaagttctggccttccaaaactcacccccttatttaaatgtgtgctatgacccactatgaccacagcatctgcattttctaaaaaattccatgcaggtgttttggggagaggtattttttaagcaatgaaaattcaactgagtacaaagccccctcttggggggttggggaagtctcttttttgaaacacttcagaactgctgctataaagaaattctctaattggttgaattttttttttaagtaaatagtactttaggccaaaatttatatgaatatttgatcttcttgagattttcatactatcatttaaccaccaggaagctgaagtgtgtgaagtacaaagctgacagcactttattttattgctctccattatttggtattcattatattccttcagtcagaaaattattactctctatggcactgttttttatcacaaatatgtatatgtgatattgatatataactatatatattgccatcacacacgaacaataaaataaagtgttctattaacctgatctctttgcccttttgctatgtgaggagtgaatgagtggccttctgatgctctgactcttctctgtatgtcaaactcatccctggcacaagaaattccagtcatgtgaagcaaactgccctttgtcctcaaagaaattgttgaaaaagaaaactttttaaagagattttttgcatattctctgccttgttcttatcaacttgaaatgttggcattttctaaccttgttttgttggctacaataattcagtattcatgtcaaaattgagaagtgccctaattgaatgtgtttgaatgttatccttgcacaattctttaaattgaaagataaaatgttttacctcactgttggacatacattccaagcttttcaactctaggagaaaaagaaaatcatgttttcctgtattgtaaattttagactatttcatatacattgtattaaaactgccatatcaattttaatgtatagattttgcaaatattatgctatatgtaatacctaactgtatctgtagtgtatatgtaatatatttatgcccaataaatgttttaattctttctgacttaaata

SEQ ID NO: 4768 - protein, 1204 aa, Homo sapiens; identical to SEQ ID NO: 4752

SEQ ID NO: 4769 - DNA, 3682 bp, Homo sapiens
agtgtctaccaccaaactcctaaggctggatggtggaagccagttgagggaagttctccatgaatgtacgtcacaatgatgatgaccgaccaaatccctctggaactgccaccattgctgaacggagaggtagccatgatgccccacttggtgaatggagatgcagctcagcaggttattctcgttcaagttaatccaggtgagactttcacaataagagcagaggatggaacacttcagtgcattcaaggacctgctgaagttcccatgatgtcacccaatggatccattcctcccattcatgtgcctccaggttatatctcacaggtgattgaagatagtactggagtccgccgggtggtggtcacaccccagtctcctgagtgttatcccccaagctacccctcagccatgtctccaacccatcatctccctccctatctgactcaccatccacattttattcataactcacacacggcttactacccacctgttaccggacctggagatatgccgcctcagttttttccccagcatcatcttccccacacaatatatggtgagcaagaaattataccattttatggaatgtcaacctacatcacccgagaagaccagtacagcaagcctccgcacaaaaaactgaaagaccgccagatcgatcgccagaaccgcctcaacagccctccttcttctatctacaaaagcagctgcacaacagtatacaatggctatgggaagggccatagtggtggaagtggcggaggcggcagcggtagtggtcccggaattaagaaaacagagcgacgagcaagaagcagcccaaagtcgaatgattcagacttgcaagaatatgagttggaagtaaagagggtgcaagacattctttcgggaatagagaaaccacaggtttctaatattcaggcaagagcagttgtgttgtcctgggctccccctgttggactttcctgtggaccccacagtggtctttccttcccctacagttacgaggtggccttatcagacaaaggacgagatggaaaatacaagataatttacagtggagaagaattagaatgtaacctgaaagatcttagaccagcaacagattatcatgtgagggtgtatgccatgtacaattccgtaaagggatcctgctccgagcctgttagcttcaccacccacagctgtgcacccgagtgtcctttcccccctaagctggcacataggagcaaaagttcactaaccctgcagtggaaggcaccaattgacaacggttcaaaaatcaccaactaccttttagagtgggatgagggaaaaagaaatagtggtttcagacagtgcttcttcgggagccagaagcactgcaagttgacaaagctttgtccggcaatggggtacacattcaggctggccgctcgaaacgacattggtaccagtggttatagccaagaggtggtgtgctacacattaggaaatatccctcagatgccttctgcaccaaggctggttcgagctggcatcacatgggtcacgttgcagtggagtaagccagaaggctgttcacccgaggaagtgatcacctacaccttggaaattcaggaggatgaaaatgataaccttttccacccaaaatacactggagaggatttaacctgtactgtgaaaaatctcaaaagaagcacacagtataaattcaggctgactgcttctaatacggaaggaaaaagctgtccaagcgaagttcttgtttgtacgacgagtcctgacaggcctggacctcctaccagaccgcttgtcaaaggcccagttacatctcatggctttagtgtcaaatgggatccccctaaggacaatggtggttcagaaatcctcaagtacttgctagagattactgatggaaattctgaagcgaatcagtgggaagtggcctacagtgggtcggctaccgaatacaccttcacccacttgaaaccaggcactttgtacaaactccgagcatgctgcatcagtaccggcggacacagccagtgttctgaaagtctccctgttcgcacactaagcattgcaccaggtcaatgtcgaccaccgagggttttgggtagaccaaagcacaaagaagtccacttagagtgggatgttcctgcatcggaaagtggctgtgaggtctcagagtacagcgtggagatgacggagcccgaagacgtagcctcggaagtgtaccatggcccagagctggagtgcaccgtcggcaacctgcttcctggaaccgtgtatcgcttccgggtgagggctctgaatgatggagggtatggtccctattctgatgtctcagaaattaccactgctgcagggcctcctggacaatgcaaagcaccttgtatttcttgtacacctgatggatgtgtcttagtgggttgggagagtcctgatagttctggtgctgacatctcagagtacaggttggaatggggagaagatgaagaatccttagaactcatttatcatgggacagacacccgttttgaaataagagacctgttgcctgctgcacagtattgctgtagactacaggccttcaatcaagcaggggcagggccgtacagtgaacttgtcctttgccagacgccagcgtctgcccctgaccccgtctccactctctgtgtcctggaggaggagccccttgatgcctaccctgattcaccttctgcgtgccttgtactgaactgggaagagccgtgcaataacggatctgaaatccttgcttacaccattgatctaggagacactagcattaccgtgggcaacaccaccatgcatgttatgaaagatctccttccagaaaccacctaccggatcagaattcaggctataaatgaaattggagctggaccatttagtcagttcattaaagcaaaaactcggccattaccacccttgcctcctaggctagaatgtgctgctgctggtcctcagagcctgaagctaaaatggggagacagtaactccaagacacatgctgctgaggacattgtgtacacactacagctggaggacagaaacaagaggtttatttcaatctacagaggacccagccacacctacaaggtccagagactgacggaattcacatgctactccttcagaatccaggcagcaagcgaggctggagaagggcccttctcagaaacctataccttcagcacaaccaaaagtgtcccccccaccatcaaagcacctcgagtaacacagttagaaggaaattcatgtgaaattttatgggagacggtaccatcaatgaaaggtgaccctgttaactacattctgcaggtattggttggaagagaatctgagtacaaacaggtgtacaagggagaagaagccacattccaaatctcaggcctccagaccaacacagactacaggttccgcgtatgtgcgtgtcgtcgctgtttagacacctctcaggagctaagcggagccttcagcccctctgcggcttttgtattacaacgaagtgaggtcatgcttacaggggacatggggagcttagatgatcccaaaatgaagagcatgatgcctactgatgaacagtttgcagccatcattgtgcttggctttgcaactttgtccattttatttgcctttatattacagtacttcttaatgaagtaaaccc

SEQ ID NO: 4770 - protein, 1204 aa, Homo sapiens; identical to SEQ ID NO: 4752

SEQ ID NO: 4771 - DNA, 670 bp, Homo sapiens
gtgggatggcaggttttccaaatcctagtttccactgagtcatcggtgagtccaatagagggaggattctagcctgatgtcagacgtcctgcttggcagactaatgaaggactttttttttttaaaaaatgtatttttaacacagattggtgtatttgtatatcttcagtaagtttcagttttagccaagaaataatctttcataacatttttcatgagaaagcatagaatgattttctagaaagtttaatggcaagttgtgttagatgaaaaggaaacatctgagtttggaactgtgctgtgcacatctctaactggtttaattgcccagtctctcagtgtcttagcactctcagtgttttatgctcaatctctgtgtcttgttatgactatttggctcaacgtagtgttttgaactagtgattaggaagtggtagctgctgctgttttattattttattgctttactctgtgactacagacagatttaattgttggatgtatttcttaatgggataattatttaaaaacattcccagttactttaaaagcgtatgtgaatattagccatcagttttgtcttgaccttgcctttggctccttgagtgtctctgttcatgtgacagctttccagctcatccttaatgtcatactcgagctgtttatctta

SEQ ID NO: 4772 - protein, 31 aa, Homo sapiens
MSDVLLGRLMKDFFFLKNVFLTQIGVFVYLQ

SEQ ID NO: 4773 - DNA, 2800 bp, Homo sapiens
ctcttgcaggaagccagttgagggaagttctccatgaatgtacgtcacaatgatgatgaccgaccaaatccctctggaactgccaccattgctgaacggagaggtagccatgatgccccacttggtgaatggagatgcagctcagcaggttattctcgttcaagttaatccaggtgagactttcacaataagagcagaggatggaacacttcagtgcattcaaggacctgctgaagttcccatgatgtcacccaatggatccattcctcccattcatgtgcctccaggttatatctcacaggtgattgaagatagtactggagtccgccgggtggtggtcacaccccagtctcctgagtgttatcccccaagctacccctcagccatgtctccaacccatcatctccctccctatctgactcaccatccacattttattcataactcacacacggcttactacccacctgttaccggacctggagatatgccgcctcagttttttccccagcatcatcttccccacacaatatatggtgagcaagaaattataccattttatggaatgtcaacctacatcacccgagaagaccagtacagcaagcctccgcacaaaaaactgaaagaccgccagatcgatcgccagaaccgcctcaacagccctccttcttctatctacaaaagcagctgcacaacagtatacaatggctatgggaagggccatagtggtggaagtggcggaggcggcagcggtagtggtcccggaattaagaaaacagagcgacgagcaagaagcagcccaaagtcgaatgattcagacttgcaagaatatgagttggaagtaaagagggtgcaagacattctttcgggaatagagaaaccacaggtttctaatattcaggcaagagcagttgtgttgtcctgggctccccctgttggactttcctgtggaccccacagtggtctttccttcccctacagttacgaggtggccttatcagacaaaggacgagatggaaaatacaagataatttacagtggagaagaattagaatgtaacctgaaagatcttagaccagcaacagattatcatgtgagggtgtatgccatgtacaattccgtaaagggatcctgctccgagcctgttagcttcaccacccacagctgtgcacccgagtgtcctttcccccctaagctggcacataggagcaaaagttcactaaccctgcagtggaaggcaccaattgacaacggttcaaaaatcaccaactaccttttagagtgggatgagggaaaaagaaatagtggtttcagacagtgcttcttcgggagccagaagcactgcaagttgacaaagctttgtccggcaatggggtacacattcaggctggccgctcgaaacgacattggtaccagtggttatagccaagaggtggtgtgctacacattaggaaatatccctcagatgccttctgcaccaaggctggttcgagctggcatcacatgggtcacgttgcagtggagtaagccagaaggctgttcacccgaggaagtgatcacctacaccttggaaattcaggaggatgaaaatgataaccttttccacccaaaatacactggagaggatttaacctgtactgtgaaaaatctcaaaagaagcacacagtataaattcaggctgactgcttctaatacggaaggaaaaagctgtccaagcgaagttcttgtttgtacgacgagtcctgacaggcctggacctcctaccagaccgcttgtcaaaggcccagttacatctcatggctttagtgtcaaatgggatccccctaaggacaatggtggttcagaaatcctcaagtacttgctagagattactgatggaaattctgaaggtgaagtttttggcaattgttttattcaaatccaatagcaagctctgttttctaatatagtaaatgtctttatagtaatagtgagtaatcattaattctaaagatagaattattattacaataaacaaactttagtcacatattggcagtttttctatttcaaacacagcaccagagatcagagtctacttgaaacttacatttgtgttatttaacaatttttctgtatctttttcattggtgttttgttttgtttatcttttgtttttgtttctttggtttggtttgtttttgttttgttttttgagatacgatctctgtcacacaggctggagggcagtggcacaaacatggcccattgcagtctcaaactcctgggcttaagtgactcttctgccacagaagatgaggaagaatacatttttcatagtgatggggtctcactatgttatctaggctggtctcaaactcctggcctcaagcaaccctccaccttggcctcccaaagtgctgggactatagacatgaatcaccacactcagcttccatgtctttttatgaactagggttcctaattaatcagataaatttggtattttcatctcctaacttgccatatgttttctggaaattcttataagcagccgagagtggtggctcacgctgtaatcccagcactttgggaggctgaggtgggtggtcaagagatcaagaccatcctggccaacatggtgaaaccccgtctctactaaaaatacaaaaattagctgggtgtggtggcaggcacctgtagtcccagctacttgggaggctgaggcagaagaattgcttgaacccagcaggcggaggttgcagtgagctgagattgcaccactgcactccagcctggtgacagagtgagactctgtctc

SEQ ID NO: 4774 - protein, 629 aa, Homo sapiens
MYVTMMMTDQIPLELPPLLNGEVAMMPHLVNGDAAQQVILVQVNPGETFTIRAEDGTLQCIQGPAEVPMMSPNGSIPPIHVPPGYISQVIEDSTGVRRVVVTPQSPECYPPSYPSAMSPTHHLPPYLTHHPHFIHNSHTAYYPPVTGPGDMPPQFFPQHHLPHTIYGEQEIIPFYGMSTYITREDQYSKPPHKKLKDRQIDRQNRLNSPPSSIYKSSCTTVYNGYGKGHSGGSGGGGSGSGPGIKKTERRARSSPKSNDSDLQEYELEVKRVQDILSGIEKPQVSNIQARAVVLSWAPPVGLSCGPHSGLSFPYSYEVALSDKGRDGKYKIIYSGEELECNLKDLRPATDYHVRVYAMYNSVKGSCSEPVSFTTHSCAPECPFPPKLAHRSKSSLTLQWKAPIDNGSKITNYLLEWDEGKRNSGFRQCFFGSQKHCKLTKLCPAMGYTFRLAARNDIGTSGYSQEVVCYTLGNIPQMPSAPRLVRAGITWVTLQWSKPEGCSPEEVITYTLEIQEDENDNLFHPKYTGEDLTCTVKNLKRSTQYKFRLTASNTEGKSCPSEVLVCTTSPDRPGPPTRPLVKGPVTSHGFSVKWDPPKDNGGSEILKYLLEITDGNSEGEVFGNCFIQIQ

SEQ ID NO: 4775 - DNA, 752 bp, Homo sapiens
gcctacagaagagagaagccatgagagacagttgagctcatattaatgagcactcaccatgccaggcttggttctgggtgctgagaagacagcagcaaacagaactgacaatgaagaaagagttaaacaaataaacatataccagaggaggtgatggcgatcaagaaaatactagatgaagtggtgaagagagcctgcgattgaagattttttcatctcagctttttcccccttaccttgttctctctcatgtttcatgatctgtgtcatagatatttcttcattacgagcacttcgcggtgtggcttttcaatgtctgaagtggattaagtggcccacagtcagttctgtgacttgagtttcaaaagtaaaattaccatcaacaatgtgattcaattttattttctatactagctaaaagcaaggaactatattattaacaatcttggctttactgtagtttaaggcaggtgatgatgatgcttattagtccacctgaaagagtccttccaggtttttggaagctttattcctgcttattaccttgcccttgagaagtccttcatggaaagtggaaacactgggttgacttcttttccccatatcctagttgaaagggacagcttatatgtatgttagactgtccaaaagtgtttgtagaacctcattttaaaaaatcaactgtattgtactttttaaaaaatgggatcttaaactctttattaaaaataataaatggaaatgtgttaagc

SEQ ID NO: 4776 - protein, 39 aa, Homo sapiens
MLDCPKVFVEPHFKKSTVLYFLKNGILNSLLKIINGNVL

SEQ ID NO: 4777 - DNA, 904 bp, Homo sapiens
gcctacagaagagagaagccatgagagacagttgagctcatattaatgagcactcaccatgccaggcttggttctgggtgctgagaagacagcagcaaacagaactgacaatgaagaaagagttaaacaaataaacatataccagaggaggtgatggcgatcaagaaaatactagatgaagtggtgaagagagcctgcgattgaagattttttcatctcagctttttcccccttaccttgttctctctcatgtttcatgatctgtgtcatagatatttcttcattacgagcacttcgcggtgtggcttttcaatgtctgaagtggattaagtggcccacagtcagttctgtgacttgagtttcaaaagtaaaattaccatcaacaatgtgattcaattttattttctatactagctaaaagcaaggaactatattattaacaatcttggctttactgtagtttaaggcaggtgatgatgatgcttattagtccacctgaaagagtccttccaggtttttggaagctttattcctgcttattaccttgcccttgagaagtccttcatggaaagtggaaacactgggttgacttcttttccccatatcctagttgaaagggacagcttatatgtatgttagactgtccaaaagtgtttgtagaacctcattttaaaaaatcaactgtattgtactttttaaaaaatgggatcttaaactctttattaaaaataataaatggaaatgtgttaagcaaaaacattacttgacctcttcttattcattgtgtaataataacgtataaaataattgctttatttacatctgtattgaccatggctgaacttcttgccagtaggggtgtcgtgagtcctgttcatctctctgccccttggtgggatgccta

SEQ ID NO: 4778 - protein, 44 aa, Homo sapiens
MLDCPKVFVEPHFKKSTVLYFLKNGILNSLLKIINGNVLSKNIT

SEQ ID NO: 4779 - DNA, 759 bp, Homo sapiens
ctagggttgaataaaagacgccctaagacatcaaaagctattttgaacgtccagctgggagatctttattacaggaaagcttaaacgaaatgcatttgtgtaagagatgtagatacaaacttcagaatattcatgttaaccatcattgatctctgctttgatggaggtgatttttgatgtaaaataagccgaaattacactgggccttttctctttaaacagcactgcagatactggatgagcatttcctacaccatcagatttcatggaccttggagcttggcaaagaacagagacttaaaatggtttcatcatagcccataactgatcttactgatcttttctttcagaaaactgagcggcgcgggcgcgggctcgtctgcggtacggctgccgggccaggccggattttcagcagccgtaaagcgggagaagcgggcgcgagccgcggcgcgaaccctcgcccccgagcggcggccccggcgcctccgccgcgagcgtcagccgcttggcaaggaacgggctgggctgagtcataataaaagacgcgtttgtcgagccaagtgggaagaagagccgcgggcagcagtgttcaatggcacaagcctcaaaaattgggaaggattttttttttaatgggcaaaactggaaacttgcccccatggtgcccatcaaaagatatgtttcgtttataatttgcatatattttatacatagtctttgaatctaataaaacttttaaaagaatttttaaagccc

SEQ ID NO: 4780 - protein, 42 aa, Homo sapiens
MAQASKIGKDFFFNGQNWKLAPMVPIKRYVSFIICIYFIHSL

SEQ ID NO: 4781 - DNA, 583 bp, Homo sapiens
tccaagtggccagttttactgctcaatgtgtaatgttggagctggcgaagagatggaattccggcagcatttagagagcaagcaacataagagcaaggtgtctgaacagcggtctcttcttcagcccttggacacagtgtcatccctattggagtcaataaaggagaacggaaagagagattcaagacacacaaagaggataaacatggagttgaaggccatgtgaagatggaagcagagactggaatgatgcatcaccatcaagaattgctggcacccacaagaagctaggagagaggcgtgggacagattctccctctaaacctccagaagaaaccaactctgctgacactgtgatttcagacttctggtcctcacaacttaaccctcttccacatggtgtctcatggattcaggctctgtatttgaagactgtaccatctcaactcatggctttgagagttactgcttttaaatgcctcagctcagaaaaggcacacacatcattgtaatttgctccttgttttgctctcacctactgggcacatgacctcagtctaagtgcatggaggctggaagatgc

SEQ ID NO: 4782 - protein, 66 aa, Homo sapiens
MCNVGAGEEMEFRQHLESKQHKSKVSEQRSLLQPLDTVSSLLESIKENGKRDSRHTKRINMELKAM

SEQ ID NO: 4783 - DNA, 2423 bp, Homo sapiens
agctgtttccctgtgggtcgggttggactgacttttgacagtcagccttcggctgcggagggggctcggcggcggccggcggagaaagttgctccgagaagaggctgggtcgagctgggccgagccgggcgcgcagggcgggcgtcgcgggcgtcccgggcggacgcggcgcggagactgccggcgcgtcccgggggttccgatttgaagaccttgcttctcatcacccactggattatgccccaggcttccctacccaatgatcctcttgcaacacgccgtgcttcctccacctaagcagccctcaccctcgcctcctatgtcagtggccaccaggtctacaggaaccttgcagcttccaccacagaagccttttgggcaggaggcttccttgcctcttgcaggggaagaagagttatcgaagggaggggagcaagactgtgccctggaggagctatgtaagcccctgtactgcaaactctgcaatgtcaccttgaactctgcacagcaagcccaggctcattatcagggtaaaaatcatggtaagaaactccgaaattactatgcagcaaatagctgtcctcctcctgctagaatgagcaatgtggtcgagcctgcagctactccagttgttccagtccctccgcagatgggctcctttaagccaggaggccgagtgatcctggccacggagaatgattactgtaagctctgtgatgcctccttcagttccccagctgtggctcaggctcactatcaagggaagaatcatgccaagaggctgcggctggcggaagctcagagtaactcattctcggaatcctcagagctgggtcaacggcgggccaggaaagaagggaatgagtttaagatgatgcctaacaggagaaatatgtatacagtacagaataattcaggtccttacttcaatccccgctctcggcagagaattccacgtgatctggccatgtgtgttactccaagtggccagttttactgctcaatgtgtaatgttggagctggcgaagagatggaattccggcagcatttagagagcaagcaacataagagcaaggtgtctgaacagcggtacaggaatgagatggagaatctgggatatgtatagtgattatcatattaagatagagcagcttttcctgcctgttgtttgccttttgtcaacttgccctgctttgtggtctttttgatatgagtacattcctctgcttaatgttaatacatgtaacccacagtggtaccatgagatgtcaaaacctgggggcccgggggcggggcggggggaggtgggtgtgaagaacgtgcttcttaggtcataacgcttttgcagggtcaatggtgttgagccgctcatagcatgtgacctacctaccccatcagaaataactttttatcttgctcaagttctggtcaactagtagcctgacggcttagaactttgactatttaaaagtttcattttcttttgcaattttagttttatgtactgttaaagaattgtactgaattctttttagatcacagtaaaaataggttggcagagatttcagtttcccagggcttaaccagaaccgccacctcaatgcattgtcagtagaatacattattagaaactgttaaggtctttcccgggacatttttttctgccattttcttttgcaattgtagttttatgtactgttaaagaattgtattgaattctttttagatcaaagtaaaaataggtcagcagagatttcagtttcccagggcttaaccagaaccgccacctcaatgcattgtcagtaggatacattattagaaactgttagggtctttcccaggacatttttttttctgtatcatgtctccccatcattgaagcgcaaattttcttgaattcaaatactcccaatgagcttgtatacttccaaacagctaaacttgatttccagttgtggatttcacacatataattgccgccttcttccctcctcttttttcccccctagttgaatcagcttgtctaacaagcccattttcatgccccagctgtgctgtgggttttccaagcctcatatttgaatattcaatgagtttaagatggatatgatttcaaaaaatagggccgggcgcggtggctcacgcctgtaatcccagcactttgggaggccgaagcaggcggatcacgaggtcaggaggtcgagatcatcctggctaacacagtgaaaccccatctctactaaaaatacaaaacattagccgggcgtggtggtgggtgcctgtagtcccagctactctggaggctgaggcaggagaatggcgtgaacccgggaggcggagcttgcagtgagccgagatcgcgccactgcactccagcctgggtgacagagcgagactccgtctcaaaaaaaaaaaaaaaaaaa

SEQ ID NO: 4784 - protein, 288 aa, Homo sapiens; identical to SEQ ID NO: 491

SEQ ID NO: 4785 - DNA, 2318 bp, Homo sapiens
agctgtttccctgtgggtcgggttggactgacttttgacagtcagccttcggctgcggagggggctcggcggcggccggcggagaaagttgctccgaatttgaagaccttgcttctcatcacccactggattatgccccaggcttccctacccaatgatcctcttgcaacacgccgtgcttcctccacctaagcagccctcaccctcgcctcctatgtcagtggccaccaggtctacaggaaccttgcagcttccaccacagaagccttttgggcaggaggcttccttgcctcttgcaggggaagaagagttatcgaagggaggggagcaagactgtgccctggaggagctatgtaagcccctgtactgcaaactctgcaatgtcaccttgaactctgcacagcaagcccaggctcattatcagggtaaaaatcatggtaagaaactccgaaattactatgcagcaaatagctgtcctcctcctgctagaatgagcaatgtggtcgagcctgcagctactccagttgttccagtccctccgcagatgggctcctttaagccaggaggccgagtgatcctggccacggagaatgattactgtaagctctgtgatgcctccttcagttccccagctgtggctcaggctcactatcaagggaagaatcatgccaagaggctgcggctggcggaagctcagagtaactcattctcggaatcctcagagctgggtcaacggcgggccaggaaagaagggaatgagtttaagatgatgcctaacaggagaaatatgtatacagtacagaataattcaggtccttacttcaatccccgctctcggcagagaattccacgtgatctggccatgtgtgttactccaagtggccagttttactgctcaatgtgtaatgttggagctggcgaagagatggaattccggcagcatttagagagcaagcaacataagagcaaggtgtctgaacagcggtacaggaatgagatggagaatctgggatatgtatagtgattatcatattaagatagagcagcttttcctgcctgttgtttgccttttgtcaacttgccctgctttgtggtctttttgatatgagtacattcctctgcttaatgttaatacatgtaacccacagtggtaccatgagatgtcaaaacctgggggcccgggggcggggcggggggaggtgggtgtgaagaacgtgcttcttaggtcataacgcttttgcagggtcaatggtgttgagccgctcatagcatgtgacctacctaccccatcagaaataactttttatcttgctcaagttctggtcaactagtagcctgacggcttagaactttgactatttaaaagtttcattttcttttgcaattttagttttatgtactgttaaagaattgtactgaattctttttagatcacagtaaaaataggttggcagagatttcagtttcccagggcttaaccagaaccgccacctcaatgcattgtcagtagaatacattattagaaactgttaaggtctttcccgggacatttttttctgccattttcttttgcaattgtagttttatgtactgttaaagaattgtattgaattctttttagatcaaagtaaaaataggtcagcagagatttcagtttcccagggcttaaccagaaccgccacctcaatgcattgtcagtaggatacattattagaaactgttagggtctttcccaggacatttttttttctgtatcatgtctccccatcattgaagcgcaaattttcttgaattcaaatactcccaatgagcttgtatacttccaaacagctaaacttgatttccagttgtggatttcacacatataattgccgccttcttccctcctcttttttcccccctagttgaatcagcttgtctaacaagcccattttcatgccccagctgtgctgtgggttttccaagcctcatatttgaatattcaatgagtttaagatggatatgatttcaaaaaatagggccgggcgcggtggctcacgcctgtaatcccagcactttgggaggccgaagcaggcggatcacgaggtcaggaggtcgagatcatcctggctaacacagtgaaaccccatctctactaaaaatacaaaacattagccgggcgtggtggtgggtgcctgtagtcccagctactctggaggctgaggcaggagaatggcgtgaacccgggaggcggagcttgcagtgagccgagatcgcgccactgcactccagcctgggtgacagagcgagactccgtctcaaaaaaaaaaaaaaaaaaa

SEQ ID NO: 4786 - protein, 288 aa, Homo sapiens; identical to SEQ ID NO: 491

SEQ ID NO: 4787 - DNA, 2565 bp, Homo sapiens
ggttccgcagtcacttcctgcagctgtttccctgtgggtcgggttggactgacttttgacagtcagccttcggctgcggagggggctcggcggcggccggcggagaaagttgctccgagaagaggctgggtcgagctgggccgagccgggcgcgcagggcgggcgtcgcgggcgtcccgggcggacgcggcgcggagactgccggcgcgtcccgggggttccggcatttcacgtggaccaggtggatcatctgtgcgtgcagctgccttggccctctcagttgcccccgccccgtgggagtcgggggattccatccttcgtgatggcatccataccgggttgagatttgaagaccttgcttctcatcacccactggattatgccccaggcttccctacccaatgatcctcttgcaacacgccgtgcttcctccacctaagcagccctcaccctcgcctcctatgtcagtggccaccaggtctacaggaaccttgcagcttccaccacagaagccttttgggcaggaggcttccttgcctcttgcaggggaagaagagttatcgaagggaggggagcaagactgtgccctggaggagctatgtaagcccctgtactgcaaactctgcaatgtcaccttgaactctgcacagcaagcccaggctcattatcagggtaaaaatcatggtaagaaactccgaaattactatgcagcaaatagctgtcctcctcctgctagaatgagcaatgtggtcgagcctgcagctactccagttgttccagtccctccgcagatgggctcctttaagccaggaggccgagtgatcctggccacggagaatgattactgtaagctctgtgatgcctccttcagttccccagctgtggctcaggctcactatcaagggaagaatcatgccaagaggctgcggctggcggaagctcagagtaactcattctcggaatcctcagagctgggtcaacggcgggccaggaaagaagggaatgagtttaagatgatgcctaacaggagaaatatgtatacagtacagaataattcaggtccttacttcaatccccgctctcggcagagaattccacgtgatctggccatgtgtgttactccaagtggccagttttactgctcaatgtgtaatgttggagctggcgaagagatggaattccggcagcatttagagagcaagcaacataagagcaaggtgtctgaacagcggtacaggaatgagatggagaatctgggatatgtatagtgattatcatattaagatagagcagcttttcctgcctgttgtttgccttttgtcaacttgccctgctttgtggtctttttgatatgagtacattcctctgcttaatgttaatacatgtaacccacagtggtaccatgagatgtcaaaacctgggggcccgggggcggggcggggggaggtgggtgtgaagaacgtgcttcttaggtcataacgcttttgcagggtcaatggtgttgagccgctcatagcatgtgacctacctaccccatcagaaataactttttatcttgctcaagttctggtcaactagtagcctgacggcttagaactttgactatttaaaagtttcattttcttttgcaattttagttttatgtactgttaaagaattgtactgaattctttttagatcacagtaaaaataggttggcagagatttcagtttcccagggcttaaccagaaccgccacctcaatgcattgtcagtagaatacattattagaaactgttaaggtctttcccgggacatttttttctgccattttcttttgcaattgtagttttatgtactgttaaagaattgtattgaattctttttagatcaaagtaaaaataggtcagcagagatttcagtttcccagggcttaaccagaaccgccacctcaatgcattgtcagtaggatacattattagaaactgttagggtctttcccaggacatttttttttctgtatcatgtctccccatcattgaagcgcaaattttcttgaattcaaatactcccaatgagcttgtatacttccaaacagctaaacttgatttccagttgtggatttcacacatataattgccgccttcttccctcctcttttttcccccctagttgaatcagcttgtctaacaagcccattttcatgccccagctgtgctgtgggttttccaagcctcatatttgaatattcaatgagtttaagatggatatgatttcaaaaaatagggccgggcgcggtggctcacgcctgtaatcccagcactttgggaggccgaagcaggcggatcacgaggtcaggaggtcgagatcatcctggctaacacagtgaaaccccatctctactaaaaatacaaaacattagccgggcgtggtggtgggtgcctgtagtcccagctactctggaggctgaggcaggagaatggcgtgaacccgggaggcggagcttgcagtgagccgagatcgcgccactgcactccagcctgggtgacagagcgagactccgtctcaaaaaaaaaaaaaaaaaaa

SEQ ID NO: 4788 - protein, 288 aa, Homo sapiens; identical to SEQ ID NO: 491

SEQ ID NO: 4789 - DNA, 339 bp, Homo sapiens
tctccctcggcgccgccgccgccgcccgcggggctgggacccgatgcggttagagccgcggagcctggaagagccccgagcgtttctgctttgggacaaccatacatctaattccttaaagtagttttatatgtaaaacttgcaaagaatcagaacaatgcctccacgaccatcatcaggtgaactgtggggcatccacttgatgcccccaagaatcctagtagaatgtttactaccaaatggaatgatagtgactttagaatgcctccgtgaggctacattaataaccataaagcatgaactatttaaagaagcaagaaaataccccctccatcaact

SEQ ID NO: 4790 - protein, 59 aa, Homo sapiens
MPPRPSSGELWGIHLMPPRILVECLLPNGMIVTLECLREATLITIKHELFKEARKYPLH

SEQ ID NO: 4791 - DNA, 354 bp, Homo sapiens
atggtagcacatgcttgtagtcccagctactcgggaggctgaggcaggagaattgctcgaacctcgtaaacagaggttgcagtgagccgaaatcatgccactgcactccagcctgcgtgacacagcaagactccatctcaaaaaaaaagtaaaaataaaaaaataaaatgtaaatatgaatttgataatgaaaatgaattgcagttcctcactaaaggaatttaaattttttgcatactagtgatgaggacttgattttccaccctgaagttgtaaaggtctttcagtctctctaaaagtgtgagttaaatctgttttctcacggccagcttttaaaggtcagtgaaggacggc

SEQ ID NO: 4792 - protein, 34 aa, Homo sapiens
HSKTPSQKKSKNKKIKCKYEFDNENELQFLTKGI

SEQ ID NO: 4793 - DNA, 4177 bp, Homo sapiens
agaatcagaacaatgcctccacgaccatcatcaggtgaactgtggggcatccacttgatgcccccaagaatcctagtagaatgtttactaccaaatggaatgatagtgactttagaatgcctccgtgaggctacattaataaccataaagcatgaactatttaaagaagcaagaaaataccccctccatcaacttcttcaagatgaatcttcttacattttcgtaagtgttactcaagaagcagaaagggaagaattttttgatgaaacaagacgactttgtgaccttcggctttttcaaccctttttaaaagtaattgaaccagtaggcaaccgtgaagaaaagatcctcaatcgagaaattggttttgctatcggcatgccagtgtgtgaatttgatatggttaaagatccagaagtacaggacttccgaagaaatattctgaacgtttgtaaagaagctgtggatcttagggacctcaattcacctcatagtagagcaatgtatgtctatcctccaaatgtagaatcttcaccagaattgccaaagcacatatataataaattagataaagggcaaataatagtggtgatctgggtaatagtttctccaaataatgacaagcagaagtatactctgaaaatcaaccatgactgtgtaccagaacaagtaattgctgaagcaatcaggaaaaaaactcgaagtatgttgctatcctctgaacaactaaaactctgtgttttagaatatcagggcaagtatattttaaaagtgtgtggatgtgatgaatacttcctagaaaaatatcctctgagtcagtataagtatataagaagctgtataatgcttgggaggatgcccaatttgatgttgatggctaaagaaagcctttattctcaactgccaatggactgttttacaatgccatcttattccagacgcatttccacagctacaccatatatgaatggagaaacatctacaaaatccctttgggttataaatagtgcactcagaataaaaattctttgtgcaacctacgtgaatgtaaatattcgagacattgataagatctatgttcgaacaggtatctaccatggaggagaacccttatgtgacaatgtgaacactcaaagagtaccttgttccaatcccaggtggaatgaatggctgaattatgatatatacattcctgatcttcctcgtgctgctcgactttgcctttccatttgctctgttaaaggccgaaagggtgctaaagaggaacactgtccattggcatggggaaatataaacttgtttgattacacagacactctagtatctggaaaaatggctttgaatctttggccagtacctcatggattagaagatttgctgaaccctattggtgttactggatcaaatccaaataaagaaactccatgcttagagttggagtttgactggttcagcagtgtggtaaagttcccagatatgtcagtgattgaagagcatgccaattggtctgtatcccgagaagcaggatttagctattcccacgcaggactgagtaacagactagctagagacaatgaattaagggaaaatgacaaagaacagctcaaagcaatttctacacgagatcctctctctgaaatcactgagcaggagaaagattttctatggagtcacagacactattgtgtaactatccccgaaattctacccaaattgcttctgtctgttaaatggaattctagagatgaagtagcccagatgtattgcttggtaaaagattggcctccaatcaaacctgaacaggctatggaacttctggactgtaattacccagatcctatggttcgaggttttgctgttcggtgcttggaaaaatatttaacagatgacaaactttctcagtatttaattcagctagtacaggtcctaaaatatgaacaatatttggataacttgcttgtgagatttttactgaagaaagcattgactaatcaaaggattgggcactttttcttttggcatttaaaatctgagatgcacaataaaacagttagccagaggtttggcctgcttttggagtcctattgtcgtgcatgtgggatgtatttgaagcacctgaataggcaagtcgaggcaatggaaaagctcattaacttaactgacattctcaaacaggagaagaaggatgaaacacaaaaggtacagatgaagtttttagttgagcaaatgaggcgaccagatttcatggatgctctacagggctttctgtctcctctaaaccctgctcatcaactaggaaacctcaggcttgaagagtgtcgaattatgtcctctgcaaaaaggccactgtggttgaattgggagaacccagacatcatgtcagagttactgtttcagaacaatgagatcatctttaaaaatggggatgatttacggcaagatatgctaacacttcaaattattcgtattatggaaaatatctggcaaaatcaaggtcttgatcttcgaatgttaccttatggttgtctgtcaatcggtgactgtgtgggacttattgaggtggtgcgaaattctcacactattatgcaaattcagtgcaaaggcggcttgaaaggtgcactgcagttcaacagccacacactacatcagtggctcaaagacaagaacaaaggagaaatatatgatgcagccattgacctgtttacacgttcatgtgctggatactgtgtagctaccttcattttgggaattggagatcgtcacaatagtaacatcatggtgaaagacgatggacaactgtttcatatagattttggacactttttggatcacaagaagaaaaaatttggttataaacgagaacgtgtgccatttgttttgacacaggatttcttaatagtgattagtaaaggagcccaagaatgcacaaagacaagagaatttgagaggtttcaggagatgtgttacaaggcttatctagctattcgacagcatgccaatctcttcataaatcttttctcaatgatgcttggctctggaatgccagaactacaatcttttgatgacattgcatacattcgaaagaccctagccttagataaaactgagcaagaggctttggagtatttcatgaaacaaatgaatgatgcacatcatggtggctggacaacaaaaatggattggatcttccacacaattaaacagcatgcattgaactgaaaagataactgagaaaatgaaagctcactctggattccacactgcactgttaataactctcagcaggcaaagaccgattgcataggaattgcacaatccatgaacagcattagaatttacagcaagaacagaaataaaatactatataatttaaataatgtaaacgcaaacagggtttgatagcacttaaactagttcatttcaaaattaagctttagaataatgcgcaatttcatgttatgccttaagtccaaaaaggtaaactttgaagattgtttgtatctttttttaaaaaacaaaacaaaacaaaaatccccaaaatatatagaaatgatggagaaggaaaaagtgatggttttttttgtcttgcaaatgttctatgttttgaaatgtggacacaacaaaggctgttattgcattaggtgtaagtaaactggagtttatgttaaattacattgattggaaaagaatgaaaatttcttatttttccattgctgttcaatttatagtttgaagtgggtttttgactgcttgtttaatgaagaaaaatgcttggggtggaagggactcttgagatttcaccagagactttttctttttaataaatcaaaccttttgatgatttgaggttttatctgcagttttggaagcagtcacaaatgagacctgttataaggtggtatttttttttttcttctggacagtatttaaaggatcttattcttatttcccagggaaattctgggctcccacaaagtaaaaaaaaaaaaaaatcatagaaaaagaatgagcaggaatagttcttattccagaattgtacagtattcaccttaagttgattttttttctccttctgcaattgaactgaatacatttttcatgcatgttttccagaaaatagaagtattaatgttattaaaaagattattttttttattaaaggctatttatattatag

SEQ ID NO: 4794 - protein, 1068 aa, Homo sapiens; identical to SEQ ID NO: 493

SEQ ID NO: 4795 - DNA, 470 bp, Homo sapiens
agtgcttttacacacctaagtgccaccaagatagaaatgatttgctcaacagtgctctggacataaaagaattcttcgatcacaaaaatggaacccccttttcatgcttctacagtccagccagccaatctgaagatgtcattcttataaaaaacgtgatgttacagactgcagagttaaagaaaagcagacattgacagtttctgatgagcataaacagtaagtgcagtcacaggccaaacttcttgctaggaacagcaagactgggaagaggtcttaaatttagtgatactgttattattctatattctcaatatagtaacacatgcatcttgctgtgtcaaatgctttctgggccatcattaaaaggacattaaaaacgtttttcttctaatgaatgcagtataccacaggacttcaattcactgaatgacaaaatatagagaaataaacttgctacaattaatggg

SEQ ID NO: 4796 - protein, 56 aa, Homo sapiens
MSINSKCSHRPNFLLGTARLGRGLKFSDTVIILYSQYSNTCILLCQMLSGPSLKGH

SEQ ID NO: 4797 - DNA, 1333 bp, Homo sapiens
gctcccggctgccgaggcggaaacacaggtgatgaggtggcggcaagcacagtgcaaagagagagaagcagcttcggctgcagcaaaccacgcaggtccttcttgatcatctagaactgaccgctccgccttgccaggagtctgcagaaccacgtggctagcctgcctgaagttctcacctctccaggaaggcggggggcttctaatggctgcagctgcgctgggggctgggggctcccgctgggactccacttccgtggatgtctaagcttcacctttcttgcgcccgcaggggcatgactcaggtgaaagggagccattttctcagacccctggcctcatgcagcccttcagcatccccgtgcaaatcacacttcagggcagccggaggcgccaggggaggacagcctttcctgcctcagggaagaagagagagacagactacagtgatggagacccactagatgtgcacaagaggctgccatccagtgctggagaggaccgagccgtgatgctggggtttgccatgatgggcttctcagtcctaatgttcttcttgctcggaacaaccattctaaagccttttatgctcagcattcagagagaagaatcgacctgcactgccatccacacagatatcatggacgactggctggactgtgccttcacctgtggtgtgcactgccacggtcaggggaagtacccgtgtcttcaggtgtttgtgaacctcagccatccaggtcagaaagctctcctacattataatgaagaggctgtccagataaatcccaagtgcttttacacacctaagtgccaccaagatagaaatgatttgctcaacagtgctctggacataaaagaattcttcgatcacaaaaatggaacccccttttcatgcttctacagtccagccagccaatctgaagatgtcattcttataaaaaagtatgaccaaatggctatcttccactgtttattttggccttcactgactctgctaggtggtgccctgattgttggcatggtgagattaacacaacacctgtccttactgtgtgaaaaatatagcactgtagtcagagatgaggtaggtggaaaagtaccttatatagaacagcatcagttcaaactgtgcattatgaggaggagcaaaggaagagcagagaaatcttaagacggtggccaaattaaagtgctggccttcagatgtctgtgatttctgcaactgaggacctaattatgcctgtctgcaaactaataatgtaaaagcgtgatgttacagactgcagagttaaagaaaagcagacattgacagtttctgatgagcataaac

SEQ ID NO: 4798 - protein, 277 aa, Homo sapiens; identical to SEQ ID NO: 497

SEQ ID NO: 4799 - DNA, 1571 bp, Homo sapiens
acaaaacacatctgtgggctggatgccgccatgcccaccggtttgcgacctttgtgttggactcttctgttcaccagacaccctgccctgcgagaatgtatctcatcctttgctggagcaggtttgcaggcacagtggagagaggagagaagaaatgaagggacacttatgcagaaccatgagtggccagagaggaggagaaggagggtgagaggagcaaagaagccatgacaacttcataattctgagtggactgggcagtggccagaaattctggtggtggatatgctgcctttccaacaggtgaatatgaaagaataagtcaaaccctgttcaggacgctgttaattccaaatgtgaactttttgagtcattctttccatgtggaattcaaaggagaatgtaaacaaattttcaggagggacgtgcaatatccctgaaagataacaaagttcgtaacacttatttacatacaacattctctagttattgattaaacagatctctacagacttgcatgaggcaacatttcttaggcttgtttgctacaatatctttaaaaatacttgattacacatcactttagcttatttagatggacttttcaccaagctctgaactgggatttcattttgttgcattcatcctgctcacgagacacaggacagcctttcctgcctcagggaagaagagagagacagactacagtgatggagacccactagatgtgcacaagaggctgccatccagtgctggagaggaccgagccgtgatgctggggtttgccatgatgggcttctcagtcctaatgttcttcttgctcggaacaaccattctaaagccttttatgctcagcattcagagagaagaatcgacctgcactgccatccacacagatatcatggacgactggctggactgtgccttcacctgtggtgtgcactgccacggtcaggggaagtacccgtgtcttcaggtgtttgtgaacctcagccatccaggtcagaaagctctcctacattataatgaagaggctgtccagataaatcccaagtgcttttacacacctaagtgccaccaagatagaaatgatttgctcaacagtgctctggacataaaagaattcttcgatcacaaaaatggaacccccttttcatgcttctacagtccagccagccaatctgaagatgtcattcttataaaaaagtatgaccaaatggctatcttccactgtttattttggccttcactgactctgctaggtggtgccctgattgttggcatggtgagattaacacaacacctgtccttactgtgtgaaaaatatagcactgtagtcagagatgaggtaggtggaaaagtaccttatatagaacagcatcagttcaaactgtgcattatgaggaggagcaaaggaagagcagagaaatcttaagacggtggccaaattaaagtgctggccttcagatgtctgtgatttctgcaactgaggacctaattatgcctgtctgcaaactaataatgtaaaaggtaataattaaagtatcatattttcatgtgggaaaaaattt

SEQ ID NO: 4800 - protein, 279 aa, Homo sapiens; identical to SEQ ID NO: 495

SEQ ID NO: 4801 - DNA, 1831 bp, Homo sapiens
cccagctactagggaggctgaggcaggagaatcgcttgaacctgggaggcggaggaggttgcagtgaactgagatcgtacccagcctgggcaacagtgcgaggttccgtctcaaaaaaaaccaaaaaacacaaaaacaaaaaacgacagagaaggccaaacaaaacacatctgtgggctggatgccgccatgcccaccggtttgcgacctttgtgttggactcttctgttcaccagacaccctgccctgcgagaatgtatctcatcctttgctggagcaggtttgcaggcacagtggagagaggagagaagaaatgaagggacacttatgcagaaccatgagtggccagagaggaggagaaggagggtgagaggagcaaagaagccatgacaacttcataattctgagtggactgggcagtggccagaaattctggtggtggatatgctgcctttccaacaggtgaatatgaaagaataagtcaaaccctgttcaggacgctgttaattccaaatgtgaactttttgagtcattctttccatgtggaattcaaaggagaatgtaaacaaattttcaggagggacgtgcaatatccctgaaagataacaaagttcgtaacacttatttacatacaacattctctagttattgattaaacagatctctacagacttgcatgaggcaacatttcttaggcttgtttgctacaatatctttaaaaatacttgattacacatcactttagcttatttagatggacttttcaccaagctctgaactgggatttcattttgttgcattcatcctgctcacgagacacaggtaggcagcaaatgagattatccctccagtccccatggattggaaatgttcccccttctttatgagctcactgcagtatctccttctccctttccccaaaggacagcctttcctgcctcagggaagaagagagagacagactacagtgatggagacccactagatgtgcacaagaggctgccatccagtgctggagaggaccgagccgtgatgctggggtttgccatgatgggcttctcagtcctaatgttcttcttgctcggaacaaccattctaaagccttttatgctcagcattcagagagaagaatcgacctgcactgccatccacacagatatcatggacgactggctggactgtgccttcacctgtggtgtgcactgccacggtcaggggaagtacccgtgtcttcaggtgtttgtgaacctcagccatccaggtcagaaagctctcctacattataatgaagaggctgtccagataaatcccaagtgcttttacacacctaagtgccaccaagatagaaatgatttgctcaacagtgctctggacataaaagaattcttcgatcacaaaaatggaacccccttttcatgcttctacagtccagccagccaatctgaagatgtcattcttataaaaaagtatgaccaaatggctatcttccactgtttattttggccttcactgactctgctaggtggtgccctgattgttggcatggtgagattaacacaacacctgtccttactgtgtgaaaaatatagcactgtagtcagagatgaggtaggtggaaaagtaccttatatagaacagcatcagttcaaactgtgcattatgaggaggagcaaaggaagagcagagaaatcttaagacggtggccaaattaaagtgctggccttcagatgtctgtgatttctgcaactgaggacctaattatgcctgtctgcaaactaataatgtaaaaggtaataattaaagtatcatattttcatgtgggaaaaaattt

SEQ ID NO: 4802 - protein, 275 aa, Homo sapiens; identical to SEQ ID NO: 501

SEQ ID NO: 4803 - DNA, 1852 bp, Homo sapiens
gttcctggttctccagcaggaactgagagcaagggtcaggaggcgacaggtccaagtacagtagacactcaaagtgaaccctcagatatgaaagagccagatgaagaaaagaatgaccaacagggagaggcattggactcattgcagaagagaaagaacaagaaaaagaaaaagaagaggaaaaaatccccagtacccatagaaacccttaaagatgtttaaaaagagttaacttatcagaacacagatttaagtgaaattaaggaagaagagcaggtaaagtctactgacagaaagtcagcagtggaagcccaaaacgaggtgactgaaaatccaaaacagaaaattgcagcagaaagcagtgaaaatgttgattgtccagagaatcctaaaatgaagttggatggaaaacttgaccaagaaggcaatgatgtaaaaacagcagctgaggaggtactagctggtagagacacattagattttgaggatgtcacagttcaatcatcaggcccgagggctggtggtgaagaattagatgaaggtgttgcaaaagataatgctaaaatagctggtgccacttaaagcaatcctgaagaaccagagagcgaagatgcagatcactgcaccgtacccaaaaatgaaagtccctcacaggacattagtgatgcctgtgaagcagaaagtacagagaggtgtgggatgtcagaacatccaagtcagaccatcaggaaagctttagacagcaatagcctaaaaaaccatgacttgttggcaccaggaggagagccgggggacttcaatccagaaagcagagaagataccagaggagggaacgagaagggcaaaagcaaagaagaccgtaccatgtcctaagctgaggcaggcggcaggcgtggtgcacaggaagtctgagtgtgaggggctcttttctctccactgccaatgacagcctttcctgcctcagggaagaagagagagacagactacagtgatggagacccactagatgtgcacaagaggctgccatccagtgctggagaggaccgagccgtgatgctggggtttgccatgatgggcttctcagtcctaatgttcttcttgctcggaacaaccattctaaagccttttatgctcagcattcagagagaagaatcgacctgcactgccatccacacagatatcatggacgactggctggactgtgccttcacctgtggtgtgcactgccacggtcaggggaagtacccgtgtcttcaggtgtttgtgaacctcagccatccaggtcagaaagctctcctacattataatgaagaggctgtccagataaatcccaagtgcttttacacacctaagtgccaccaagatagaaatgatttgctcaacagtgctctggacataaaagaattcttcgatcacaaaaatggaacccccttttcatgcttctacagtccagccagccaatctgaagatgtcattcttataaaaaagtatgaccaaatggctatcttccactgtttattttggccttcactgactctgctaggtggtgccctgattgttggcatggtgagattaacacaacacctgtccttactgtgtgaaaaatatagcactgtagtcagagatgaggtaggtggaaaagtaccttatatagaacagcatcagttcaaactgtgcattatgaggaggagcaaaggaagagcagagaaatcttaagacggtggccaaattaaagtgctggccttcagatgtctgtgatttctgcaactgaggacctaattatgcctgtctgcaaactaataatgtaaaaggtaataattaaagtatcatattttcatgtgggaaaaaattt

SEQ ID NO: 4804 - protein, 257 aa, Homo sapiens; identical to SEQ ID NO: 499

SEQ ID NO: 4805 - DNA, 3110 bp, Homo sapiens
tcataaagttgaatctcaactgaataagctaaatcatctcctcactgatattcttgctgatgtgaagacaaaaagaaaaactttggcaaataataaattacatcaaatggaaagagaattctatgtatattttttaaaagatgaagattatctgaaagatattgtggagaatttagaaactcaatcaaagattaaggctgattttgtgaaaatggaaaattatgaggcattggtaggctttgatctctgtaatacaccgctctccagtgttgctcagaagattatgtctgctatgcattcaggtgatttagtggattctaagacttggggaaagagtacagagactatggaagtgataaacaagtccagtgttaagtattcagtacaacttgaagacaggaagactcaatcaccagaaaaaaaggatcttaaatctttaagaagtcagacatcaagaggttctgccaagctgtctcctcagtccttcagtgtcaggctcacagatcagctgtctgctgaccaaaaacagaagagcatcagctcattgactctttcaagttgtttaattccacagtataatcaagaggcttcagttctacagaaaaaggggcataaaagaaagcatttcctaatggagaatataaataatgaaaataaaggaagcattaatcttaaaagaaaacatattacatataataatttgtcagagaaaacaagtaaacaaatggcattggaagaagatactgatgacgccgaaggctacctaaattctgggaactcaggagcattgaaaaaacatttttgtgatattaggcatttggatgattgggcaaaaagccagctgattgaaatgctcaaacaggcagcagccctggtgataactgtgatgtatactgatggttccacccagctaggagctgaccagacccccgtttcttctgttagaggaattgtggtgttagtaaaacgccaagcagagggtggccatggctgtccagatgccccggcctgtggtcctgttctggagggctttgtgtcagatgatccatgcatctacattcaaatagagcactctgctatctgggaccaagaacaggaggcacatcaacaatttgcccggaacgtgctatttcaaacaatgaaatgtaaatgtcctgttatttgttttaatgctaaggattttgtgagaatagtgctgcagttttttggcaatgatggcagttggaagcatgttgctgattttatagggctagatcccagaattgctgcatggcttatagatcctagtgatgccacaccctcttttgaagatttagtagaaaaatactgtgaaaaatccattacagttaaagtgaacagcacatatggaaattcctcaagaaatattgtgaatcagaatgtacgtgagaacctgaagacactctacagacttacaatggacctttgctctaaactgaaggattatggtttatggcaactatttcgtactttggagcttcctctgataccaattttggcagtgatggaaagccatgccattcaggtgaacaaagaggagatggagaagacgtcagcacttcttggggctcgtctcaaggaattggagcaagaagctcattttgttgcaggagaacggtttcttataacgagcaataaccagcttcgagagatcctctttggcaagttaaagctgcacctgctgagtcaaaggaacagtctccccagaacggggttgcagaaatacccgtctacatcagaagcagtgttaaatgctctgcgagaccttcatccattacccaagataattttggaatacaggcaggttcacaagatcaagtcaacctttgtagatggattactagcttgcatgaaaaagggctccatttcctctacatggaatcagactggaactgtgactggaagactttcagccaagcatcctaatatccaaggtatctccaagcacccaattcagattactacacctaagaattttaaaggtaaagaagacaagattctcacgatctccccgagggccatgtttgtttcatccaaaggccacacctttctagcagcagacttttcacagattgaattgcgcattcttacacatttatctggagatccggaacttctgaagttattccaggaatctgaaagagatgatgtattttctactctgacttcacagtggaaggatgtgcccgtggaacaggtgacacacgcagacagagagcaaaccaagaaggtggtgtacgcggtggtctatggagcagggaaggagcggctggctgcttgccttggagttcctattcaggaagctgcccagtttttggagagttttttgcagaagtacaagaaaatcaaggacttcgcccgagcagctattgcccagtgtcaccagacaggctgtgtggtgtccatcatgggcagaaggagacccctgccaaggattcacgctcatgaccagcaactccgggcacaagcagagcgacaggcagtgaacttcgtggtgcaaggctccgctgctgacctctgcaagctggccatgatccatgtcttcactgcagtggctgcttcccacaccttgacggccaggctggtggcccagatccatgatgagctgctgtttgaagtggaagatccgcagatcccggagtgtgcagctctcgtcaggaggaccatggagtccttggaacaggtgcaggcattggagctgcagcttcaggtacccctcaaggtgagcctgagtgccggccgctcatggggacacctggtgccactgcaggaggcctggggccctccgccaggcccatgtcgcactgagtctcccagcaacagcctggctgcccctgggtcccctgccagcacccagcccccacccctgcatttttcgccttcattttgtctgtagccccaggcaacagtgggaggagagaactggtttccagcagtccattgtgtggccttccccaaggtcaccagctctgtacgccccaggacgcattaaccctttggggctggggtggcccgccatcccctggagtaaatgcctgtgcaaagccctcctcatccttgtctgagtgaattcttcctgtgagtgggaagtg

SEQ ID NO: 4806 - protein, 935 aa, Homo sapiens
MEREFYVYFLKDEDYLKDIVENLETQSKIKADFVKMENYEALVGFDLCNTPLSSVAQKIMSAMHSGDLVDSKTWGKSTETMEVINKSSVKYSVQLEDRKTQSPEKKDLKSLRSQTSRGSAKLSPQSFSVRLTDQLSADQKQKSISSLTLSSCLIPQYNQEASVLQKKGHKRKHFLMENINNENKGSINLKRKHITYNNLSEKTSKQMALEEDTDDAEGYLNSGNSGALKKHFCDIRHLDDWAKSQLIEMLKQAAALVITVMYTDGSTQLGADQTPVSSVRGIVVLVKRQAEGGHGCPDAPACGPVLEGFVSDDPCIYIQIEHSAIWDQEQEAHQQFARNVLFQTMKCKCPVICFNAKDFVRIVLQFFGNDGSWKHVADFIGLDPRIAAWLIDPSDATPSFEDLVEKYCEKSITVKVNSTYGNSSRNIVNQNVRENLKTLYRLTMDLCSKLKDYGLWQLFRTLELPLIPILAVMESHAIQVNKEEMEKTSALLGARLKELEQEAHFVAGERFLITSNNQLREILFGKLKLHLLSQRNSLPRTGLQKYPSTSEAVLNALRDLHPLPKIILEYRQVHKIKSTFVDGLLACMKKGSISSTWNQTGTVTGRLSAKHPNIQGISKHPIQITTPKNFKGKEDKILTISPRAMFVSSKGHTFLAADFSQIELRILTHLSGDPELLKLFQESERDDVFSTLTSQWKDVPVEQVTHADREQTKKVVYAVVYGAGKERLAACLGVPIQEAAQFLESFLQKYKKIKDFARAAIAQCHQTGCVVSIMGRRRPLPRIHAHDQQLRAQAERQAVNFVVQGSAADLCKLAMIHVFTAVAASHTLTARLVAQIHDELLFEVEDPQIPECAALVRRTMESLEQVQALELQLQVPLKVSLSAGRSWGHLVPLQEAWGPPPGPCRTESPSNSLAAPGSPASTQPPPLHFSPSFCL

SEQ ID NO: 4807 - DNA, 818 bp, Homo sapiens
tgacttacacatcataaatgactttcaaatgaaatttgaatttcaaaattctgtaaaagtggttgctcaaaagatgtatgatactattttaatcagtttaagagcaaaaatgtctaattgtatttaacaatggtatttgggcagccagaaaatattttaagcgttgctctaaaataatttgaagtagctcatctgttattacatcagatgcttcttgagtgcccaatttatacatggcctgtggtaaataccatgtgagctttgtaggaatacctttaagaatattcctcacctgttcgtaatatggaatgccaatctaaaaactacatgttttgggtggtctttatggaattttttagctataaccatcagaaaacaggcatacctagatgacagatgaaccttcttgatttttgaaacccattgaacaaaaatattttgccaattattgtgtttatgttatttaaaattttatgtaaaccttaattttgtagcagtaaattttgtttaagattttgctatcagctccctatcacctgagcaactttttttttgttgtatatgtttttttctattctatttcggaatagagaatttacttaaaatttttattttctccaaaaatgtggaaaatatgtcacctggtttcctggtttatggtagcatattctgtttaaattagtgtcacatatttagatgtgtggccagacgcttgatttattagttaatttttgagacagagtctaactgtgtcactcaggctggagttcatgagctgaggtctccagcgtgggcgacagagtgagactctatctcaa

SEQ ID NO: 4808 - protein, 32 aa, Homo sapiens [sequence omitted]

SEQ ID NO: 4809 - DNA, 2434 bp, Homo sapiens
gtcgccttgtgcgcttgcgcgcgtccaggcgctcccgtgaggcagtgcgaggcgcgcggggcacggagggcggtggcggcgggctcctgcgagaagcaagcggaacttcctgagcgtgcttaggtgtcacagctgggtgaccctccgaaggaaggttttgccgctggcgcgtctggtgtatcgcggccttggggccgcggatccctggggcttgccgctgcctctggggttcgcgcggccctggcgtcggggctgcctcagcgctggctgaaggccggcccgaagcacccttaattgtggccgcgcgcttccctgctgctcctgctgttctccgcgtcgcggtggtggactctggaggtggagccttgcccggcgagacgttgaggaggaatcattatagattctaaaaatatattttcccttctctgtggacttggtataaaacgtagctttttttctgcttggatttattttctaaaaatcaacaccgtaaacccatatcagatacaacaaaattggggtagttaaaaccatgagttgtggaaatgagtttgtggaaacattaaaaaaaattggttatcccaaagctgataatcttaatggagaagactttgactggttgtttgagggcgttgaagatgaatcgtttctgaagtggttttgtgggaatgtgaatgaacagaacgtgttgtctgaaagagaattggaagcttttagcattcttcagaaatcaggcaagcctattctagaaggggcggcattggatgaagctcttaaaacgtgtaaaacttctgatttgaagacacctagactggatgataaagagctggagaaattagaggatgaggttcaaactctactgaaattaaagaacctaaaaattcagcgacgtaataaatgtcaattgatggcttcagtaactagccacaaatctctgaggttaaatgctaaagaagaagaagccactaaaaagctgaagcagagtcaaggaattctaaatgcaatgatcactaagatcagtaatgaacttcaggctcttactgatgaagttacacaattgatgatgttcttcagacattctaatttaggtcaagggacaaatccactggtatttttatcgcaattttccttggaaaaatacctaagtcaggaagagcaaagcacagcagcattaactttgtataccaaaaaacagttctttcagggtatacatgaagtagttgaaagttcaaatgaagacaattttcaacttttagatatacagacaccatctatttgtgataatcaagaaatccttgaggagagacgactagagatggctagactgcagctcgcatacatttgtgctcaacatcagttaattcacttaaaagcaagtaattcgagcatgaagtcaagtataaaatgggcagaggagagtcttcacagcctaaccagcaaggctgtggacaaagaaaatttggatgctaaaatttctagcttgaccagtgagattatgaaacttgaaaaagaggtcactcaaataaaagacagaagtttacctgctgtggtaagagagaatgcccagttattgaatatgccagtggtaaagggagattttgatctgcagattgctaaacaagattattatacagcaagacaagagttagttttaaatcaattaataaaacaaaaggcatcatttgaacttctacagttatcatatgaaattgaattaagaaagcatcgggacatatatcgtcaacttgaaaatttggttcaagaacttagtcaaagtaacatgatgctctacaagcaattagaaatgttaacagatccatcagtttctcaacagataaatccaaggaataccattgatactaaggattattctactcataggctttaccaagttttggagggagagaataagaaaaaagaattgtttctaactcatggaaaccttgaggaagtggctgagaaattgaaacagaatatttctttagtacaagatcagttggcagtatctgctcaagaacattctttctttctgtccaaacggaataaggatgtggacatgctttgtgatactttgtatcaaggaggaaatcagcttttgcttagtgatcaggagttaacagagcagtttcataaagttgaatctcaactgaataagctaaatcatctcctcactgatattcttgctgatgtgaagacaaaaagaaaaactttggcaaataataaattacatcaaatggaaagagaattctatgtatattttttaaaagatgaagattatctgaaagatattgtggagaatttagaaactcaatcaaagattaaggctgttagtcttgaagattgaaaattactgaaaactgaatctttattacgtgtcctcttttatttattagaagactgtgtataataaacactactaaatttttaaaatttg

SEQ ID NO: 4810 - protein, 603 aa, Homo sapiens; identical to SEQ ID NO: 505

SEQ ID NO: 4811 - DNA, 1124 bp, Homo sapiens
ggtggttgtgaggaggcctgtctgcatctccttccggccccactggggtccaggggtgcccagaaaggagcttcccctgcctgcctgagtctgtccccccaggcttcatttcaaacaccgtggcacctccgagcaaggcgggccgtgtgtaaaagcttgcttccccagccagcactgcagggccctgaggtggtcgtgtccctgccctcaattcttgaagcaccagctccctgccccaccctccagtgcctgaggcagctaggggcttctgctctcatctctgaccagcagaatccacccggtgaccagtggtggcccctcagcccaccctcccggcagctcagcctgtggctcttgaggccgtggttcccacgtggactgggaggcagtctcagccacccggggtgctgttcagctgcccctccctgccatcagcaggggcccaggctgccatcactggaggctgcagggaccaagaggccatcaccgtgtctatagagagcagacagaagcagaacagagcccggggctcctgagcctctgcgtgtgccctcccagcccacaccagtgctctcggccactgagcacccagactcaggcttgggttccccagccttattggaaggcagctcccgcataccaggataacccccgcaaaccacatagcagacccccgccatcctcgcagagtgggagaggctgcagcaaggctttgcctctgcagaccccatcttagtggcacggtgcttgggcctgtgtccccgggtggtggaaccctgtaccggtctgtggccctagggtccctgctctgtctgccccggcccgtgctgtccgctgggtgaggcaggctcccccgtgccctgcctccctctgtcagggaacctgggaccccctccccactgcctgcacagaggaccctgaccctcggccagcagggtggccccaggtccatgttgggcactagggcaggttccgtgccagagtcgggggccacacgagggcctggtgccggtgaggggggcgtgcgctagagggggaaaggggcccccggccacctgtccaccgtgtgggccgtgctgtgtccttatgtcattgtaatataaatacagatttttatatctcac

SEQ ID NO: 4812 - protein, 165 aa, Homo sapiens
GGCEEACLHLLPAPLGSRGAQKGASPACLSLSPQASFQTPWHLRARRAVCKSLLPQPALQGPEVVVSLPSILEAPAPCPTLQCLRQLGASALISDQQNPPGDQWWPLSPPSRQLSLWLLRPWFPRGLGGSLSHPGCCSAAPPCHQQGPRLPSLEAAGTKRPSPCL

SEQ ID NO: 4813 - DNA, 1518 bp, Homo sapiens
gccagggcttcctggaggcgatgcagccaggcccctgtgggtggcacggaggggctgtgacctggtccccagtgttgccctccccagtggctggcaggggcctgcttgctcactagagagatggattctcacctgtcacctgactcgagccccctgcttcctggcctaggcgagggttccaggtttcagacactggcagccaatgaagactgtgctcgctgggtggtgcaggcctggcaccaggaggcttgcacccgcctttccttcctgacgtcctctgtccttggggctggcccatagcagtgcctgccgtgcctctggtacatctgtagccaattcccatatcatggggaaaattcgtgtctattttcagtcgtacgcatagacgccccaggatggggggcccactgtggcggaagggggtccctggaaacaactctggcacagaacctgccctgcaggctgtagggggcatggtgcctggagctgaggggcatccgaacgcgttgcgggtggttgtgaggaggcctgtctgcatctccttccggccccactggggtccaggggtgcagctaggggcttctgctctcatctctgaccagcagaatccacccggtgaccagtggtggcccctcagcccaccctcccggcagctcagcctgtggctcttgaggccgtggttcccacgtggactgggaggcagtctcagccacccggggtgctgttcagctgcccctccctgccatcagcaggtgggtgaggggttgcccactgggtgggggcccgtgctaggagtcaccacatgctccaacctcccactgctccctgtcaggggcccaggctgccatcactggaggctgcagggaccaagaggccatcaccgtgtctatagagagcagacagaagcagaacagagcccggggctcctgagcctctgcgtgtgccctcccagcccacaccagtgctctcggccactgagcacccagactcaggcttgggttccccagccttattggaaggcagctcccgcataccaggataacccccgcaaaccacatagcagacccccgccatcctcgcagagtgggagaggctgcagcaaggctttgcctctgcagaccccatcttagtggcacggtgcttgggcctgtgtccccgggtggtggaaccctgtaccggtctgtggccctagggtccctgctctgtctgccccggcccgtgctgtccgctgggtgaggcaggctcccccgtgccctgcctccctctgtcagggaacctgggaccccctccccactgcctgcacagaggaccctgaccctcggccagcagggtggccccaggtccatgttgggcactagggcaggttccgtgccagagtcgggggccacacgagggcctggtgccggtgaggggggcgtgcgctagagggggaaaggggcccccggccacctgtccaccgtgtgggccgtgctgtgtccttatgtcattgtaatataaatacagatttttatatctcac

SEQ ID NO: 4814 - protein, 244 aa, Homo sapiens
MGGPLWRKGVPGNNSGTEPALQAVGGMVPGAEGHPNALRVVVRRPVCISFRPHWGPGVQLGASALISDQQNPPGDQWWPLSPPSRQLSLWLLRPWFPRGLGGSLSHPGCCSAAPPCHQQVGEGLPTGWGPVLGVTTCSNLPLLPVRGPGCHHWRLQGPRGHHRVYREQTEAEQSPGLLSLCVCPPSPHQCSRPLSTQTQAWVPQPYWKAAPAYQDNPRKPHSRPPPSSQSGRGCSKALPLQTPS

SEQ ID NO: 4815 - DNA, 1452 bp, Homo sapiens
ggctcctggcgtggacaaggggtctgtgaagggcgggaactgggtgagcacctggggcaggtgggtggttaaggtccttcccacttcgcaggtgtcagaacctagggctgggctctcggggccaggcaggccagcccagcccacgccgagctgggcagcgtctgctctggtaggactgtcagacgcacacgcgcacgcacctagacacacccactcatgtacatgctcacacatgcagacacacctgggcgtcccgaggtcacatgttctggggatgatggccttcaggggtcatctggcaaacagcccctgggctgtgcctggatccccctctagctcctgctcacccacgcccacccagtagtcctgcctgtctgcacaggagaggggcttctcttcctggctggggctggggtgaactggaggctggttaagttgcagccgctgggtcctcgggggcttactcatctcccttttttaaacaaaaagcaaaaaagtaaaatgctgcactgcccagcagcccggttagggctcctggagccaccttaggaaagggcttctcatgagctctgctgcggcagcttcagctggcagagaggctttcccagaaaaaaaaaaaaaaccatttttaaaaagaagaaagcctaaagactctcggcctagggacgtccgtgtgtgccgcctctgtttcctgtaccagatttttgtattctattttcctagctgttgttgcgtccttgtttgctgaggggtgggagccacccagcgtctcagggacctgtccctccgtcacgtcgtcaaagtgtgccttgtgtcttgtgtcaggccttgcccttcccaccagcatgtccctcgggctcctgagcctctgcgtgtgccctcccagcccacaccagtgctctcggccactgagcacccagactcaggcttgggttccccagccttattggaaggcagctcccgcataccaggataacccccgcaaaccacatagcagacccccgccatcctcgcagagtgggagaggctgcagcaaggctttgcctctgcagaccccatcttagtggcacggtgcttgggcctgtgtccccgggtggtggaaccctgtaccggtctgtggccctagggtccctgctctgtctgccccggcccgtgctgtccgctgggtgaggcaggctcccccgtgccctgcctccctctgtcagggaacctgggaccccctccccactgcctgcacagaggaccctgaccctcggccagcagggtggccccaggtccatgttgggcactagggcaggttccgtgccagagtcgggggccacacgagggcctggtgccggtgaggggggcgtgcgctagagggggaaaggggcccccggccacctgtccaccgtgtgggccgtgctgtgtccttatgtcattgtaatataaatacagatttttatatctcac

SEQ ID NO: 4816 - protein, 72 aa, Homo sapiens
MSLGLLSLCVCPPSPHQCSRPLSTQTQAWVPQPYWKAAPAYQDNPRKPHSRPPPSSQSGRGCSKALPLQTPS

SEQ ID NO: 4817 - DNA, 6503 bp, Homo sapiens
ccagggcaggaatttctgtggcctccagccctggcgcccacactcttgggccaggtggacctgttactgggttttggacagtgcgtgtgtgtggtcagatggcttctgtttgtctctcgagaaaggtgttccgtgatttctaaagcggtctgttcacggacctcccctgcaccccaccccagagaccgcatcccaggcactcagaggctgagccacatcctccactgctccccgcgggcactaacattgccgatgagacttggataaggaggggaccttgttctccatttcctcacttgatctttcacccgacaccacgtacgtaagtcctgtccgcctgcgtcagggcacactcctccaccttctcatccctgatgactgcacaggacacttggctgtgccaccagcgttctttgtgatgaccctctggtttacacagggacttccggacagtcctgcgatgtgccttggtgagcgcagacctttgtggatctggggggatagttttgtaggaccaaggccctagaagtagagatgctggttggcggtcagtgataactgtatcgatggcccttcagacctgtgtccccttttgctctcccaccagcaaaccatcaacgacccctcgaagtggctggcgcaggagccatcccttctcatgtcagcctgtcggagggtgcaagttgtacctccttgtttgtgtgtgcatttcctggctcgggtgagatggagccgggcgttaggttaggttggccctcgtgtcctgcagcctgtttgtgtccttcgcccgttgtgacatcgaggcattctgcttttaatttttgatgtgtatgagctcaaaataccacaaatactaaccatttgtcttttatatgtattgcaaagatttttctacttgttctttgtctctcagctgtgtttttctttcttgtgcaaacgtgtctttctctgattgtcacagcaatgtctgtgtgtgtttttttttaagcgtagaaaacctggaaaatacagaaaagcacaaagctaaagaaataaaattgccgggtgcttcgcctggagacgcacgctccctgtgccttgtttgattctgtcgtctcttgtgtgcgtctgctcttttattttttaaacaaaattgggtcacttgtcacctatgtggttccgtattctaatttttcacttaacattcatgatgtgcatatgtaacacactaaaatgataatgaggttgttttggggtggtggaattcgggggtacttttaatttttttttattttttttcctttttgttgatttgcatttttaaattgttctacagaggtcatatagtgctgatgtaattacatggtgggatggaaagccatttgctagagtggaccagggaaggagacccctggcaacgtccccacttgcaaacctcgtcccagtggtggctgcagtacagtggcgacgcgccttgggaaaggacccctccctgagcagagagagcacgctttggcctcttgcctacacagttcctggggtggggggcggcagggcgctcactcctgttggcggtggggaggctgagcttccaggcactggggtagtcacagagcggcagcctgggacccctttccctgcacctgtgcatgggagacagcgtgggagacgttgaggatcttggccctgttcaggccacctccaggcagacctcccgactggtggggctgttaccgctgcacccagcagccccctccttcttcaggctcctcctctgtccagaggaaatggctgtccctgccgacgttactcccagggggacaagatttgctgggcttgggaacggcaggagcagacatgccaaggctggggtgctcagtgttggcaccacgtggggaaagtcacgtgtgtaggcatcagctgtggcagggcagttgggcggcaggttttcaaaagacaaaaaatattcctgccccttcacctggtcattccactcgtaaggatttacccaaatcaaagtgtcctatatttggaagcagcctctgcggcctgcacgggatgggtgagtccgtggttgaacatggcagtgacaaaacctccgggtgccctgcactgccaggcaggtgcacgtgggcctggccagggtcccaggccgagttgatgcctctgggtgagctgggctccccgcaccccgtgagctccaccagcctcccccgcagacaagcaggccagcagggaaggcggtgtttccacaggggcaggcctaggatgaagccagggcccctctcctgaggtgcccgatgaatgtgtcctggaggattgtggcatgtgagcaagtacccttgagtgtgaacaagcaagcaagcaccactggatgtcatggctccagttttgtggaaagtggattcatctgtggatacggggacagaatctggaatgaggcagtttccaaagggatatgaaacttgggttggaagggcctggtccctggccctcccttgacctaggctgatcatgtttccatggtcacaaaagtgacagagagcacgttgtgcacgatgaggtagagagacgtgaatcttgtctgggtccttccagatctcggtgcagcctgaaaggcaccctcgcctcaccccacccctccctgcatgtggactccagggtggggatgggggatgggggatggcaggggggcgagctggggctcctaggaaatgcctggcggtgacgcgctgaggctttgcaggccatggtgagctgggcgcttctgccaggtgtctgggggctgtgggtgttgggctcctcctgggggtgggggacgggggttcccaaccaggccaggaggggatccttagagagggaccctcagcacatgtgcagcagtggatggtgggggtgggtctgtgcagggccctggaaactgcctgctgccctcccccaccccagcctgatggttctgtctctggctctttcagacgagccaaactcaggctgtaccttgagcagctcaagcaactggtgcccctgggccccgacagcacccgccacaccacgctgagcctcctgaagcgggccaaggtgcacatcaagaaactggaggagcaggaccgccgggcactgagcatcaaggagcagctgcagcaggagcatcgtttcctgaagcggcgcctggagcagctgtcggtgcagagcgtggagcgcgtgcgcacagatagcacgggctctgctgtctccacggacgactcagagcaagaagtggacatagagggcatggagtttggccctggtgagctggacagtgttggcagcagcagtgacgcggacgaccactacagcctgcagagtggcaccggcggcgacagtggcttcgggccccactgccggcggctgggccgccccgccctctcgtaggcccgtgccctctgctccttggcctgcctgcccgccagccacgcgtgtcagccctccagttctccttcagttgacgccagcctctccacaggcccactgctgtgccattctggaagctccagctgctgctgggctgcctggcactgcccgcttgccggtcagggcctgccgagctgcctgccccttccagctgggcagagtcccctgcaaggaggcagggcccagcttccacatccggagccctggtcagcatagccgcccacggtctgttctcagattcctaatcattccagaagtattaaacgtcattgctgcaaacctcggcaggtgccgtgtgaggggcttaatgaccaccacagggagctcagaccccaaccctggatcccaggagaaaggagtggaccgaggaaggaaggaaggcaaggctgtctgtccatccgtccgtctgtccacctacctgtcagtccacataggctcctggcgtggacaaggggtctgtgaagggcgggaactgggtgagcacctggggcaggtgggtggttaaggtccttcccacttcgcaggtgtcagaacctagggctgggctctcggggccaggcaggccagcccagcccacgccgagctgggcagcgtctgctctggtaggactgtcagacgcacacgcgcacgcacctagacacacccactcatgtacatgctcacacatgcagacacacctgggcgtcccgaggtcacatgttctggggatgatggccttcaggggtcatctggcaaacagcccctgggctgtgcctggatccccctctagctcctgctcacccacgcccacccagtagtcctgcctgtctgcacaggagaggggcttctcttcctggctggggctggggtgaactggaggctggttaagttgcagccgctgggtcctcgggggcttactcatctcccttttttaaacaaaaagcaaaaaagtaaaatgctgcactgcccagcagcccggttagggctcctggagccaccttaggaaagggcttctcatgagctctgctgcggcagcttcagctggcagagaggctttcccagaaaaaaaaaaaaaaccatttttaaaaagaagaaagcctaaagactctcggcctagggacgtccgtgtgtgccgcctctgtttcctgtaccagatttttgtattctattttcctagctgttgttgcgtccttgtttgctgaggggtgggagccacccagcgtctcagggacctgtccctccgtcacgtcgtcaaagtgtgccttgtgtcttgtgtcaggccttgcccttcccaccagcatgtccctcgtggctcagggtgccccaggcctgcccagctagtgctgtcctcccatctcctgtgggcagcccctcccggcagccagggcttcctggaggcgatgcagccaggcccctgtgggtggcacggaggggctgtgacctggtccccagtgttgccctccccagtggctggcaggggcctgcttgctcactagagagatggattctcacctgtcacctgactcgagccccctgcttcctggcctaggcgagggttccaggtttcagacactggcagccaatgaagactgtgctcgctgggtggtgcaggcctggcaccaggaggcttgcacccgcctttccttcctgacgtcctctgtccttggggctggcccatagcagtgcctgccgtgcctctggtacatctgtagccaattcccatatcatggggaaaattcgtgtctattttcagtcgtacgcatagacgccccaggatggggggcccactgtggcggaagggggtccctggaaacaactctggcacagaacctgccctgcaggctgtagggggcatggtgcctggagctgaggggcatccgaacgcgttgcgggtggttgtgaggaggcctgtctgcatctccttccggccccactggggtccaggggtgcccagaaaggagcttcccctgcctgcctgagtctgtccccccaggcttcatttcaaacaccgtggcacctccgagcaaggcgggccgtgtgtaaaagcttgcttccccagccagcactgcagggccctgaggtggtcgtgtccctgccctcaattcttgaagcaccagctccctgccccaccctccagtgcctgaggcagctaggggcttctgctctcatctctgaccagcagaatccacccggtgaccagtggtggcccctcagcccaccctcccggcagctcagcctgtggctcttgaggccgtggttcccacgtggactgggaggcagtctcagccacccggggtgctgttcagctgcccctccctgccatcagcaggtgggtgaggggttgcccactgggtgggggcccgtgctaggagtcaccacatgctccaacctcccactgctccctgtcaggggcccaggctgccatcactggaggctgcagggaccaagaggccatcaccgtgtctatagagagcagacagaagcagaacagagcccggggctcctgagcctctgcgtgtgccctcccagcccacaccagtgctctcggccactgagcacccagactcaggcttgggttccccagccttattggaaggcagctcccgcataccaggataacccccgcaaaccacatagcagacccccgccatcctcgcagagtgggagaggctgcagcaaggctttgcctctgcagaccccatcttagtggcacggtgcttgggcctgtgtccccgggtggtggaaccctgtaccggtctgtggccctagggtccctgctctgtctgccccggcccgtgctgtccgctgggtgaggcaggctcccccgtgccctgcctccctctgtcagggaacctgggaccccctccccactgcctgcacagaggaccctgaccctcggccagcagggtggccccaggtccatgttgggcactagggcaggttccgtgccagagtcgggggccacacgagggcctggtgccggtgaggggggcgtgcgctagagggggaaaggggcccccggccacctgtccaccgtgtgggccgtgctgtgtccttatgtcattgtaatataaatacagatttttatatctcac

SEQ ID NO: 4818 - protein, 174 aa, Homo sapiens
MVGVGLCRALETACCPPPPQPDGSVSGSFRRAKLRLYLEQLKQLVPLGPDSTRHTTLSLLKRAKVHIKKLEEQDRRALSIKEQLQQEHRFLKRRLEQLSVQSVERVRTDSTGSAVSTDDSEQEVDIEGMEFGPGELDSVGSSSDADDHYSLQSGTGGDSGFGPHCRRLGRPALS

SEQ ID NO: 4819 - DNA, 3457 bp, Homo sapiens
gacttcgccagggagaaaacaaaggcggccggcctggtgcgcaaggccccgaacaacaggtcagacgagccaaactcaggctgtaccttgagcagctcaagcaactggtgcccctgggccccgacagcacccgccacaccacgctgagcctcctgaagcgggccaaggtgcacatcaagaaactggaggagcaggaccgccgggcactgagcatcaaggagcagctgcagcaggagcatcgtttcctgaagcggcgcctggagcagctgtcggtgcagagcgtggagcgcgtgcgcacagatagcacgggctctgctgtctccacggacgactcagagcaagaagtggacatagagggcatggagtttggccctggtgagctggacagtgttggcagcagcagtgacgcggacgaccactacagcctctccacaggcccactgctgtgccattctggaagctccagctgctgctgggctgcctggcactgcccgcttgccggtcagggcctgccgagctgcctgccccttccagctgggcagagtcccctgcaaggaggcagggcccagcttccacatccggagccctggtcagcatagccgcccacggtctgttctcagattcctaatcattccagaagtattaaacgtcattgctgcaaacctcggcaggtgccgtgtgaggggcttaatgaccaccacagggagctcagaccccaaccctggatcccaggagaaaggagtggaccgaggaaggaaggaaggcaaggctgtctgtccatccgtccgtctgtccacctacctgtcagtccacataggctcctggcgtggacaaggggtctgtgaagggcgggaactgggtgagcacctggggcaggtgggtggttaaggtccttcccacttcgcaggtgtcagaacctagggctgggctctcggggccaggcaggccagcccagcccacgccgagctgggcagcgtctgctctggtaggactgtcagacgcacacgcgcacgcacctagacacacccactcatgtacatgctcacacatgcagacacacctgggcgtcccgaggtcacatgttctggggatgatggccttcaggggtcatctggcaaacagcccctgggctgtgcctggatccccctctagctcctgctcacccacgcccacccagtagtcctgcctgtctgcacaggagaggggcttctcttcctggctggggctggggtgaactggaggctggttaagttgcagccgctgggtcctcgggggcttactcatctcccttttttaaacaaaaagcaaaaaagtaaaatgctgcactgcccagcagcccggttagggctcctggagccaccttaggaaagggcttctcatgagctctgctgcggcagcttcagctggcagagaggctttcccagaaaaaaaaaaaaaaccatttttaaaaagaagaaagcctaaagactctcggcctagggacgtccgtgtgtgccgcctctgtttcctgtaccagatttttgtattctattttcctagctgttgttgcgtccttgtttgctgaggggtgggagccacccagcgtctcagggacctgtccctccgtcacgtcgtcaaagtgtgccttgtgtcttgtgtcaggccttgcccttcccaccagcatgtccctcgtggctcagggtgccccaggcctgcccagctagtgctgtcctcccatctcctgtgggcagcccctcccggcagccagggcttcctggaggcgatgcagccaggcccctgtgggtggcacggaggggctgtgacctggtccccagtgttgccctccccagtggctggcaggggcctgcttgctcactagagagatggattctcacctgtcacctgactcgagccccctgcttcctggcctaggcgagggttccaggtttcagacactggcagccaatgaagactgtgctcgctgggtggtgcaggcctggcaccaggaggcttgcacccgcctttccttcctgacgtcctctgtccttggggctggcccatagcagtgcctgccgtgcctctggtacatctgtagccaattcccatatcatggggaaaattcgtgtctattttcagtcgtacgcatagacgccccaggatggggggcccactgtggcggaagggggtccctggaaacaactctggcacagaacctgccctgcaggctgtagggggcatggtgcctggagctgaggggcatccgaacgcgttgcgggtggttgtgaggaggcctgtctgcatctccttccggccccactggggtccaggggtgcccagaaaggagcttcccctgcctgcctgagtctgtccccccaggcttcatttcaaacaccgtggcacctccgagcaaggcgggccgtgtgtaaaagcttgcttccccagccagcactgcagggccctgaggtggtcgtgtccctgccctcaattcttgaagcaccagctccctgccccaccctccagtgcctgaggcagctaggggcttctgctctcatctctgaccagcagaatccacccggtgaccagtggtggcccctcagcccaccctcccggcagctcagcctgtggctcttgaggccgtggttcccacgtggactgggaggcagtctcagccacccggggtgctgttcagctgcccctccctgccatcagcaggtgggtgaggggttgcccactgggtgggggcccgtgctaggagtcaccacatgctccaacctcccactgctccctgtcaggggcccaggctgccatcactggaggctgcagggaccaagaggccatcaccgtgtctatagagagcagacagaagcagaacagagcccggggctcctgagcctctgcgtgtgccctcccagcccacaccagtgctctcggccactgagcacccagactcaggcttgggttccccagccttattggaaggcagctcccgcataccaggataacccccgcaaaccacatagcagacccccgccatcctcgcagagtgggagaggctgcagcaaggctttgcctctgcagaccccatcttagtggcacggtgcttgggcctgtgtccccgggtggtggaaccctgtaccggtctgtggccctagggtccctgctctgtctgccccggcccgtgctgtccgctgggtgaggcaggctcccccgtgccctgcctccctctgtcagggaacctgggaccccctccccactgcctgcacagaggaccctgaccctcggccagcagggtggccccaggtccatgttgggcactagggcaggttccgtgccagagtcgggggccacacgagggcctggtgccggtgaggggggcgtgcgctagagggggaaaggggcccccggccacctgtccaccgtgtgggccgtgctgtgtccttatgtcattgtaatataaatacagatttttatatctcac

SEQ ID NO: 4820 - protein, 79 aa, Homo sapiens
MEFGPGELDSVGSSSDADDHYSLSTGPLLCHSGSSSCCWAAWHCPLAGQGLPSCLPLPAGQSPLQGGRAQLPHPEPWSA

SEQ ID NO: 4821 - DNA, 3519 bp, Homo sapiens
cgcggagtctggaagtgcggcggccgggcgcgcggggtgggcggcgagcggagccggccggagcgggccgggcagcggccgccgccgtcccggggcggacgggcgcgggcgggaggatggagctgaactccctgctgatcctgctggaggcggccgagtacctggagcgcagggatcgagaggccgagcacggctacgcctcggtgctgcccttcgacggcgacttcgccagggagaaaacaaaggcggccggcctggtgcgcaaggccccgaacaacaggcctcctcagtgagcaagcccggcccccgctgccgcttctctccaaaccaagtccctgacccgtggagaactctggggcgtgagctggggctcccccagcatggagaatccaaagctgacaaccagcgtcctggccaaggctgcccgaacactgcctctatgctgagcgtttcacacatgcagccagttcatcttcaccccaggctcagagaggtcttcacacaacgatgccattctggaagctccagctgctgctgggctgcctggcactgcccgcttgccggtcagggcctgccgagctgcctgccccttccagctgggcagagtcccctgcaaggaggcagggcccagcttccacatccggagccctggtcagcatagccgcccacggtctgttctcagattcctaatcattccagaagtattaaacgtcattgctgcaaacctcggcaggtgccgtgtgaggggcttaatgaccaccacagggagctcagaccccaaccctggatcccaggagaaaggagtggaccgaggaaggaaggaaggcaaggctgtctgtccatccgtccgtctgtccacctacctgtcagtccacataggctcctggcgtggacaaggggtctgtgaagggcgggaactgggtgagcacctggggcaggtgggtggttaaggtccttcccacttcgcaggtgtcagaacctagggctgggctctcggggccaggcaggccagcccagcccacgccgagctgggcagcgtctgctctggtaggactgtcagacgcacacgcgcacgcacctagacacacccactcatgtacatgctcacacatgcagacacacctgggcgtcccgaggtcacatgttctggggatgatggccttcaggggtcatctggcaaacagcccctgggctgtgcctggatccccctctagctcctgctcacccacgcccacccagtagtcctgcctgtctgcacaggagaggggcttctcttcctggctggggctggggtgaactggaggctggttaagttgcagccgctgggtcctcgggggcttactcatctcccttttttaaacaaaaagcaaaaaagtaaaatgctgcactgcccagcagcccggttagggctcctggagccaccttaggaaagggcttctcatgagctctgctgcggcagcttcagctggcagagaggctttcccagaaaaaaaaaaaaaaccatttttaaaaagaagaaagcctaaagactctcggcctagggacgtccgtgtgtgccgcctctgtttcctgtaccagatttttgtattctattttcctagctgttgttgcgtccttgtttgctgaggggtgggagccacccagcgtctcagggacctgtccctccgtcacgtcgtcaaagtgtgccttgtgtcttgtgtcaggccttgcccttcccaccagcatgtccctcgtggctcagggtgccccaggcctgcccagctagtgctgtcctcccatctcctgtgggcagcccctcccggcagccagggcttcctggaggcgatgcagccaggcccctgtgggtggcacggaggggctgtgacctggtccccagtgttgccctccccagtggctggcaggggcctgcttgctcactagagagatggattctcacctgtcacctgactcgagccccctgcttcctggcctaggcgagggttccaggtttcagacactggcagccaatgaagactgtgctcgctgggtggtgcaggcctggcaccaggaggcttgcacccgcctttccttcctgacgtcctctgtccttggggctggcccatagcagtgcctgccgtgcctctggtacatctgtagccaattcccatatcatggggaaaattcgtgtctattttcagtcgtacgcatagacgccccaggatggggggcccactgtggcggaagggggtccctggaaacaactctggcacagaacctgccctgcaggctgtagggggcatggtgcctggagctgaggggcatccgaacgcgttgcgggtggttgtgaggaggcctgtctgcatctccttccggccccactggggtccaggggtgcccagaaaggagcttcccctgcctgcctgagtctgtccccccaggcttcatttcaaacaccgtggcacctccgagcaaggcgggccgtgtgtaaaagcttgcttccccagccagcactgcagggccctgaggtggtcgtgtccctgccctcaattcttgaagcaccagctccctgccccaccctccagtgcctgaggcagctaggggcttctgctctcatctctgaccagcagaatccacccggtgaccagtggtggcccctcagcccaccctcccggcagctcagcctgtggctcttgaggccgtggttcccacgtggactgggaggcagtctcagccacccggggtgctgttcagctgcccctccctgccatcagcaggtgggtgaggggttgcccactgggtgggggcccgtgctaggagtcaccacatgctccaacctcccactgctccctgtcaggggcccaggctgccatcactggaggctgcagggaccaagaggccatcaccgtgtctatagagagcagacagaagcagaacagagcccggggctcctgagcctctgcgtgtgccctcccagcccacaccagtgctctcggccactgagcacccagactcaggcttgggttccccagccttattggaaggcagctcccgcataccaggataacccccgcaaaccacatagcagacccccgccatcctcgcagagtgggagaggctgcagcaaggctttgcctctgcagaccccatcttagtggcacggtgcttgggcctgtgtccccgggtggtggaaccctgtaccggtctgtggccctagggtccctgctctgtctgccccggcccgtgctgtccgctgggtgaggcaggctcccccgtgccctgcctccctctgtcagggaacctgggaccccctccccactgcctgcacagaggaccctgaccctcggccagcagggtggccccaggtccatgttgggcactagggcaggttccgtgccagagtcgggggccacacgagggcctggtgccggtgaggggggcgtgcgctagagggggaaaggggcccccggccacctgtccaccgtgtgggccgtgctgtgtccttatgtcattgtaatataaatacagatttttatatctcac

SEQ ID NO: 4822 - protein, 73 aa, Homo sapiens
MLSVSHMQPVHLHPRLREVFTQRCHSGSSSCCWAAWHCPLAGQGLPSCLPLPAGQSPLQGGRAQLPHPEPWSA

SEQ ID NO: 4823 - DNA, 4057 bp, Homo sapiens
atcccagcccagctctgcatctgtcaacattctcggcccggcccgaggcgctcgacccgtccccattggccccagcccggcccggcgcccgcccccggggcgcgaacgccgcctcccattggctctgcgggccgccgctctcccttatgtgtcaatttgagggcctgaggcggagggtggcggccgagcgccggagtccgcggagtctggaagtgcggcggccgggcgcgcggggtgggcggcgagcggagccggccggagcgggccgggcagcggccgccgccgtcccggggcggacgggcgcgggcgggaggatggagctgaactccctgctgatcctgctggaggcggccgagtacctggagcgcagggatcgagaggccgagcacggctacgcctcggtgctgcccttcgacggcgacttcgccagggagaaaacaaaggcggccggcctggtgcgcaaggccccgaacaacaggtcttcacacaacgagctagaaaagcacagacgagccaaactcaggctgtaccttgagcagctcaagcaactggtgcccctgggccccgacagcacccgccacaccacgctgagcctcctgaagcgggccaaggtgcacatcaagaaactggaggagcaggaccgccgggcactgagcatcaaggagcagctgcagcaggagcatcgtttcctgaagcggcgcctggagcagctgtcggtgcagagcgtggagcgcgtgcgcacagatagcacgggctctgctgtctccacggacgactcagagcaagaagtggacatagagggcatggagtttggccctggtgagctggacagtgttggcagcagcagtgacgcggacgaccactacagcctgcagagtggcaccggcggcgacagtggcttcgggccccactgccggcggctgggccgccccgccctctcgtaggcccgtgccctctgctccttggcctgcctgcccgccagccacgcgtgtcagccctccagttctccttcagttgacgccagcctctccacaggcccactgctgtgccattctggaagctccagctgctgctgggctgcctggcactgcccgcttgccggtcagggcctgccgagctgcctgccccttccagctgggcagagtcccctgcaaggaggcagggcccagcttccacatccggagccctggtcagcatagccgcccacggtctgttctcagattcctaatcattccagaagtattaaacgtcattgctgcaaacctcggcaggtgccgtgtgaggggcttaatgaccaccacagggagctcagaccccaaccctggatcccaggagaaaggagtggaccgaggaaggaaggaaggcaaggctgtctgtccatccgtccgtctgtccacctacctgtcagtccacataggctcctggcgtggacaaggggtctgtgaagggcgggaactgggtgagcacctggggcaggtgggtggttaaggtccttcccacttcgcaggtgtcagaacctagggctgggctctcggggccaggcaggccagcccagcccacgccgagctgggcagcgtctgctctggtaggactgtcagacgcacacgcgcacgcacctagacacacccactcatgtacatgctcacacatgcagacacacctgggcgtcccgaggtcacatgttctggggatgatggccttcaggggtcatctggcaaacagcccctgggctgtgcctggatccccctctagctcctgctcacccacgcccacccagtagtcctgcctgtctgcacaggagaggggcttctcttcctggctggggctggggtgaactggaggctggttaagttgcagccgctgggtcctcgggggcttactcatctcccttttttaaacaaaaagcaaaaaagtaaaatgctgcactgcccagcagcccggttagggctcctggagccaccttaggaaagggcttctcatgagctctgctgcggcagcttcagctggcagagaggctttcccagaaaaaaaaaaaaaaccatttttaaaaagaagaaagcctaaagactctcggcctagggacgtccgtgtgtgccgcctctgtttcctgtaccagatttttgtattctattttcctagctgttgttgcgtccttgtttgctgaggggtgggagccacccagcgtctcagggacctgtccctccgtcacgtcgtcaaagtgtgccttgtgtcttgtgtcaggccttgcccttcccaccagcatgtccctcgtggctcagggtgccccaggcctgcccagctagtgctgtcctcccatctcctgtgggcagcccctcccggcagccagggcttcctggaggcgatgcagccaggcccctgtgggtggcacggaggggctgtgacctggtccccagtgttgccctccccagtggctggcaggggcctgcttgctcactagagagatggattctcacctgtcacctgactcgagccccctgcttcctggcctaggcgagggttccaggtttcagacactggcagccaatgaagactgtgctcgctgggtggtgcaggcctggcaccaggaggcttgcacccgcctttccttcctgacgtcctctgtccttggggctggcccatagcagtgcctgccgtgcctctggtacatctgtagccaattcccatatcatggggaaaattcgtgtctattttcagtcgtacgcatagacgccccaggatggggggcccactgtggcggaagggggtccctggaaacaactctggcacagaacctgccctgcaggctgtagggggcatggtgcctggagctgaggggcatccgaacgcgttgcgggtggttgtgaggaggcctgtctgcatctccttccggccccactggggtccaggggtgcccagaaaggagcttcccctgcctgcctgagtctgtccccccaggcttcatttcaaacaccgtggcacctccgagcaaggcgggccgtgtgtaaaagcttgcttccccagccagcactgcagggccctgaggtggtcgtgtccctgccctcaattcttgaagcaccagctccctgccccaccctccagtgcctgaggcagctaggggcttctgctctcatctctgaccagcagaatccacccggtgaccagtggtggcccctcagcccaccctcccggcagctcagcctgtggctcttgaggccgtggttcccacgtggactgggaggcagtctcagccacccggggtgctgttcagctgcccctccctgccatcagcaggtgggtgaggggttgcccactgggtgggggcccgtgctaggagtcaccacatgctccaacctcccactgctccctgtcaggggcccaggctgccatcactggaggctgcagggaccaagaggccatcaccgtgtctatagagagcagacagaagcagaacagagcccggggctcctgagcctctgcgtgtgccctcccagcccacaccagtgctctcggccactgagcacccagactcaggcttgggttccccagccttattggaaggcagctcccgcataccaggataacccccgcaaaccacatagcagacccccgccatcctcgcagagtgggagaggctgcagcaaggctttgcctctgcagaccccatcttagtggcacggtgcttgggcctgtgtccccgggtggtggaaccctgtaccggtctgtggccctagggtccctgctctgtctgccccggcccgtgctgtccgctgggtgaggcaggctcccccgtgccctgcctccctctgtcagggaacctgggaccccctccccactgcctgcacagaggaccctgaccctcggccagcagggtggccccaggtccatgttgggcactagggcaggttccgtgccagagtcgggggccacacgagggcctggtgccggtgaggggggcgtgcgctagagggggaaaggggcccccggccacctgtccaccgtgtgggccgtgctgtgtccttatgtcattgtaatataaatacagatttttatatctcac

SEQ ID NO: 4824 - protein, 265 aa, Homo sapiens
MCQFEGLRRRVAAERRSPRSLEVRRPGARGGRRAEPAGAGRAAAAAVPGRTGAGGRMELNSLLILLEAAEYLERRDREAEHGYASVLPFDGDFAREKTKAAGLVRKAPNNRSSHNELEKHRRAKLRLYLEQLKQLVPLGPDSTRHTTLSLLKRAKVHIKKLEEQDRRALSIKEQLQQEHRFLKRRLEQLSVQSVERVRTDSTGSAVSTDDSEQEVDIEGMEFGPGELDSVGSSSDADDHYSLQSGTGGDSGFGPHCRRLGRPALS

SEQ ID NO: 4825 - DNA, 1046 bp, Homo sapiens
ggctgtgacctggtccccagtgttgccctccccagtggctggcaggggcctgcttgctcactagagagatggattctcacctgtcacctgactcgagccccctgcttcctggcctaggcgagggttccaggtttcagacactggcagccaatgaagactgtgctcgctgggtggtgcaggcctggcaccaggaggcttgcacccgcctttccttcctgacgtcctctgtccttggggctggcccatagcagtgcctgccgtgcctctggtacatctgtagccaattcccatatcatggggaaaattcgtgtctattttcagtcgtacgcatagacgccccaggatggggggcccactgtggcggaagggggtccctggaaacaactctggcacagaacctgccctgcaggctgtagggggcatggtgcctggagctgaggggcatccgaacgcgttgcgggtggttgtgaggaggcctgtctgcatctccttccggccccactggggtccaggggtgcccagaaaggagcttcccctgcctgcctgagtctgtccccccaggcttcatttcaaacaccgtggcacctccgagcaaggcgggccgtgtgtaaaagcttgcttccccagccagcactgcagggccctgaggtggtcgtgtccctgccctcaattcttgaagcaccagctccctgccccaccctccagtgcctgaggcagctaggggcttctgctctcatctctgaccagcagaatccacccggtgaccagtggtggcccctcagcccaccctcccggcagctcagcctgtggctcttgaggccgtggttcccacgtggactgggaggcagtctcagccacccggggtgctgttcagctgcccctccctgccatcagcaggtgggtgaggggttgcccactgggtgggggcccgtgctaggagggggcgtgcgctagagggggaaaggggcccccggccacctgtccaccgtgtgggccgtgctgtgtccttatgtcattgtaatataaatacagatttttatatctca

SEQ ID NO: 4826 - protein, 67 aa, Homo sapiens
MGGPLWRKGVPGNNSGTEPALQAVGGMVPGAEGHPNALRVVVRRPVCISFRPHWGPGVPRKELPLPA

SEQ ID NO: 4827 - DNA, 1191 bp, Homo sapiens
ggctgtgacctggtccccagtgttgccctccccagtggctggcaggggcctgcttgctcactagagagatggattctcacctgtcacctgactcgagccccctgcttcctggcctaggcgagggttccaggtttcagacactggcagccaatgaagactgtgctcgctgggtggtgcaggcctggcaccaggaggcttgcacccgcctttccttcctgacgtcctctgtccttggggctggcccatagcagtgcctgccgtgcctctggtacatctgtagccaattcccatatcatggggaaaattcgtgtctattttcagtcgtacgcatagacgccccaggatggggggcccactgtggcggaagggggtccctggaaacaactctggcacagaacctgccctgcaggctgtagggggcatggtgcctggagctgaggggcatccgaacgcgttgcgggtggttgtgaggaggcctgtctgcatctccttccggccccactggggtccaggggtgcccagaaaggagcttcccctgcctgcctgagtctgtccccccaggcttcatttcaaacaccgtggcacctccgagcaaggcgggccgtgtgtaaaagcttgcttccccagccagcactgcagggccctgaggtggtcgtgtccctgccctcaattcttgaagcaccagctccctgccccaccctccagtgcctgaggcagctaggggcttctgctctcatctctgaccagcagaatccacccggtgaccagtggtggcccctcagcccaccctcccggcagctcagcctgtggctcttgaggccgtggttcccacgtggactgggaggcagtctcagccacccggggtgctgttcagctgcccctccctgccatcagcaggtgggtgaggggttgcccactgggtgggggcccgtgctaggagtcaccacatgctccaaccccctccccactgcctgcacagaggaccctgaccctcggccagcagggtggccccaggtccatgttgggcactagggcaggttccgtgccagagtcgggggccacacgagggcctggtgccggtgaggggggcgtgcgctagagggggaaaggggcccccggccacctgtccaccgtgtgggccgtgctgtgtccttatgtcattgtaatataaatacagatttttatatctca

SEQ ID NO: 4828 - protein, 67 aa, Homo sapiens; identical to SEQ ID NO: 4826

SEQ ID NO: 4829 - DNA, 1323 bp, Homo sapiens
ggctgtgacctggtccccagtgttgccctccccagtggctggcaggggcctgcttgctcactagagagatggattctcacctgtcacctgactcgagccccctgcttcctggcctaggcgagggttccaggtttcagacactggcagccaatgaagactgtgctcgctgggtggtgcaggcctggcaccaggaggcttgcacccgcctttccttcctgacgtcctctgtccttggggctggcccatagcagtgcctgccgtgcctctggtacatctgtagccaattcccatatcatggggaaaattcgtgtctattttcagtcgtacgcatagacgccccaggatggggggcccactgtggcggaagggggtccctggaaacaactctggcacagaacctgccctgcaggctgtagggggcatggtgcctggagctgaggggcatccgaacgcgttgcgggtggttgtgaggaggcctgtctgcatctccttccggccccactggggtccaggggtgcccagaaaggagcttcccctgcctgcctgagtctgtccccccaggcttcatttcaaacaccgtggcacctccgagcaaggcgggccgtgtgtaaaagcttgcttccccagccagcactgcagggccctgaggtggtcgtgtccctgccctcaattcttgaagcaccagctccctgccccaccctccagtgcctgaggcagctaggggcttctgctctcatctctgaccagcagaatccacccggtgaccagtggtggcccctcagcccaccctcccggcagctcagcctgtggctcttgaggccgtggttcccacgtggactgggaggcagtctcagccacccggggtgctgttcagctgcccctccctgccatcagcaggtgggtgaggggttgcccactgggtgggggcccgtgctaggagtcaccacatgctccaacctcccactgctccctgtcaggggcccaggctgccatcactggaggctgcagggaccaagaggccatcaccgtgtctatagagagcagacagaagcagaacagagcccggggctcctgagcctctgcgtgtgccctcccagcccacaccagtgctctcggccactgagcacccagactcaggcttgggttccccagccttattggaagggcaggttccgtgccagagtcgggggccacacgagggcctggtgccggtgaggggggcgtgcgctagagggggaaaggggcccccggccacctgtccaccgtgtgggccgtgctgtgtccttatgtcattgtaatataaatacagatttttatatctca

SEQ ID NO: 4830 - protein, 67 aa, Homo sapiens; identical to SEQ ID NO: 4826

SEQ ID NO: 4831 - DNA, 1266 bp, Homo sapiens
ggctgtgacctggtccccagtgttgccctccccagtggctggcaggggcctgcttgctcactagagagatggattctcacctgtcacctgactcgagccccctgcttcctggcctaggcgagggttccaggtttcagacactggcagccaatgaagactgtgctcgctgggtggtgcaggcctggcaccaggaggcttgcacccgcctttccttcctgacgtcctctgtccttggggctggcccatagcagtgcctgccgtgcctctggtacatctgtagccaattcccatatcatggggaaaattcgtgtctattttcagtcgtacgcatagacgccccaggatggggggcccactgtggcggaagggggtccctggaaacaactctggcacagaacctgccctgcaggctgtagggggcatggtgcctggagctgaggggcatccgaacgcgttgcgggtggttgtgaggaggcctgtctgcatctccttccggccccactggggtccaggggtgcccagaaaggagcttcccctgcctgcctgagtctgtccccccaggcttcatttcaaacaccgtggcacctccgagcaaggcgggccgtgtgtaaaagcttgcttccccagccagcactgcagggccctgaggtggtcgtgtccctgccctcaattcttgaagcaccagctccctgccccaccctccagtgcctgaggcagctaggggcttctgctctcatctctgaccagcagaatccacccggtgaccagtggtggcccctcagcccaccctcccggcagctcagcctgtggctcttgaggccgtggttcccacgtggactgggaggcagtctcagccacccggggtgctgttcagctgcccctccctgccatcagcaggtgggtgaggggttgcccactgggtgggggcccgtgctaggagtcaccacatgtctgtctgccccggcccgtgctgtccgctgggtgaggcaggctcccccgtgccctgcctccctctgtcagggaacctgggaccccctccccactgcctgcacagaggaccctgaccctcggccagcagggtggccccaggtccatgttgggcactagggcaggttccgtgccagagtcgggggccacacgagggcctggtgccggtgaggggggcgtgcgctagagggggaaaggggcccccggccacctgtccaccgtgtgggccgtgctgtgtccttatgtcattgtaatataaatacagatttttatatctca

SEQ ID NO: 4832 - protein, 38 aa, Homo sapiens
MSVCPGPCCPLGEAGSPVPCLPLSGNLGPPPHCLHRGP

SEQ ID NO: 4833 - DNA, 968 bp, Homo sapiens
tcctcgggggcttactcatctcccttttttaaacaaaaagcaaaaaagtaaaatgctgcactgcccagcagcccggttagggctcctggagccaccttaggaaagggcttctcatgagctctgctgcggcagcttcagctggcagagaggctttcccagaaaaaaaaaaaaaaccatttttaaaaagaagaaagcctaaagactctcggcctagggacgtccgtgtgtgccgcctctgtttcctgtaccagatttttgtattctattttcctagctgttgttgcgtccttgtttgctgaggggtgggagccacccagcgtctcagggacctgtccctccgtcacgtcgtcaaagtgtgccttgtgtcttgtgtcaggccttgcccttcccaccagcatgtccctcgtggctcagggtgccccaggcctgcccagctagtgctgtcctcccatctcctgtgggcagcccctcccggcagccagggcttcctggaggcgatgcagccaggcccctgtgggtggcacggaggggctgtgacctggtccccagtgttgccctccccagtggctggcaggggcctgcttgctcactagagagatggattctcacctgtcacctgactcgagccccctgcttcctggcctaggcgagggttccaggtttcagacactggcagccaatgaagactgtgctcgctgggtggtgcaggcctggcaccaggaggcttgcacccgcctttccttcctgacgtcctctgtccttggggctggcccatagcagtgcctgccgtgcctctggtacatctgtagccaattcccatatcatggggaaaattcgtgtctattttcagtcgtacgcatagacgccccaggatggggggcccactgggcccccggccacctgtccaccgtgtgggccgtgctgtgtccttatgtcattgtaatataaatacagatttttatatctca

SEQ ID NO: 4834 - protein, 31 aa, Homo sapiens
MGGPLGPRPPVHRVGRAVSLCHCNINTDFYI

SEQ ID NO: 4835 - DNA, 1182 bp, Homo sapiens
tcctcgggggcttactcatctcccttttttaaacaaaaagcaaaaaagtaaaatgctgcactgcccagcagcccggttagggctcctggagccaccttaggaaagggcttctcatgagctctgctgcggcagcttcagctggcagagaggctttcccagaaaaaaaaaaaaaaccatttttaaaaagaagaaagcctaaagactctcggcctagggacgtccgtgtgtgccgcctctgtttcctgtaccagatttttgtattctattttcctagctgttgttgcgtccttgtttgctgaggggtgggagccacccagcgtctcagggacctgtccctccgtcacgtcgtcaaagtgtgccttgtgtcttgtgtcaggccttgcccttcccaccagcatgtccctcgtggctcagggtgccccaggcctgcccagctagtgctgtcctcccatctcctgtgggcagcccctcccggcagccagggcttcctggaggcgatgcagccaggcccctgtgggtggcacggaggggctgtgacctggtccccagtgttgccctccccagtggctggcaggggcctgcttgctcactagagagatggattctcacctgtcacctgactcgagccccctgcttcctggcctaggcgagggttccaggtttcagacactggcagccaatgaagactgtgctcgctgggtggtgcaggcctggcaccaggaggcttgcacccgcctttccttcctgacgtcctctgtccttggggctggcccatagcagtgcctgccgtgcctctggtacatctgtagccaattcccatatcatggggaaaattcgtgtctattttcagtcgtacgcatagacgccccaggatggggggcccactgtggcggaagggggtccctggaaacaactctggcacagaacctgccctgcaggctgtagggggcatggtgcctggagctgaggggcatccgaacgcgttgcgggtggttgtgaggaggcctgtctgcatctccttccggccccactggggtccaggggtgcccagaaaggagcttcccctgcctgcctgagtctgtccccccaggcttcatttcaaacaccgtggcacctccgagcaaggcgggccgtgtctgtgtccttatgtcattgtaatataaatacagatttttatatctc

SEQ ID NO: 4836 - protein, 67 aa, Homo sapiens; identical to SEQ ID NO: 4826

SEQ ID NO: 4837 - DNA, 1055 bp, Homo sapiens
gaaagcctctctgccagctgaagctgccgcagcagagctcatgagaagccctttcctaaggtggctccaggagccctaaccgggctgctgggcagtgcagcattttacttttttgctttttgtttaaaaaagggagatgagtaagcccccgaggacccagcggctgcaacttaaccagcctccagttcaccccagccccagccaggaagagaagcccctctcctgtgcagacaggcaggactactgggtgggcgtgggtgagcaggagctagagggggatccaggcacagcccaggggctgtttgccagatgacccctgaaggccatcatccccagaacatgtgacctcgggacgcccaggtgtgtctgcatgtgtgagcatgtacatgagtgggtgtgtctaggtgcgtgcgcgtgtgcgtctgacagtcctaccagagcagacgctgcccagctcggcgtgggctgggctggcctgcctggccccgagagcccagccctaggttctgacacctgcgaagtgggaaggaccttaaccacccacctgccccaggtgctcacccagttcccgcccttcacagaccccttgtccacgccaggagcctatgtggactgacaggtaggtggacagacggacggatggacagacagccttgccttccttccttcctcggtccactcctttctcctgggatccagggttggggtctgagctccctgtggtggtcattaagcccctcacacggcacctgccgaggtttgcagcaatgacgtttaatacttctggaatgattaggaatctgagaacagaccgtgggcggctatgctgaccagggctccggatgtggaagctgggccctgcctccttgcaggggactctgcccagctggaaggggcaggcagctcggcaggccctgaccggcaagcgggcagtgccaggcagcccagcagcagctggagcttccagaatgcgctacctcgatccctgcgctccaggtactcggccgcctccagcaggatcagcagggagttcagctccatcctcccgcccgcgc

SEQ ID NO: 4838 - protein, 76 aa, Homo sapiens
MLTRAPDVEAGPCLLAGDSAQLEGAGSSAGPDRQAGSARQPSSSWSFQNALPRSLRSRYSAASSRISREFSSILPP

SEQ ID NO: 4839 - DNA, 1029 bp, Homo sapiens
ctaggaaatgcctggcggtgacgcgctgaggctttgcaggccatggtgagctgggcgcttctgccaggtgtctgggggctgtgggtgttgggctcctcctgggggtgggggacgggggttcccaaccaggccaggaggggatccttagagagggaccctcagcacatgtgcagcagtggatggtgggggtgggtctgtgcagggccctggaaactgcctgctgccctcccccaccccagcctgatggttctgtctctggctctttcagacgagccaaactcaggctgtaccttgagcagctcaagcaactggtgcccctgggccccgacagcacccgccacaccacgctgagcctcctgaagcgggccaaggtgcacatcaagaaactggaggagcaggaccgccgggcactgagcatcaaggagcagctgcagcaggagcatcgtttcctgaagcggcgcctggagcagctgtcggtgcagagcgtggagcgcgtgcgcacagatagcacgggctctgctgtctccacggacgactcagagcaagaagtggacatagagggcatggagtttggccctggtgagctggacagtgttggcagcagcagtgacgcggacgaccactacagcctgcagagtggcaccggcggcgacagtggcttcgggccccactgccggcggctgggccgccccgccctctcgtaggcccgtgccctctgctccttggcctgcctgcccgccagccacgcgtgtcagccctccagttctccttcagttgacgccagcctctccacaggcccactgctgtgccattctggaagctccagctgctgctgggctgcctggcactgcccgcttgccggtcagggcctgccgagctgcctgccccttccagctgggcagagtcccctgcaaggaggcagggcccagcttccacatccggagccctggtcagcatagccgcccacggtctgttctcagattcctaatcattccagaagtattaaacgtcattgctgcaaacctcggc

SEQ ID NO: 4840 - protein, 174 aa, Homo sapiens; identical to SEQ ID NO: 4818

SEQ ID NO: 4841 - DNA, 1269 bp, Homo sapiens
atcccagcccagctctgcatctgtcaacattctcggcccggcccgaggcgctcgacccgtccccattggccccagcccggcccggcgcccgcccccggggcgcgaacgccgcctcccattggctctgcgggccgccgctctcccttatgtgtcaatttgagggcctgaggcggagggtggcggccgagcgccggagtccgcggagtctggaagtgcggcggccgggcgcgcggggtgggcggcgagcggagccggccggagcgggccgggcagcggccgccgccgtcccggggcggacgggcgcgggcgggaggatggagctgaactccctgctgatcctgctggaggcggccgagtacctggagcgcagggatcgagaggccgagcacggctacgcctcggtgctgcccttcgacggcgacttcgccagggagaaaacaaaggcggccggcctggtgcgcaaggccccgaacaacaggtcttcacacaacgagctagaaaagcacagacgagccaaactcaggctgtaccttgagcagctcaagcaactggtgcccctgggccccgacagcacccgccacaccacgctgagcctcctgaagcgggccaaggtgcacatcaagaaactggaggagcaggaccgccgggcactgagcatcaaggagcagctgcagcaggagcatcgtttcctgaagcggcgcctggagcagctgtcggtgcagagcgtggagcgcgtgcgcacagatagcacgggctctgctgtctccacggacgactcagagcaagaagtggacatagagggcatggagtttggccctggtgagctggacagtgttggcagcagcagtgacgcggacgaccactacagcctgcagagtggcaccggcggcgacagtggcttcgggccccactgccggcggctgggccgccccgccctctcgtaggcccgtgccctctgctccttggcctgcctgcccgccagccacgcgtgtcagccctccagttctccttcagttgacgccagcctctccacaggcccactgctgtgccattctggaagctccagctgctgctgggctgcctggcactgcccgcttgccggtcagggcctgccgagctgcctgccccttccagctgggcagagtcccctgcaaggaggcagggcccagcttccacatccggagccctggtcagcatagccgcccacggtctgttctcagattcctaatcattccagaagtattaaacgtcattgctgcaaacctcggc

SEQ ID NO: 4842 - protein, 265 aa, Homo sapiens; identical to SEQ ID NO: 4824

SEQ ID NO: 4843 - DNA, 663 bp, Homo sapiens
gacttcgccagggagaaaacaaaggcggccggcctggtgcgcaaggccccgaacaacaggtcagacgagccaaactcaggctgtaccttgagcagctcaagcaactggtgcccctgggccccgacagcacccgccacaccacgctgagcctcctgaagcgggccaaggtgcacatcaagaaactggaggagcaggaccgccgggcactgagcatcaaggagcagctgcagcaggagcatcgtttcctgaagcggcgcctggagcagctgtcggtgcagagcgtggagcgcgtgcgcacagatagcacgggctctgctgtctccacggacgactcagagcaagaagtggacatagagggcatggagtttggccctggtgagctggacagtgttggcagcagcagtgacgcggacgaccactacagcctctccacaggcccactgctgtgccattctggaagctccagctgctgctgggctgcctggcactgcccgcttgccggtcagggcctgccgagctgcctgccccttccagctgggcagagtcccctgcaaggaggcagggcccagcttccacatccggagccctggtcagcatagccgcccacggtctgttctcagattcctaatcattccagaagtattaaacgtcattgctgcaaac

SEQ ID NO: 4844 - protein, 79 aa, Homo sapiens; identical to SEQ ID NO: 4820

SEQ ID NO: 4845 - DNA, 1071 bp, Homo sapiens
actccctgctgatcctgctggaggcggccgagtacctggagcgcagggatcgagaggccgagcacggctacgcctcggtgctgcccttcgacggcgacttcgccagggagaaaacaaaggcggccggcctggtgcgcaaggccccgaacaacaggtcttcacacaacgagctagaaaagcacagagaccgcatcccaggcactcagaggctgagccacatcctccactgctccccgcgggcactaacattgccgatgagacttggataaggaggggaccttgttctccatttcctcacttgatctttcacccgacaccacgtacgtaagtcctgtccgcctgcgtcagggcacactcctccaccttctcatccctgatgactgcacaggacacttggctgtgccaccagcgttctttgtgatgaccctctggtttacacagggacttccggacagtcctgcgatgtgccttggtgagcgcagacctttgtggatctggggggatagttttgtaggaccaaggccctagaagtagagatgctggttggcggtcagtgataactgtatcgatggcccttcagacctgtgtccccttttgctctcccaccagcaaaccatcaacgacccctcgaagtggctggcgcaggagccatcccttctcatgtcagcctgtcggagggtgcaagttgtacctccttgtttgtgtgtgcatttcctggctcgggtgagatggagccgggcgttaggttaggttggccctcgtgtcctgcagcctgtttgtgtccttcgcccgttgtgacatcgaggcattctgcttttaatttttgatgtgtatgagctcaaaataccacaaatactaaccatttgtcttttatatgtattgcaaagatttttctacttgttctttgtctctcagctgtgtttttctttcttgtgcaaacgtgtctttctctgattgtcacagcaatgtctgtgtgtgtttttttttaagcgtagaaaacctggaaaatacagaaaagcacaaagctaaagaaataaaattgccgggtgcttcgcctggagacgcacgctc

SEQ ID NO: 4846 - protein, 64 aa, Homo sapiens
MYCKDFSTCSLSLSCVFLSCANVSFSDCHSNVCVCFFLSVENLENTEKHKAKEIKLPGASPGDA

SEQ ID NO: 4847 - DNA, 1296 bp, Homo sapiens
gcggccgccgccgtcccggggcggacgggcgcgggcgggaggatggagctgaactccctgctgatcctgctggaggcggccgagtacctggagcgcagggatcgagaggccgagcacggctacgcctcggtgctgcccttcgacggcgacttcgccagggagaaaacaaaggcggccggcctggtgcgcaaggccccgaacaacagcggcatcctgggaggcccgggagccctggctggcctgtggggtcctgcctggacacggaaggtggcctggagctgggagcgaggtccccctgcctcgttatcctccaggcagatgctgtggcacaccctgtggtgctgggaattgtgtgcccgcgtctgaatgggcaagacaggtcttcacacaacgagctagaaaagcacagagaccgcatcccaggcactcagaggctgagccacatcctccactgctccccgcgggcactaacattgccgatgagacttggataaggaggggaccttgttctccatttcctcacttgatctttcacccgacaccacgtacgtaagtcctgtccgcctgcgtcagggcacactcctccaccttctcatccctgatgactgcacaggacacttggctgtgccaccagcgttctttgtgatgaccctctggtttacacagggacttccggacagtcctgcgatgtgccttggtgagcgcagacctttgtggatctggggggatagttttgtaggaccaaggccctagaagtagagatgctggttggcggtcagtgataactgtatcgatggcccttcagacctgtgtccccttttgctctcccaccagcaaaccatcaacgacccctcgaagtggctggcgcaggagccatcccttctcatgtcagcctgtcggagggtgcaagttgtacctccttgtttgtgtgtgcatttcctggctcgggtgagatggagccgggcgttaggttaggttggccctcgtgtcctgcagcctgtttgtgtccttcgcccgttgtgacatcgaggcattctgcttttaatttttgatgtgtatgagctcaaaataccacaaatactaaccatttgtcttttatatgtattgcaaagatttttctacttgttctttgtctctcagctgtgtttttctttcttgtgcaaacgtgtctttctctgattgtcacagcaatgtctgtgtgtgtttttttttaagcgtagaaaacctggaaaatacagaaaagcacaaagctaaagaaataaaattgccgggtgcttcgcctggagacgcacgctc

SEQ ID NO: 4848 - protein, 107 aa, Homo sapiens
MELNSLLILLEAAEYLERRDREAEHGYASVLPFDGDFAREKTKAAGLVRKAPNNSGILGGPGALAGLWGPAWTRKVAWSWERGPPASLSSRQMLWHTLWCWELCARV

SEQ ID NO: 4849 - DNA, 5376 bp, Homo sapiens
catgtggtttttatgaggttcacaggcccccagacagccaggacctaaaagtggtttttaatggcagtaatgccacatgtggcaatagcctgtcatcttcatcttcatctcccaatcaggaaactgaggcaccgagaggaaggtgcccttcaaggtggcgggaacagtctcccccaggcccccaccatgcggactccccagcctcctccccttgccgtgctcccgagcctgacctcagccccgacaccgccaccctctctattgtgccgtccccatcctgcccgcctcccctttctaggaatccctggggtgcggagtcttcatcccacgctgccccgtccctgtgtccaccctgcccaccccaccttctgagccacctggttggggtgtcctctgccgaggcttgggttagttacaggggcccgcgggcaggttctccctcctccccagcctcagtttccacctccgtggagtgggtcctggggcagtcatgagatggagcgtgttctgtgcccggctggcctggcaggggcatgcatgcacaggggtgggcacagctccttgtgtggtcctggtgccccaagctctgtgcccacctgcagcttgggcctgggcgatcagcgccgtctcattctgtcacctgggaaatggcttcttgtcctgcatcacttgatcatccctgaggggacagcaggtggattggttctatcctaaacctggcgaggccccggcctctagacaagcctccctgtgacaacaggtctaccagggcctggactcagcccctgtgccagagggcagcttggtgaaattcccagttgctgagcgcacgctggggagctgcctcgcagcacccagggcagacatgggtggatttgtgggtgcggaggagccctccttacctgcccaggagcccagggactctcacactgatgagtctgcgttccggggaaggttgcgtttctctggcagtgagcaacttgacaggtggtgtctgtggctccctagataggctggggacctcgggcccggatcagcccggctgcttcatccctgggagcacagacctgattgtggagcctggaagctccaagctccttgaacttcatccctgtggcctggacggggagcggaaaagagtcacatgaccagggttcctcctgcagggagcccccagacccaagggcctcagtccaccttcccctcccctcccctcccctgccctcccctcccctgcccttacctgccctgccatgccctgccctccctgctcctggggccctgtgaggaccccgtgggtcacattgggggacatcggttatcgccctcacgattgctctgaatgtaagaaaaacctcctgcggggaccgggaacacgagctggcctgtgctgtggggtgagaagaggggccccgaggtgcgcagtcaggttccccgggtcggcgacccctgagagcctggccctcacccgggcccctccctgagtgtgtcccctcccgcagtgcctggccgccggctccatcatcatgaaccgggagctggagagcatggccatgcgcccgctggccaaggagctgacgcgcagcctggaggacgtgcggggcgccctccgtgaccaggcgctgcgggacctgaacacctacacagagaagatgagggaagcgctgaggcacttcgacgtcctgttcgcagagtttgagctcagctacgtctcggccatggtgcctgtgaagtcccccagggagtactacgtgcagcaggaggtcatcgtgctcttctgcgagacggtggagagggccctggacttcgggtacctgactcaggacatgattgatgactacgagccggccctcatgttcagcatccccaggctggccatcgtgtgtggcctcgtggtctatgcggacggacctctgaacttggaccgcaaggtggaagacatgtccgagctgttccggcccttccacacgttgctgcggaaaataagggatttgctgcagacgctgacggaggaggagctgcacacgctggaacggaacctctgcatttcccaagacgtggagttccccatccgcgcagacgtgcagggacccgctgccctggcgcctgccctctctgcccctctcccccctgaggggccactctcagctaaggccaaagacccggatgcagagctggcctgctccatgcagtacgacgaccaggagctggagcagctcagccgcatggtccacagggcgggggacgagatgtcctctttgctttcaccgcccattgcctgccagtccccagctcacaggccaggagcggagggcagcccaggcggggaggcctctccaggtagaccgcgcctgcggtcaggcagtgacgaggaggagcgcgtgttcttcatggatgacgtggaggggacggcagaagccctggccaggcccgagtccccagctggcccatttgggtgggcaggcagtacctgggccgacccccaggagaaagggcagggtgggccaggcggagcggcggggatcagcttgcccgcctcggaaaaggaggaggacttgagcaacaacaatctcgaggccgagggcacagatggggccagcctcgcgggcaccagctcctgcagctgcctggactcgcggctgcacctggacggctgggaggtgggtgcggatgacgcagagacggctgagatgatcgcccaccggacagggggcatgaagctctcagccacggtcatcttcaaccccaaatcgcccacttccctggactctgcggtcgccacccaggaggccgcctcggagcccgtggccgaggggatggatggcggcccccacaagcttagcactggggccaccaactgccttctgcattcctgcgtgtgctgtgggagctgcggggacagcagggaggacgtggtggagcgtctgcgggagaagtgcagcccgggaggcgtcattggtgcctcgtacgctgccggcttagccaaggccagcgacagggcccctgagagacaggaggaggcgcccccaccctcagaagatgcctccaacgggcgggagcccaaagcccccacttccgacaagtgcctgcctcacacctcaggttcccaggtggacacagcgagtgggctgcaaggagaggctggggttgcaggtcagcaggagccagaggccagagagctgcatgctgggagcccctcggctcacgaggcgcctcaggccctgtcgggctccagcagctccacagctgggtcctgctcctcagacaagatggggccagaggcggccccagcagccacgcatgctgccccacaggccacaagagagaagatccggtccaggttccacggcagccacgacctcatccaccgcctgttcgtctgcatttcaggtgtggctgaccagctgcagacgaactatgccagtgacctgagaagtattcttaaaacactgtttgaggtcatggccaccaagcctgaaacagacgacaaggaaaagttaaggaaggtcacccagactctgcggagtgcggccttggaggactgtgcactgtgccaggagaccctgtcatcctctgaactggcagccaagacccgcgatggggactttgaagaccccccggagtgggtgccagacgaggcctgtggcttctgcacggcgtgcaaagcacccttcaccgtcatccgccggaagcaccactgccgcagctgtgggaagatcttctgctcgcgctgctcctcgcactcagcaccgctgccccgctacgggcaggtgaagccggtccgagtgtgcacccactgctacatgttccatgtcacgcccttctacagcgacaaggccggcctgtgacgtggtgccaggggcagccccaacccacccgggccaggaacccccaggaaggtggggccacgctgcaggcaggtctcactgcgtctcatgaggccgctgccgctgctgcaggggcacccagacctccagagcatccagagcctctgtcctgcccacgctagcctccctgcagggaccccgggccggctgcaggggccaacaagaggtcagctttgcccagcaggggacccggaggagcctggtggctgcctcagggcagggtgcctggcggagaaggcctgggccctcccactggtccctcggagatctgctggggctatgggaatcggggcgggtgatggaggtggacaagagtggggccactctgcgcctctgctgttgcggtgaatctggaagccggagcaagggccactccacaggctctttggcacagcagggctccctatgtgcctcccaaacgtcaaatgcaggctacccattctccccatcagctgcccacctcgttccccagccctcacccctcacccctcaccatccttcctcaggacttggctaaacaacatgcatctcatttcttcttggagtggggagatgcgggaagctgacccagtggtcctctaggcaggcagggtgctcctggtgtctgcccaccactgtccccttgctgatggcatgggggtccgaccaggcactgacaccgcaggcagaggttgctcggggccttgggtcgggtttaccaatcagccaggacgcccggggccaccagctcagctaccacttccccttccctctgcaccctctggaaccctggcccaattcctcagaccccagagtggcctgggacccaagctgccgcagctgagtggccccagcggacacctcctcaggcttaaatctcaggcttcacattgcaatgacgattgcagttttatttttggagatgacacacctactgcttcttttctaggataaatctaattactgtttactggtggagtacatatgcatagaaacggcttctgtcggggggagagtatataatggaggaaatattatgtattgagattatatttattttctaaatgctgtaatttgaagccatttccataaatctatttaaggattgcagacgctctcctttcttccatgaacgcggatcttttttctctgtctggaaagcgatggtgttggtgctaacatgcattgtcctctaagaagctggaggctcctggactcttgggacgactgaagggcgggacttggctcccaccagccctcaggagcagtggccaccccctgcttcctgcaagctccttcccaccttccagggctctgcccctgtgatgcccatccccccctgcccatctacctgcccagctcctcttctcacaggcatcttcagctcagccctctggcctgtggggggcagggttagtgctcatagccaccccgacttggggcctgccctgcctggtggccctggtcgtagggctgtgctaatcacgcctggagcggctgccttctggag

SEQ ID NO: 4850 - protein, 773 aa, Homo sapiens
MNRELESMAMRPLAKELTRSLEDVRGALRDQALRDLNTYTEKMREALRHFDVLFAEFELSYVSAMVPVKSPREYYVQQEVIVLFCETVERALDFGYLTQDMIDDYEPALMFSIPRLAIVCGLVVYADGPLNLDRKVEDMSELFRPFHTLLRKIRDLLQTLTEEELHTLERNLCISQDVEFPIRADVQGPAALAPALSAPLPPEGPLSAKAKDPDAELACSMQYDDQELEQLSRMVHRAGDEMSSLLSPPIACQSPAHRPGAEGSPGGEASPGRPRLRSGSDEEERVFFMDDVEGTAEALARPESPAGPFGWAGSTWADPQEKGQGGPGGAAGISLPASEKEEDLSNNNLEAEGTDGASLAGTSSCSCLDSRLHLDGWEVGADDAETAEMIAHRTGGMKLSATVIFNPKSPTSLDSAVATQEAASEPVAEGMDGGPHKLSTGATNCLLHSCVCCGSCGDSREDVVERLREKCSPGGVIGASYAAGLAKASDRAPERQEEAPPPSEDASNGREPKAPTSDKCLPHTSGSQVDTASGLQGEAGVAGQQEPEARELHAGSPSAHEAPQALSGSSSSTAGSCSSDKMGPEAAPAATHAAPQATREKIRSRFHGSHDLIHRLFVCISGVADQLQTNYASDLRSILKTLFEVMATKPETDDKEKLRKVTQTLRSAALEDCALCQETLSSSELAAKTRDGDFEDPPEWVPDEACGFCTACKAPFTVIRRKHHCRSCGKIFCSRCSSHSAPLPRYGQVKPVRVCTHCYMFHVTPFYSDKAGL

SEQ ID NO: 4851 - DNA, 4511 bp, Homo sapiens
accagcggagcgctgggtgtcagtgagcagcgaggagccgcgcgcccccgtgcccgcgtctgtccgtgcgcccgagcgcccactcccgggtctgaggtctgcccggcgcgccgcttgcagagcatactcagggccgcgcacctgccccgcgcacctgcccgccgcccgctcggcgctccgggcttcgctagccagcctccctgcgacagcgcgggggctccggccgtgcctccgcgtccgccccgcgcctcagccgggcccgggcgcagcgctgcggagggcgagggccgcccggagtccggccagggccggcgcggcgatgatgaacaggttccgaaagtggctctacaaacccaagaggtcggatccgcagctgcttgcccggttctactatgccgacgaggagctgaaccaggtggccgcggagctggacagcctggatgggcggaaggacccccagcggtgcacgctgctggtcagccagttccgctcctgtcaggacaatgtgttgaacatcattaaccagatcatggatgagtgcatcccccaggaccgcgcccccagagatttctgcgtcaagttccctgaggagatccggcacgacaacctggccggccagctgtggttcggtgccgagtgcctggccgccggctccatcatcatgaaccgggagctggagagcatggccatgcgcccgctggccaaggagctgacgcgcagcctggaggacgtgcggggcgccctccgtgaccaggcgctgcgggacctgaacacctacacagagaagatgagggaagcgctgaggcacttcgacgtcctgttcgcagagtttgagctcagctacgtctcggccatggtgcctgtgaagtcccccagggagtactacgtgcagcaggaggtcatcgtgctcttctgcgagacggtggagagggccctggacttcgggtacctgactcaggacatgattgatgactacgagccggccctcatgttcagcatccccaggctggccatcgtgtgtggcctcgtggtctatgcggacggacctctgaacttggaccgcaaggtggaagacatgtccgagctgttccggcccttccacacgttgctgcggaaaataagggatttgctgcagacgctgacggaggaggagctgcacacgctggaacggaacctctgcatttcccaagacgtggagttccccatccgcgcagacgtgcagggacccgctgccctggcgcctgccctctctgcccctctcccccctgaggggccactctcagctaaggccaaagacccggatgcagagctggcctgctccatgcagtacgacgaccaggagctggagcagctcagccgcatggtccacagggcgggggacgagatgtcctctttgctttcaccgcccattgcctgccagtccccagctcacaggccaggagcggagggcagcccaggcggggaggcctctccaggtagaccgcgcctgcggtcaggcagtgacgaggaggagcgcgtgttcttcatggatgacgtggaggggacggcagaagccctggccaggcccgagtccccagctggcccatttgggtgggcaggcagtacctgggccgacccccaggagaaagggcagggtgggccaggcggagcggcggggatcagcttgcccgcctcggaaaaggaggaggacttgagcaacaacaatctcgaggccgagggcacagatggggccagcctcgcgggcaccagctcctgcagctgcctggactcgcggctgcacctggacggctgggaggtgggtgcggatgacgcagagacggctgagatgatcgcccaccggacagggggcatgaagctctcagccacggtcatcttcaaccccaaatcgcccacttccctggactctgcggtcgccacccaggaggccgcctcggagcccgtggccgaggggatggatggcggcccccacaagcttagcactggggccaccaactgccttctgcattcctgcgtgtgctgtgggagctgcggggacagcagggaggacgtggtggagcgtctgcgggagaagtgcagcccgggaggcgtcattggtgcctcgtacgctgccggcttagccaaggccagcgacagggcccctgagagacaggaggaggcgcccccaccctcagaagatgcctccaacgggcgggagcccaaagcccccacttccgacaagtgcctgcctcacacctcaggttcccaggtggacacagcgagtgggctgcaaggagaggctggggttgcaggtcagcaggagccagaggccagagagctgcatgctgggagcccctcggctcacgaggcgcctcaggccctgtcgggctccagcagctccacagctgggtcctgctcctcagacaagatggggccagaggcggccccagcagccacgcatgctgccccacaggccacaagagagaagatccggtccaggttccacggcagccacgacctcatccaccgcctgttcgtctgcatttcaggtgtggctgaccagctgcagacgaactatgccagtgacctgagaagtattcttaaaacactgtttgaggtcatggccaccaagcctgaaacagacgacaaggaaaagttaaggaaggtcacccagactctgcggagtgcggccttggaggactgtgcactgtgccaggagaccctgtcatcctctgaactggcagccaagacccgcgatggggactttgaagaccccccggagtgggtgccagacgaggcctgtggcttctgcacggcgtgcaaagcacccttcaccgtcatccgccggaagcaccactgccgcagctgtgggaagatcttctgctcgcgctgctcctcgcactcagcaccgctgccccgctacgggcaggtgaagccggtccgagtgtgcacccactgctacatgttccatgtcacgcccttctacagcgacaaggccggcctgtgacgtggtgccaggggcagccccaacccacccgggccaggaacccccaggaaggtggggccacgctgcaggcaggtctcactgcgtctcatgaggccgctgccgctgctgcaggggcacccagacctccagagcatccagagcctctgtcctgcccacgctagcctccctgcagggaccccgggccggctgcaggggccaacaagaggtcagctttgcccagcaggggacccggaggagcctggtggctgcctcagggcagggtgcctggcggagaaggcctgggccctcccactggtccctcggagatctgctggggctatgggaatcggggcgggtgatggaggtggacaagagtggggccactctgcgcctctgctgttgcggtgaatctggaagccggagcaagggccactccacaggctctttggcacagcagggctccctatgtgcctcccaaacgtcaaatgcaggctacccattctccccatcagctgcccacctcgttccccagccctcacccctcacccctcaccatccttcctcaggacttggctaaacaacatgcatctcatttcttcttggagtggggagatgcgggaagctgacccagtggtcctctaggcaggcagggtgctcctggtgtctgcccaccactgtccccttgctgatggcatgggggtccgaccaggcactgacaccgcaggcagaggttgctcggggccttgggtcgggtttaccaatcagccaggacgcccggggccaccagctcagctaccacttccccttccctctgcaccctctggaaccctggcccaattcctcagaccccagagtggcctgggacccaagctgccgcagctgagtggccccagcggacacctcctcaggcttaaatctcaggcttcacattgcaatgacgattgcagttttatttttggagatgacacacctactgcttcttttctaggataaatctaattactgtttactggtggagtacatatgcatagaaacggcttctgtcggggggagagtatataatggaggaaatattatgtattgagattatatttattttctaaatgctgtaatttgaagccatttccataaatctatttaaggattgcagacgctctcctttcttccatgaacgcggatcttttttctctgtctggaaagcgatggtgttggtgctaacatgcattgtcctctaagaagctggaggctcctggactcttgggacgactgaagggcgggacttggctcccaccagccctcaggagcagtggccaccccctgcttcctgcaagctccttcccaccttccagggctctgcccctgtgatgcccatccccccctgcccatctacctgcccagctcctcttctcacaggcatcttcagctcagccctctggcctgtggggggcagggttagtgctcatagccaccccgacttggggcctgccctgcctggtggccctggtcgtagggctgtgctaatcacgcctggagcggctgccttctggag

SEQ ID NO: 4852 - protein, 887 aa, Homo sapiens
MMNRFRKWLYKPKRSDPQLLARFYYADEELNQVAAELDSLDGRKDPQRCTLLVSQFRSCQDNVLNIINQIMDECIPQDRAPRDFCVKFPEEIRHDNLAGQLWFGAECLAAGSIIMNRELESMAMRPLAKELTRSLEDVRGALRDQALRDLNTYTEKMREALRHFDVLFAEFELSYVSAMVPVKSPREYYVQQEVIVLFCETVERALDFGYLTQDMIDDYEPALMFSIPRLAIVCGLVVYADGPLNLDRKVEDMSELFRPFHTLLRKIRDLLQTLTEEELHTLERNLCISQDVEFPIRADVQGPAALAPALSAPLPPEGPLSAKAKDPDAELACSMQYDDQELEQLSRMVHRAGDEMSSLLSPPIACQSPAHRPGAEGSPGGEASPGRPRLRSGSDEEERVFFMDDVEGTAEALARPESPAGPFGWAGSTWADPQEKGQGGPGGAAGISLPASEKEEDLSNNNLEAEGTDGASLAGTSSCSCLDSRLHLDGWEVGADDAETAEMIAHRTGGMKLSATVIFNPKSPTSLDSAVATQEAASEPVAEGMDGGPHKLSTGATNCLLHSCVCCGSCGDSREDVVERLREKCSPGGVIGASYAAGLAKASDRAPERQEEAPPPSEDASNGREPKAPTSDKCLPHTSGSQVDTASGLQGEAGVAGQQEPEARELHAGSPSAHEAPQALSGSSSSTAGSCSSDKMGPEAAPAATHAAPQATREKIRSRFHGSHDLIHRLFVCISGVADQLQTNYASDLRSILKTLFEVMATKPETDDKEKLRKVTQTLRSAALEDCALCQETLSSSELAAKTRDGDFEDPPEWVPDEACGFCTACKAPFTVIRRKHHCRSCGKIFCSRCSSHSAPLPRYGQVKPVRVCTHCYMFHVTPFYSDKAGL

SEQ ID NO: 4853 - DNA, 3813 bp, Homo sapiens
cagagacctaaagagatcccaagggcgcctgggacaccccttcctccccttagctccagacgtcctggaaatctgtgatgtctgctggcctctgtagagggaacaccagccgcagccacctccacgtcagtcaccgcagagaaaggaagatttgtggaaggaatacagcaaatcaacgcctcctcgcaaagcactttccctggatgttgaaacagtgactgcaaactcagaggcccttcaggggcttaagccaggattcgttcagcccatcctacggctgctgcacgtgaggcccgaggcccttgctgcatctgcactgcacccacgccgctgagaggatctcacttgtctgacccgtcagtggctatcttactgtccgtgtctgtggctcaggcagcaaagctctggaccacataacctgcccagggtcgcccagcgggtgagagatgctcttaggatcagatgacagattccacctctagatgcctgtctggggctgctgtaacagaacacccatgagctgggaggcttaaaaccgtggggatttgctggtttacagttctggaggcaggcatctgagatgagggcgctggtggggtggcactgcagcccaaggttctaggggatgatcctcctgccgcttccagcttctggtggctcctggcacttccttgccttgtggccaagtcactccaagctctgcctccgtcttctcttggcccctcgctgtgtctgtctcttgtaaggatatttattggagttggtatccatccagatagtccaggatggtttcatctcaagatccttaacttaattaaatctgcaaacaacctttttctaaaaaaggtcacagtcgcagattcacattttgggggtcacattcagcccaccgtgacgtctgaatcctgtgcctccagcccctcacccctcccgtcaccccccaccctgtcttcaggacacagcagagagcaggggctggagagtcagcagccaagggctgagctccttccctaatcccacctggcataggtgaactggagaccgcatttgctccaccaagagcccacgtctcagctttgcatcagctagctgggctgtgtataagcaatgccgagtaagggtcctgcagcatccatgcgtcagatgcctgtctcagcacagctgggttctgtgctcagggtctccccaggctgaaatccaggtgctgtggactgcgctctcgtctggagcggctgacgtttatttcatcgcttcttgttgattgagaagagactatgagatgcagttgtggcagggaccgaagtcctgcagcagcaaatctcaggccactgtccctgcaccccctagagtgcctgcatggagcaggtttggaggtgggtgggggagcagtgactgggcccagagtgtctggaaggacccctggacctgtgcccacaccctgagaccggaggaatatggacattggagggtgctccaagacaatgcgccaagaccgggtgacacatccaggagagacctgcggaccaagctagtgcctgcctgtggggaccacagaccccggccagctgaccagggcggggcagccctgagatcccggcttcaatttccctccctcccgctgagctgtttctgggatgggcgcctgccctcctggaccggcccagccctccttcctgtccctcggttctgtccttcattctggcccacagtggcagcggcccttctgaggatgccctggtcacggaacagcattcgtctccttctcagtcccagcctgtgctcaacccaggggctgtggagctgcagtcaggagctgtggtgagaagactgacttccttgggaaggcgagtcacacaggaaaaccacgagagagaatgactttgcaaggggctggagaggaaaggaagcagggagattccagcctgctcagaagaaatcagcttacttgctgctggaagttattagggctgacaccagtgcaaaggcctggcagccacagtggggccggcgccatggcggggtcagcgccacgtgttagttcccccggctgctgtgacgaagcaccgcggcaagcagctccacagctgggtcctgctcctcagacaagatggggccagaggcggccccagcagccacgcatgctgccccacaggccacaagagagaagatccggtccaggttccacggcagccacgacctcatccaccgcctgttcgtctgcatttcaggtgtggctgaccagctgcagacgaactatgccagtgacctgagaagtattcttaaaacactgtttgaggtcatggccaccaagcctgaaacagacgacaaggaaaagttaaggaaggtcacccagactctgcggagtgcggccttggaggactgtgcactgtgccaggagaccctgtcatcctctgaactggcagccaagacccgcgatggggactttgaagaccccccggagtgggtgccagacgaggcctgtggcttctgcacggcgtgcaaagcacccttcaccgtcatccgccggaagcaccactgccgcagctgtgggaagatcttctgctcgcgctgctcctcgcactcagcaccgctgccccgctacgggcaggtgaagccggtccgagtgtgcacccactgctacatgttccatgtcacgcccttctacagcgacaaggccggcctgtgacgtggtgccaggggcagccccaacccacccgggccaggaacccccaggaaggtggggccacgctgcaggcaggtctcactgcgtctcatgaggccgctgccgctgctgcaggggcacccagacctccagagcatccagagcctctgtcctgcccacgctagcctccctgcagggaccccgggccggctgcaggggccaacaagaggtcagctttgcccagcaggggacccggaggagcctggtggctgcctcagggcagggtgcctggcggagaaggcctgggccctcccactggtccctcggagatctgctggggctatgggaatcggggcgggtgatggaggtggacaagagtggggccactctgcgcctctgctgttgcggtgaatctggaagccggagcaagggccactccacaggctctttggcacagcagggctccctatgtgcctcccaaacgtcaaatgcaggctacccattctccccatcagctgcccacctcgttccccagccctcacccctcacccctcaccatccttcctcaggacttggctaaacaacatgcatctcatttcttcttggagtggggagatgcgggaagctgacccagtggtcctctaggcaggcagggtgctcctggtgtctgcccaccactgtccccttgctgatggcatgggggtccgaccaggcactgacaccgcaggcagaggttgctcggggccttgggtcgggtttaccaatcagccaggacgcccggggccaccagctcagctaccacttccccttccctctgcaccctctggaaccctggcccaattcctcagaccccagagtggcctgggacccaagctgccgcagctgagtggccccagcggacacctcctcaggcttaaatctcaggcttcacattgcaatgacgattgcagttttatttttggagatgacacacctactgcttcttttctaggataaatctaattactgtttactggtggagtacatatgcatagaaacggcttctgtcggggggagagtatataatggaggaaatattatgtattgagattatatttattttctaaatgctgtaatttgaagccatttccataaatctatttaaggattgc

SEQ ID NO: 4854 - protein, 192 aa, Homo sapiens
MGPEAAPAATHAAPQATREKIRSRFHGSHDLIHRLFVCISGVADQLQTNYASDLRSILKTLFEVMATKPETDDKEKLRKVTQTLRSAALEDCALCQETLSSSELAAKTRDGDFEDPPEWVPDEACGFCTACKAPFTVIRRKHHCRSCGKIFCSRCSSHSAPLPRYGQVKPVRVCTHCYMFHVTPFYSDKAGL

SEQ ID NO: 4855 - DNA, 4975 bp, Homo sapiens
catgtggtttttatgaggttcacaggcccccagacagccaggacctaaaagtggtttttaatggcagtaatgccacatgtggcaatagcctgtcatcttcatcttcatctcccaatcaggaaactgaggcaccgagaggaaggtgcccttcaaggtggcgggaacagtctcccccaggcccccaccatgcggactccccagcctcctccccttgccgtgctcccgagcctgacctcagccccgacaccgccaccctctctattgtgccgtccccatcctgcccgcctcccctttctaggaatccctggggtgcggagtcttcatcccacgctgccccgtccctgtgtccaccctgcccaccccaccttctgagccacctggttggggtgtcctctgccgaggcttgggttagttacaggggcccgcgggcaggttctccctcctccccagcctcagtttccacctccgtggagtgggtcctggggcagtcatgagatggagcgtgttctgtgcccggctggcctggcaggggcatgcatgcacaggggtgggcacagctccttgtgtggtcctggtgccccaagctctgtgcccacctgcagcttgggcctgggcgatcagcgccgtctcattctgtcacctgggaaatggcttcttgtcctgcatcacttgatcatccctgaggggacagcaggtggattggttctatcctaaacctggcgaggccccggcctctagacaagcctccctgtgacaacaggtctaccagggcctggactcagcccctgtgccagagggcagcttggtgaaattcccagttgctgagcgcacgctggggagctgcctcgcagcacccagggcagacatgggtggatttgtgggtgcggaggagccctccttacctgcccaggagcccagggactctcacactgatgagtctgcgttccggggaaggttgcgtttctctggcagtgagcaacttgacaggtggtgtctgtggctccctagataggctggggacctcgggcccggatcagcccggctgcttcatccctgggagcacagacctgattgtggagcctggaagctccaagctccttgaacttcatccctgtggcctggacggggagcggaaaagagtcacatgaccagggttcctcctgcagggagcccccagacccaagggcctcagtccaccttcccctcccctcccctcccctgccctcccctcccctgcccttacctgccctgccatgccctgccctccctgctcctggggccctgtgaggaccccgtgggtcacattgggggacatcggttatcgccctcacgattgctctgaatgtaagaaaaacctcctgcggggaccgggaacacgagctggcctgtgctgtggggtgagaagaggggccccgaggtgcgcagtcaggttccccgggtcggcgacccctgagagcctggccctcacccgggcccctccctgagtgtgtcccctcccgcagtgcctggccgccggctccatcatcatgaaccgggagctggagagcatggccatgcgcccgctggccaaggagctgacgcgcagcctggaggacgtgcggggcgccctccgtgaccaggcgctgcgggacctgaacacctacacagagaagatgagggaagcgctgaggcacttcgacgtcctgttcgcagagtttgagctcagctacgtctcggccatggtgcctgtgaagtcccccagggagtactacgtgcagcaggaggtcatcgtgctcttctgcgagacggtggagagggccctggacttcgggtacctgactcaggacatgattgatgactacgagccggccctcatgttcagcatccccaggctggccatcgtgtgtggcctcgtggtctatgcggacggacctctgaacttggaccgcaaggtggaagacatgtccgagctgttccggcccttccacacgttgctgcggaaaataagggatttgctgcagacgctgacggaggaggagctgcacacgctggaacggaacctctgcatttcccaagacgtggagttccccatccgcgcagacgtgcagggacccgctgccctggcgcctgccctctctgcccctctcccccctgaggggccactctcagctaaggccaaagacccggatgcagagctggcctgctccatgcagtacgacgaccaggagctggagcagctcagccgcatggtccacagggcgggggacgagatgtcctctttgctttcaccgcccattgcctgccagtccccagctcacaggccaggagcggagggcagcccaggcggggaggcctctccaggtagaccgcgcctgcggtcaggcagtgacgaggaggagcgcgtgttcttcatggatgacgtggaggggacggcagaagccctggccaggcccgagtccccagctggcccatttgggtgggcaggcagtacctgggccgacccccaggagaaagggcagggtgggccaggcggagcggcggggatcagcttgcccgcctcggaaaaggaggaggacttgagcaacaacaatctcgaggccgagggcacagatggggccagcctcgcgggcaccagctcctgcagctgcctggactcgcggctgcacctggacggctgggaggtgggtgcggatgacgcagagacggctgagatgatcgcccaccggacagggggcatgaagctctcagccacggtcatcttcaaccccaaatcgcccacttccctggactctgcggtcgccacccaggaggccgcctcggagcccgtggccgaggggatggatggcggcccccacaagcttagcactggggccaccaactgccttctgcattcctgcgtgtgctgtgggagctgcggggacagcagggaggacgtggtggagcgtctgcgggagaagtgcagcccgggaggcgtcattggtgcctcgtacgctgccggcttagccaaggccagcgacagggcccctgagagacaggaggaggcgcccccaccctcagaagatgcctccaacgggcgggagcccaaagcccccacttccgacaagtgcctgcctcacacctcaggttcccaggtggacacagcgagtgggctgcaaggagaggctggggttgcaggtcagcaggagccagaggccagagagctgcatgctgggagcccctcggctcacgaggcgcctcaggccctgtcgggctccagcagctccacagctgggtcctgctcctcagacaagatggggccagaggcggccccagcagccacgcatgctgccccacaggccacaagagagaagatccggtccaggttccacggcagccacgacctcatccaccgcctgttcgtctgcatttcaggtgtggctgaccagctgcagacgaactatgccagtgacctgagaagtattcttaaaacactgtttgaggtcatggccaccaagcctgaaacagacgacaaggaaaagttaaggaaggtcacccagactctgcggagtgcggccttggaggactgtgcactgtgccaggagaccctgtcatcctctgaactggcagccaagacccgcgatggggactttgaagaccccccggagtgggtgccagacgaggcctgtggcttctgcacggcgtgcaaagcacccttcaccgtcatccgccggaagcaccactgccgcagctgtgggaagatcttctgctcgcgctgctcctcgcactcagcaccgctgccccgctacgggcaggtgaagccggtccgagtgtgcacccactgctacatgttccatgtcacgcccttctacagcgacaaggccggcctgtgacgtggtgccaggggcagccccaacccacccgggccaggaacccccaggaaggtggggccacgctgcaggcaggtctcactgcgtctcatgaggccgctgccgctgctgcaggggcacccagacctccagagcatccagagcctctgtcctgcccacgctagcctccctgcagggaccccgggccggctgcaggggccaacaagaggtcagctttgcccagcaggggacccggaggagcctggtggctgcctcagggcagggtgcctggcggagaaggcctgggccctcccactggtccctcggagatctgctggggctatgggaatcggggcgggtgatggaggtggacaagagtggggccactctgcgcctctgctgttgcggtgaatctggaagccggagcaagggccactccacaggctctttggcacagcagggctccctatgtgcctcccaaacgtcaaatgcaggctacccattctccccatcagctgcccacctcgttccccagccctcacccctcacccctcaccatccttcctcaggacttggctaaacaacatgcatctcatttcttcttggagtggggagatgcgggaagctgacccagtggtcctctaggcaggcagggtgctcctggtgtctgcccaccactgtccccttgctgatggcatgggggtccgaccaggcactgacaccgcaggcagaggttgctcggggccttgggtcgggtttaccaatcagccaggacgcccggggccaccagctcagctaccacttccccttccctctgcaccctctggaaccctggcccaattcctcagaccccagagtggcctgggacccaagctgccgcagctgagtggccccagcggacacctcctcaggcttaaatctcaggcttcacattgcaatgacgattgcagttttatttttggagatgacacacctactgcttcttttctaggataaatctaattactgtttactggtggagtacatatgcatagaaacggcttctgtcggggggagagtatataatggaggaaatattatgtattgagattatatttattttctaaatgctgtaatttgaagccatttccataaatctatttaaggattgc

SEQ ID NO: 4856 - protein, 773 aa, Homo sapiens; identical to SEQ ID NO: 4850

SEQ ID NO: 4857 - DNA, 4110 bp, Homo sapiens
accagcggagcgctgggtgtcagtgagcagcgaggagccgcgcgcccccgtgcccgcgtctgtccgtgcgcccgagcgcccactcccgggtctgaggtctgcccggcgcgccgcttgcagagcatactcagggccgcgcacctgccccgcgcacctgcccgccgcccgctcggcgctccgggcttcgctagccagcctccctgcgacagcgcgggggctccggccgtgcctccgcgtccgccccgcgcctcagccgggcccgggcgcagcgctgcggagggcgagggccgcccggagtccggccagggccggcgcggcgatgatgaacaggttccgaaagtggctctacaaacccaagaggtcggatccgcagctgcttgcccggttctactatgccgacgaggagctgaaccaggtggccgcggagctggacagcctggatgggcggaaggacccccagcggtgcacgctgctggtcagccagttccgctcctgtcaggacaatgtgttgaacatcattaaccagatcatggatgagtgcatcccccaggaccgcgcccccagagatttctgcgtcaagttccctgaggagatccggcacgacaacctggccggccagctgtggttcggtgccgagtgcctggccgccggctccatcatcatgaaccgggagctggagagcatggccatgcgcccgctggccaaggagctgacgcgcagcctggaggacgtgcggggcgccctccgtgaccaggcgctgcgggacctgaacacctacacagagaagatgagggaagcgctgaggcacttcgacgtcctgttcgcagagtttgagctcagctacgtctcggccatggtgcctgtgaagtcccccagggagtactacgtgcagcaggaggtcatcgtgctcttctgcgagacggtggagagggccctggacttcgggtacctgactcaggacatgattgatgactacgagccggccctcatgttcagcatccccaggctggccatcgtgtgtggcctcgtggtctatgcggacggacctctgaacttggaccgcaaggtggaagacatgtccgagctgttccggcccttccacacgttgctgcggaaaataagggatttgctgcagacgctgacggaggaggagctgcacacgctggaacggaacctctgcatttcccaagacgtggagttccccatccgcgcagacgtgcagggacccgctgccctggcgcctgccctctctgcccctctcccccctgaggggccactctcagctaaggccaaagacccggatgcagagctggcctgctccatgcagtacgacgaccaggagctggagcagctcagccgcatggtccacagggcgggggacgagatgtcctctttgctttcaccgcccattgcctgccagtccccagctcacaggccaggagcggagggcagcccaggcggggaggcctctccaggtagaccgcgcctgcggtcaggcagtgacgaggaggagcgcgtgttcttcatggatgacgtggaggggacggcagaagccctggccaggcccgagtccccagctggcccatttgggtgggcaggcagtacctgggccgacccccaggagaaagggcagggtgggccaggcggagcggcggggatcagcttgcccgcctcggaaaaggaggaggacttgagcaacaacaatctcgaggccgagggcacagatggggccagcctcgcgggcaccagctcctgcagctgcctggactcgcggctgcacctggacggctgggaggtgggtgcggatgacgcagagacggctgagatgatcgcccaccggacagggggcatgaagctctcagccacggtcatcttcaaccccaaatcgcccacttccctggactctgcggtcgccacccaggaggccgcctcggagcccgtggccgaggggatggatggcggcccccacaagcttagcactggggccaccaactgccttctgcattcctgcgtgtgctgtgggagctgcggggacagcagggaggacgtggtggagcgtctgcgggagaagtgcagcccgggaggcgtcattggtgcctcgtacgctgccggcttagccaaggccagcgacagggcccctgagagacaggaggaggcgcccccaccctcagaagatgcctccaacgggcgggagcccaaagcccccacttccgacaagtgcctgcctcacacctcaggttcccaggtggacacagcgagtgggctgcaaggagaggctggggttgcaggtcagcaggagccagaggccagagagctgcatgctgggagcccctcggctcacgaggcgcctcaggccctgtcgggctccagcagctccacagctgggtcctgctcctcagacaagatggggccagaggcggccccagcagccacgcatgctgccccacaggccacaagagagaagatccggtccaggttccacggcagccacgacctcatccaccgcctgttcgtctgcatttcaggtgtggctgaccagctgcagacgaactatgccagtgacctgagaagtattcttaaaacactgtttgaggtcatggccaccaagcctgaaacagacgacaaggaaaagttaaggaaggtcacccagactctgcggagtgcggccttggaggactgtgcactgtgccaggagaccctgtcatcctctgaactggcagccaagacccgcgatggggactttgaagaccccccggagtgggtgccagacgaggcctgtggcttctgcacggcgtgcaaagcacccttcaccgtcatccgccggaagcaccactgccgcagctgtgggaagatcttctgctcgcgctgctcctcgcactcagcaccgctgccccgctacgggcaggtgaagccggtccgagtgtgcacccactgctacatgttccatgtcacgcccttctacagcgacaaggccggcctgtgacgtggtgccaggggcagccccaacccacccgggccaggaacccccaggaaggtggggccacgctgcaggcaggtctcactgcgtctcatgaggccgctgccgctgctgcaggggcacccagacctccagagcatccagagcctctgtcctgcccacgctagcctccctgcagggaccccgggccggctgcaggggccaacaagaggtcagctttgcccagcaggggacccggaggagcctggtggctgcctcagggcagggtgcctggcggagaaggcctgggccctcccactggtccctcggagatctgctggggctatgggaatcggggcgggtgatggaggtggacaagagtggggccactctgcgcctctgctgttgcggtgaatctggaagccggagcaagggccactccacaggctctttggcacagcagggctccctatgtgcctcccaaacgtcaaatgcaggctacccattctccccatcagctgcccacctcgttccccagccctcacccctcacccctcaccatccttcctcaggacttggctaaacaacatgcatctcatttcttcttggagtggggagatgcgggaagctgacccagtggtcctctaggcaggcagggtgctcctggtgtctgcccaccactgtccccttgctgatggcatgggggtccgaccaggcactgacaccgcaggcagaggttgctcggggccttgggtcgggtttaccaatcagccaggacgcccggggccaccagctcagctaccacttccccttccctctgcaccctctggaaccctggcccaattcctcagaccccagagtggcctgggacccaagctgccgcagctgagtggccccagcggacacctcctcaggcttaaatctcaggcttcacattgcaatgacgattgcagttttatttttggagatgacacacctactgcttcttttctaggataaatctaattactgtttactggtggagtacatatgcatagaaacggcttctgtcggggggagagtatataatggaggaaatattatgtattgagattatatttattttctaaatgctgtaatttgaagccatttccataaatctatttaaggattgc

SEQ ID NO: 4858 - protein, 887 aa, Homo sapiens; identical to SEQ ID NO: 4852

SEQ ID NO: 4859 - DNA, 4056 bp, Homo sapiens
atgagcagcgagcgagagggaaccggccggcaggtcatgaaaatcggcggcgcgtcgccccgcacctgtcccgcccccgtacctggcgggcgctcggggcagccgagccctcctgccgccgccacctgccaccgcagcagtttcctgggccagctggggctaaggtgttggcagtcgtcgtccgtcagctcccgagcatactcagggccgcgcacctgccccgcgcacctgcccgccgcccgctcggcgctccgggcttcgctagccagcctccctgcgacagcgcgggggctccggccgtgcctccgcgtccgccccgcgcctcagccgggcccgggcgcagcgctgcggagggcgagggccgcccggagtccggccagggccggcgcggcgatgatgaacaggttccgaaagtggctctacaaacccaagaggtcggatccgcagctgcttgcccggttctactatgccgacgaggagctgaaccaggtggccgcggagctggacagcctggatgggcggaaggacccccagcggtgcacgctgctggtcagccagttccgctcctgtcaggacaatgtgttgaacatcattaaccagatcatggatgagtgcatcccccaggaccgcgcccccagagatttctgcgtcaagttccctgaggagatccggcacgacaacctggccggccagctgtggttcggtgccgagtgcctggccgccggctccatcatcatgaaccgggagctggagagcatggccatgcgcccgctggccaaggagctgacgcgcagcctggaggacgtgcggggcgccctccgtgaccaggcgctgcgggacctgaacacctacacagagaagatgagggaagcgctgaggcacttcgacgtcctgttcgcagagtttgagctcagctacgtctcggccatggtgcctgtgaagtcccccagggagtactacgtgcagcaggaggtcatcgtgctcttctgcgagacggtggagagggccctggacttcgggtacctgactcaggacatgattgatgactacgagccggccctcatgttcagcatccccaggctggccatcgtgtgtggcctcgtggtctatgcggacggacctctgaacttggaccgcaaggtggaagacatgtccgagctgttccggcccttccacacgttgctgcggaaaataagggatttgctgcagacgctgacggaggaggagctgcacacgctggaacggaacctctgcatttcccaagacgtggagttccccatccgcgcagacgtgcagggacccgctgccctggcgcctgccctctctgcccctctcccccctgaggggccactctcagctaaggccaaagacccggatgcagagctggcctgctccatgcagtacgacgaccaggagctggagcagctcagccgcatggtccacagggcgggggacgagatgtcctctttgctttcaccgcccattgcctgccagtccccagctcacaggccaggagcggagggcagcccaggcggggaggcctctccaggtagaccgcgcctgcggtcaggcagtgacgaggaggagcgcgtgttcttcatggatgacgtggaggggacggcagaagccctggccaggcccgagtccccagctggcccatttgggtgggcaggcagtacctgggccgacccccaggagaaagggcagggtgggccaggcggagcggcggggatcagcttgcccgcctcggaaaaggaggaggacttgagcaacaacaatctcgaggccgagggcacagatggggccagcctcgcgggcaccagctcctgcagctgcctggactcgcggctgcacctggacggctgggaggtgggtgcggatgacgcagagacggctgagatgatcgcccaccggacagggggcatgaagctctcagccacggtcatcttcaaccccaaatcgcccacttccctggactctgcggtcgccacccaggaggccgcctcggagcccgtggccgaggggatggatggcggcccccacaagcttagcactggggccaccaactgccttctgcattcctgcgtgtgctgtgggagctgcggggacagcagggaggacgtggtggagcgtctgcgggagaagtgcagcccgggaggcgtcattggtgcctcgtacgctgccggcttagccaaggccagcgacagggcccctgagagacaggaggaggcgcccccaccctcagaagatgcctccaacgggcgggagcccaaagcccccacttccgacaagtgcctgcctcacacctcaggttcccaggtggacacagcgagtgggctgcaaggagaggctggggttgcaggtcagcaggagccagaggccagagagctgcatgctgggagcccctcggctcacgaggcgcctcaggccctgtcgggctccagggccattgaccccctggccaggaccctgccctacagggctcccactctggctgtggccgtgtctataggcctcgctaactggaagagagacggaggacagggaggggacgaggttcaactggagaccagaaaagcccccaccaggagccgtgggagccgggcagcagatggggatgaagcgttgccctatgctgtggcctccctccctgtccctttggcatggagccaccatcgttcagcccatggctgcctggacgaagatgtagggagctttgccagctgggtctcactgagtcccacagctgccttcaaggtctcagtgaggcacacagcagtgtctgaggtggagagagaggggactcagggccacttccggccctactccctgctcctggcagcatcagggagcccgtcaaggggtggaagcgggggctttggctgcagtggagcctgcttgagggaacaccagccgcagccacctccacgtcagtcaccgcagagaaaggaagatttgtggaaggaatacagcaaatcaacgcctcctcgcaaagcactttccctggatgttgaaacagtgactgcaaactcagaggcccttcaggggcttaagccaggattcgttcagcccatcctacggctgctgcacagtgcctgcatggagcaggtttggagtggcagcggcccttctgaggatgccctggtcacggaacagcattcgtctccttctcagtcccagcctgtgctcaacccaggggctgtggagctgcagtcaggagctgtgactcagggcacctgccaagaagaggggtctacctgctgttggtttccgctgtggcctgagctgagctggtacgactttggcagacagttccagagccgattcctggaaggcagctccacagctgggtcctgctcctcagacaagatggggccagaggcggccccagcagccacgcatgctgccccacaggccacaagagagaagatccggtccaggttccacggcagccacgacctcatccaccgcctgttcgtctgcatttcaggtgtggctgaccagctgcagacgaactatgccagtgacctgagaagtattcttaaaacactgtttgaggtcatggccaccaagcctgaaacagacgacaaggaaaagttaaggaaggtcacccagactctgcggagtgcggccttggaggactgtgcactgtgccaggagaccctgtcatcctctgaactggcagccaagacccgcgatggggactttgaagaccccccggagtgggtgccagacgaggcctgtggcttctgcacggcgtgcaaagcacccttcaccgtcatccgccggaagcaccactgccgcagctgtgggaaggcatttgaccacgggaacctggatggtgcccatgtccagtcccggctgctgcagagccagccacagagaggggacagcgagtgtgaacaggagcctgcagcagccttgatcttctgctcgcgctgctcctcgcactcagcaccgctgccccgctacgggcaggtgaagccggtccgagtgtgcacccactgctacatgttccatgtcacgcccttctacagcgacaaggccggcctgtga

SEQ ID NO: 4860 - protein, 1351 aa, Homo sapiens
MSSEREGTGRQVMKIGGASPRTCPAPVPGGRSGQPSPPAAATCHRSSFLGQLGLRCWQSSSVSSRAYSGPRTCPAHLPAARSALRASLASLPATARGLRPCLRVRPAPQPGPGAALRRARAARSPARAGAAMMNRFRKWLYKPKRSDPQLLARFYYADEELNQVAAELDSLDGRKDPQRCTLLVSQFRSCQDNVLNIINQIMDECIPQDRAPRDFCVKFPEEIRHDNLAGQLWFGAECLAAGSIIMNRELESMAMRPLAKELTRSLEDVRGALRDQALRDLNTYTEKMREALRHFDVLFAEFELSYVSAMVPVKSPREYYVQQEVIVLFCETVERALDFGYLTQDMIDDYEPALMFSIPRLAIVCGLVVYADGPLNLDRKVEDMSELFRPFHTLLRKIRDLLQTLTEEELHTLERNLCISQDVEFPIRADVQGPAALAPALSAPLPPEGPLSAKAKDPDAELACSMQYDDQELEQLSRMVHRAGDEMSSLLSPPIACQSPAHRPGAEGSPGGEASPGRPRLRSGSDEEERVFFMDDVEGTAEALARPESPAGPFGWAGSTWADPQEKGQGGPGGAAGISLPASEKEEDLSNNNLEAEGTDGASLAGTSSCSCLDSRLHLDGWEVGADDAETAEMIAHRTGGMKLSATVIFNPKSPTSLDSAVATQEAASEPVAEGMDGGPHKLSTGATNCLLHSCVCCGSCGDSREDVVERLREKCSPGGVIGASYAAGLAKASDRAPERQEEAPPPSEDASNGREPKAPTSDKCLPHTSGSQVDTASGLQGEAGVAGQQEPEARELHAGSPSAHEAPQALSGSRAIDPLARTLPYRAPTLAVAVSIGLANWKRDGGQGGDEVQLETRKAPTRSRGSRAADGDEALPYAVASLPVPLAWSHHRSAHGCLDEDVGSFASWVSLSPTAAFKVSVRHTAVSEVEREGTQGHFRPYSLLLAASGSPSRGGSGGFGCSGACLREHQPQPPPRQSPQRKEDLWKEYSKSTPPRKALSLDVETVTANSEALQGLKPGFVQPILRLLHSACMEQVWSGSGPSEDALVTEQHSSPSQSQPVLNPGAVELQSGAVTQGTCQEEGSTCCWFPLWPELSWYDFGRQFQSRFLEGSSTAGSCSSDKMGPEAAPAATHAAPQATREKIRSRFHGSHDLIHRLFVCISGVADQLQTNYASDLRSILKTLFEVMATKPETDDKEKLRKVTQTLRSAALEDCALCQETLSSSELAAKTRDGDFEDPPEWVPDEACGFCTACKAPFTVIRRKHHCRSCGKAFDHGNLDGAHVQSRLLQSQPQRGDSECEQEPAAALIFCSRCSSHSAPLPRYGQVKPVRVCTHCYMFHVTPFYSDKAGL

SEQ ID NO: 4861 - DNA, 566 bp, Homo sapiens
gtgcactgtgccaggagaccctgtcatcctctgaactggcagccaagacccgcgatggggactttgaagaccccccggagtgggtgccagacgaggcctgtggcttctgcacggcgtgcaaagcacccttcaccgtcatccgccggaagcaccactgccgcagctgtgggaaggtgggtgagaccccttgcacggagggtccctcagcatccaagggcgtccacggacagagcctgaggtctggaagtcagaaccgatgcccagggaggccagcgaggcctgtggggtcttgtgcagaggcccctggaggtcccgggccctgttctgactccaggcatttgaccacgggaacctggatggtgcccatgtccagtcccggctgctgcagagccagccacagagaggggacagcgagtgtgaacaggagcctgcagcagccttggtgcaggacgtggacccctcatagagtccagcctcctgaaggtcacaacccctggcagctggggctgggcagtccccacccaccaatgcggcctgagctgggtgggtaggtgtgtgggagggcg

SEQ ID NO: 4862 - protein, 60 aa, Homo sapiens
MGTLKTPRSGCQTRPVASARRAKHPSPSSAGSTTAAAVGRWVRPLARRVPQHPRASTDRA

SEQ ID NO: 4863 - DNA, 561 bp, Homo sapiens
gctgtcgagggattaatgctaggattacaggtggaccaccatgcccagctaattaaaaacaattttcttgtaaagatggggtctcgccatgtggcccaggctggtcttgaactcctaggcttaagctttcctccggcctcggtcttccaaagggttgggattacaggtatgagtcacctcaccttgcagaaagctgtgtgggtggaacgtgcctctgctgcccacccaggggccctgatgtgggaacctcacccatgggtaaggcagcggggacccaggtgtgcacccacaggctggccctgccgccccgatggaactgctgcttgtgccccccgcccacccagggaaaacagtgagaatccacagatgagcctgcatctcctccagcgtcagggtttgaggacttatccgttactgtccacgtgtagtggtgtgatctcagctcactgcagtctccgcctccaagcaggagaattgcctaaacctgggaggcagaggttgcagtgagccgagattgcaccactccactccagcctgggctacagagcgagactccatctc

SEQ ID NO: 4864 - protein, 163 aa, Homo sapiens
MLGLQVDHHAQLIKNNFLVKMGSRHVAQAGLELLGLSFPPASVFQRVGITGMSHLTLQKAVWVERASAAHPGALMWEPHPWVRQRGPRCAPTGWPCRPDGTAACAPRPPRENSENPQMSLHLLQRQGLRTYPLLSTCSGVISAHCSLRLQAGELPKPGRQRLQ

SEQ ID NO: 4865 - DNA, 1589 bp, Homo sapiens
ggggttttatcgcggtatcgcggaacacagcccccgccattcccagtcacccgctcggaggccgtgggcgccttgacgagggcgcggcggcgggaatgcacaacgttatgctcatcacctgcgtccaccactgtcacccctgacggcgagacgcgaggtgctaagggcttgtccaggctaagcgggttctctgcgtccttaagcccactttgcagatgctaatcagaggggacaggcggccaagaacctggagcccacccgggcgtctgtgcccagtgccgaccgtctaaattcccttcccacgtggctcctgttgcgtctgggctgtggaggattcctctaaacaggcacagccaccctctggaggtcggatccgcagctgcttgcccggttctactatgccgacgaggagctgaaccaggtggccgcggagctggacagcctggatgggcggaaggacccccagcggtgcacgctgctggtcagccagttccgctcctgtcaggacaatgtgttgaacatcattaaccagatcatggatgagtgcatcccccaggaccgcgcccccagagatttctgcgtcaagttccctgaggagatccggcacgacaacctggccggccagctgtggttcggtgccgagtgcctggccgccggctccatcatcatgaaccgggagctggagagcatggccatgcgcccgctggccaaggagctgacgcgcagcctggaggacgtgcggggcgccctccgtgaccaggcgctgcgggacctgaacacctacacagagaagatgagggaagcgctgaggcacttcgacgtcctgttcgcagagtttgagctcagctacgtctcggccatggtgcctgtgaagtcccccagggagtactacgtgcagcaggaggtcatcgtgctcttctgcgagacggtggagagggccctggacttcgggtacctgactcaggacatgattgatgactacgagccggccctcatgttcagcatccccaggctggccatcgtgtgaaatggaaaaggtgttctaaaattcatgtggaactgcaatgggccctaaatagccaaaacaatattgaaaaacaaaaacaaaattggaagattcatacgtcctgatttcaaaacttactacaagtcaaaaccttatggtactggcataaagatagatgtatagaccaatggaataaaattgagaagccataaataaacccaaacatctatggtgaactgattattgacaagggggccaagatcattcaataaggaaagaacagtctcttcagtgaatgttcctggagcaactggataaccacatgcaaaagaacaaagttggaaaaaaaaaaaaaaaagaacaaagttggaccctgcgatggttaacttcatgtgtcatcttgggtaggccacattacccagatatttggtaaaataccagtctgaatgttgctgtgaaggtatttttttttctttttataatgataaactggcaatttataattgcgcagatttatagcatgcaaagttgtgttataatctatgaatgcagtgtggaataattaaatcaagctggttaacat

SEQ ID NO: 4866 - protein, 163 aa, Homo sapiens
MDECIPQDRAPRDFCVKFPEEIRHDNLAGQLWFGAECLAAGSIIMNRELESMAMRPLAKELTRSLEDVRGALRDQALRDLNTYTEKMREALRHFDVLFAEFELSYVSAMVPVKSPREYYVQQEVIVLFCETVERALDFGYLTQDMIDDYEPALMFSIPRLAIV

SEQ ID NO: 4867 - DNA, 1112 bp, Homo sapiens
gaccagcggagcgctgggtgtcagtgagcagcgaggagccgcgcgcccccgtgcccgcgtctgtccgtgcgcccgagcgcccactcccgggtctgaggtctgcccggcgcgccgcttgcagagcatactcagggccgcgcacctgccccgcgcacctgcccgccgcccgctcggcgctccgggcttcgctagccagcctccctgcgacagcgcgggggctccggccgtgcctccgcgtccgccccgcgcctcagccgggcccgggcgcagcgctgcggagggcgagggccgcccggagtccggccagggccggcgcggcgatgatgaacaggttccgaaagtggctctacaaacccaaggacaatgtgttgaacatcattaaccagatcatggatgagtgcatcccccaggaccgcgcccccagagatttctgcgtcaagttccctgaggagatccggcacgacaacctggccggccagctgtggttcggtgccgagtgcctggccgccggctccatcatcatgaaccgggagctggagagcatggccatgcgcccgctggccaaggagctgacgcgcagcctggaggacgtgcggggcgccctccgtgaccaggcgctgcgggacctgaacacctacacagagaagatgagggaagcgctgaggcacttcgacgtcctgttcgcagagtttgagctcagctacgtctcggccatggtgcctgtgaagtcccccagggagtactacgtgcagcaggaggtcatcgtgctcttctgcgagacggtggagagaaatggaaaaggtgttctaaaattcatgtggaactgcaatgggccctaaatagccaaaacaatattgaaaaacaaaaacaaaattggaagattcatacgtcctgatttcaaaacttactacaagtcaaaaccttatggtactggcataaagatagatgtatagaccaatggaataaaattgagaagccataaataaacccaaacatctatggtgaactgattattgacaagggggccaagatcattcaataaggaaagaacagtctcttcagtgaatgttcctggagcaactggataaccacatgcaaaagaacaaagttgg

SEQ ID NO: 4868 - protein, 172 aa, Homo sapiens
MMNRFRKWLYKPKDNVLNIINQIMDECIPQDRAPRDFCVKFPEEIRHDNLAGQLWFGAECLAAGSIIMNRELESMAMRPLAKELTRSLEDVRGALRDQALRDLNTYTEKMREALRHFDVLFAEFELSYVSAMVPVKSPREYYVQQEVIVLFCETVERNGKGVLKFMWNCNGP

SEQ ID NO: 4869 - DNA, 1782 bp, Homo sapiens
ggagccgcgcgcccccgtgcccgcgtctgtccgtgcgcccgagcgcccactcccgggtctgaggtctgcccggcgcgccgcttgcagagcatactcagggccgcgcacctgccccgcgcacctgcccgccgcccgctcggcgctccgggcttcgctagccagcctccctgcgacagcgcgggggctccggccgtgcctccgcgtccgccccgcgcctcagccgggcccgggcgcagcgctgcggagggcgagggccgcccggagtccggccagggccggcgcggcgatgatgaacaggttccgaaagtggctctacaaacccaagaggtcggatccgcagctgcttgcccggttctactatgccgacgaggagctgaaccaggtggccgcggagctggacagcctggatgggcggaaggacccccagcggtgcacgctgctggtcagccagttccgctcctgtcaggacaatgtgttgaacatcattaaccagatcatggatgagtgcatcccccaggaccgcgcccccagagatttctgcgtcaagttccctgaggagatccggcacgacaacctggccggccagctgtggttcggtgccgagtgcctggccgccggctccatcatcatgaaccgggagctggagagcatggccatgcgcccgctggccaaggagctgacgcgcagcctggaggacgtgcggggcgccctccgtgaccaggcgctgcgggacctgaacacctacacagagaagatgagggaagcgctgaggcacttcgacgtcctgttcgcagagtttgagctcagctacgtctcggccatggtgcctgtgaagtcccccagggagtactacgtgcagcaggaggtcatcgtgctcttctgcgagacggtggagagggccctggacttcgggtacctgactcaggacatgattgatgactacgagccggccctcatgttcagcatccccaggctggccatcgtgtgccccctccttccagcccatcccagaacacgtgcaggagccaccgcccacgtggcctgcaggatggttgccggatcctcttcaggggccctcacccatccacctgtgtcaaaacaaggtgtcatctctgccctgctcagacccttgccggagctcccaccgtgatctgcctgcaccgtgcccacaccagtcctctctccccagtccccacgcacccgctgccctgggtctccaccatgctgtccccttcgctcagggtccccttgactgtcctatccctactgccacactgtcccctcccccgcactgtccccttttccatgatgtttcctcctccacgctgtcccctctgctccagtgtcctcttggccatgctgtcctctccatggtgctggcccctccactacactgtcccctcctctatgctgtccccttgtctatgctgttccctcctctatgctatcccattctccatgctatcccattctccatgctgtcccctcctccatgctgtcccttcctctgcaatgtcctctcccctgtgctcctctgcactgtcccctcctccatgctgtcccctcctttatgatgttccctcctccgtgctgtcccctccatgatgtcccctcttccgtgctgtcctctcctctgcactgtcccctactccctgctgtacctccctctgcgatgtccccaccactgcaccgctcacccaagccctctcccaccagcaggttgcgtgacttactctgttatttatttttccatgttactgagataaaattcattaccctatg

SEQ ID NO: 4870 - protein, 287 aa, Homo sapiens
MMNRFRKWLYKPKRSDPQLLARFYYADEELNQVAAELDSLDGRKDPQRCTLLVSQFRSCQDNVLNIINQIMDECIPQDRAPRDFCVKFPEEIRHDNLAGQLWFGAECLAAGSIIMNRELESMAMRPLAKELTRSLEDVRGALRDQALRDLNTYTEKMREALRHFDVLFAEFELSYVSAMVPVKSPREYYVQQEVIVLFCETVERALDFGYLTQDMIDDYEPALMFSIPRLAIVCPLLPAHPRTRAGATAHVACRMVAGSSSGALTHPPVSKQGVISALLRPLPELPP

SEQ ID NO: 4871 - DNA, 844 bp, Homo sapiens
agtagtcccacttattggttgaattttatttttattttttgtattataaaggcttaacatttttcttacagtgcagaatttccttcagagtttagtgcatgatttcttgcctgagaagggtcatgcttccccactcatagtgagttttcgtatctcttcctaagaaaaatgaaagtcaagcctcaggagggatggtcgagattaaaaattgccaagcaatcagtgggtcctaaggaagtaatccacactcggagcatcgtgcaccacagtagtgagggcagcattgcgtggaggtggaggattaggcacatcgtcagtgtccagcagaagacaaaggagtgagttaacaggacggtccatatgctggaattgcatgtcactatccatcaaaaattgtatatgtgacagatgtaataacatgttgcagcagctacaacagcagaaggcagtattacgtacatggatcgtctcaacgttggctgaaaacaggccctcggaagatgagaattagaaggaactgtgtcccacctgcggtcatatttccccaaggacattttccccacttctctcctttcccattggttccagttttcctaggatgaacgtgtattgatttcatatttaacaaattaaagcaaaagttaaacttccagtgtttttgtaacctacagaatgaatagtcaatgtttaaagaataggacaaatttacagaaaaggatggaatgcaatttaagatgtaaaaaaatgggcttcttctccctcatatacacaaagtgttcaaaacactctgttatactttatattttgaacataaggaaataaagtaaaataattttaaagagtc

SEQ ID NO: 4872 - protein, 57 aa, Homo sapiens
MKVKPQEGWSRLKIAKQSVGPKEVIHTRSIVHHSSEGSIAWRWRIRHIVSVQQKTKE

SEQ ID NO: 4873 - DNA, 2863 bp, Homo sapiens
ctgcctaccgggagctgacggacgacgactgccaacaccttagccccagctggcccaggaaactgctgcggtggcaggtggcggcggcaggagggctcggctgccccgagcgcccgccaggcttctgccctaagaagatggcctactatggaaaatgcattgaaactgtgatcgagcaactcgacaaatttacacccaagagggacaaccctgagcagttcctggaggctgcggccacctccctgcagctgaccgtgttttccacagagacctgctcttcgtatggggaggtgctcctggcacccagaatgtgtgtcaggccaggctctggtgaaagaagccttggccgggacccgggatatgacatccacactgcggttccatcctcagtcaacacagatgagaagggtcagccctggagcgcccccatgccccacccccactttggggggcatcttatctcgggaaatgggtcctccatcccccaggcgccccagggctgtggcagtgagggtgcgcaaggccacaacttgtgctgtatttgtggtaaccgagacttgggaatcactgactgggtctccgacagaggcaggggctggcctgggcagtgaggctcccggggagccgagggctgcaggcttctgtacacacctccttcatcttcctacccacacctggaagaagtcacaggcccacctggaggctgcccaactcctcagctcctgtcctcccatccctgggttttcctcacagctccatcctggtcctggcaccccctgcaacctcggcagccctgccccactcaggggcctccctgtcacctggtctcagctcccaccacgaggtgctgatctcacatccaccacctgtcagtggcatgtgcctggggaacaggagcttggattgcagggcccctgcctctaggaatgtgggacttggtctccattggatggggcctccagaggaagctgagcccaccaggggaaatcctggggggctgtcacatgggccatcaccaacccatcattgcccaggagcagggagcgggcactcgccccctggaaagagggcgctcatagcaagtgtgctaattcaggctgcctgcctgtccttgcaggccacagccctctgtgccgctgtgctctggatgaacttggcctatgtgcgctgcttttctgcacggcccctgggggctgccctggccatgctccagctcccgctctcactacctgctcaggtgcacctgtgctgttcccccaggccacagtctgagcccaccttcccttggggtagaatgaggggttcatccttcattagctacctctggggcagcctcaagaaagcccagaggggaggtggtgtgagtgggttacaaaggctacaggggttggggccaaggcctctgccgtaagagaaggcctggggcccccacccatccctgctcccagcttctggaagaggcgcctcctccggctggggcctggcagccagcaggggctggagaggggagcagggcctgtgtgcagagctgcaggcctccgtgggcacctctccctccacttcagcaccctctggcccccagctctttccctgagcccctgagcactgtggggaagtgatgcaaacagctcgggcccaggttcatccacactcctcttcccagctaaggcctcagcacgacgggcacacctctcatcccgccggcctgccctcgccttgcacgtccaaaacagacaatagcgaaggcccaggtccccttggccagaagcccgtcctgggagctggcgtcacccaccccactgcctgggcccacctgtagcccggcccctctggccagcccaagagcagctccagcagctcctcctatccgtccccctcatttccctcaggatctttcccgtcagccacccgtgctgctacgtctctcaccctaaaaacattttttttaagtcctctgtactcccctgaggctcccgcggtccttcccttctatctaacagattcctcgaagtccctgccaccagcggcagctcttcctccatcctccctcacacccctccctgcggacttcccccacccctccacccacagcgccagtctgggtcaccccgcacccccttgttgccaaatccagtggggcagcctcagctcctctgacccagctgaccccgcccccagctccggggccttccgatcagcttcctgggtaccccctgcgccaggcctgcatctcacctggcagccactccttctcaggctcgggcctcccctgtcgggtgtgcggggtgcacgggctcagcggctgctctctgctctctttgctatacacactcctggtcccctcgcctgctgacagctcctgctcctccctccatccttgacctctcccgagcctggactcacatctccttgggtgtccagtgggcacctcccgtgtgacacgtcagtagatgaatgaatccatgtgacctcccccagagctgctgatccgggcatccccagttcagccggcagccgctccgtctccccttgctccagtgggaaccctggcgcctcctgggcacccccattcctctagaccacatctgttcatcatcagctctgccttcgactctgccatgtgtgcactctgctccagctgcactggtctcctagtgtttctggaacattccacgcgctccccactgcactagctgttgcctccacctgggaaactttccccctgatgctgtcttggcctgcgcagccacatagcaccttggcagggaaaggggtgtgtgtttaccccttcctcaagcaaaaagtggtaaagttcatgtctttatttcttgataataaccattacaaaaaaaatgagtttgtt

SEQ ID NO: 4874 - protein, 157 aa, Homo sapiens
MAYYGKCIETVIEQLDKFTPKRDNPEQFLEAAATSLQLTVFSTETCSSYGEVLLAPRMCVRPGSGERSLGRDPGYDIHTAVPSSVNTDEKGQPWSAPMPHPHFGGHLISGNGSSIPQAPQGCGSEGAQGHNLCCICGNRDLGITDWVSDRGRGWPGQ

SEQ ID NO: 4875 - DNA, 927 bp, Homo sapiens
gacaaatttacacccaagagggacaaccctgagcagttcctggaggctgcggccacctccctgcaggctctgagcccccagaagcagagctttgttttggaggttctgtctgggtgcctcgagtaccggaagctgctgaccgtcgtggtggatgccttctacgtggaggatggccgactctgcctgcgggttgaccacagccgcttcgaggtgatctgctacctagccacattcctgctggaggaactcggcttccagctattctgtaacatcatcaagtcccagcccgtggataagatgtgcaagttcctcaggttcttcttcaaccccctgcacctgtgctcatggatcaaggatgagtggagcctcatctacgagccagcccacgtgaaggagaactggatcgaccccctgatgaggtcccccagagcacctaccagccacccaaggagcagcagcagctggagacagtcaagaggtacaaccgccgaaaggccgaggagctgctgctgagggcaaacatcgaggaactgtgctgcgccatgcccaggtcctgcagggagcgagtgcaggtaccgcccagctctctcaagacccatcatcgaggtgccatcttctcaagccatcagaaagttcctcccaacgccatcgcagtgaccacttatgtagccttttcccactgagggccggggaggggcggattcccagtagcactgggaaagtgtgccttgagcccactgcgatgtggcccctaagcaggcgggtgtagacgcgcacccacatcccccaggaggaagctcacgggaaagcacctgcaggtgctgcctctgggtatctccagatgttccgtgacaagcatttcatgtctctgtaaggaaaaaacaaacccaggtatgtttgccaataaagaaaaagcaaggtaatgac

SEQ ID NO: 4876 - protein, 71 aa, Homo sapiens
MCKFLRFFFNPLHLCSWIKDEWSLIYEPAHVKENWIDPLMRSPRAPTSHPRSSSSWRQSRGTTAERPRSCC

SEQ ID NO: 4877 - DNA, 1083 bp, Homo sapiens
ggacaaccctgagcagttcctggaggctgcggccacctccctgcaggctctgagcccccagaagcagagctttgttttggaggttctgtctgggtgcctcgagtaccggaagctgctgaccgtcgtggtggatgccttctacgtggaggatggccgactctgcctgcgggttgaccacagccgcttcgaggtgatctgctacctagccacattcctgctggaggaactcggcttccagctattctgtaacatcatcaagtcccagcccgtggataagatgtgcaagttcctcaggttcttcttcaaccccctgcacctgtgctcatggatcaaggatgagtggagcctcatctacgagccagcccacgtgaaggagaactggatcgaccccctgatgagatggcagccagaggtccaggagctgatcaaccacctggagggcgtgtctgccagtcaatcctctcctttaaagaccaaggccaaggtcacagagcccaaggaattcaacctgactgcccccaggccccgcaccattccagcgcccgaaccagtcccggtcgtggccaagccgagacccgtcccccagagcacctaccagccacccaaggagcagcagcagctggagacagtcaagaggtacaaccgccgaaaggccgaggagctgctgctgagggcaaacatcgaggaactgtgctgcgccatgcccaggtcctgcagggagcgagtgcaggtaccgcccagctctctcaagacccatcatcgaggtgccatcttctcaagccatcagaaagttcctcccaacgccatcgcagtgaccacttatgtagccttttcccactgagggccggggaggggcggattcccagtagcactgggaaagtgtgccttgagcccactgcgatgtggcccctaagcaggcgggtgtagacgcgcacccacatcccccaggaggaagctcacgggaaagcacctgcaggtgctgcctctgggtatctccagatgttccgtgacaagcatttcatgtctctgtaaggaaaaaacaaacccaggtatgtttgccaataaagaaaaagcaaggtaatg

SEQ ID NO: 4878 - protein, 187 aa, Homo sapiens
MCKFLRFFFNPLHLCSWIKDEWSLIYEPAHVKENWIDPLMRWQPEVQELINHLEGVSASQSSPLKTKAKVTEPKEFNLTAPRPRTIPAPEPVPVVAKPRPVPQSTYQPPKEQQQLETVKRYNRRKAEELLLRANIEELCCAMPRSCRERVQVPPSSLKTHHRGAIFSSHQKVPPNAIAVTTYVAFSH

SEQ ID NO: 4879 - DNA, 1131 bp, Homo sapiens
atgggggccagccagaccccagctctggggggctccaagcagcagctgcggcttcagttcccaccccgaatccgaaagactccgaagctgaccttctataggcctgacaacatcctggtcaagctgaacaccacagccatcctgcgagaaggggccttgtaccagcggcaggtggagcaggagctgcagagggttgataagctcgtggatggggctggggacttctctgagttcttcgagtggcagaagaagatgcaggcgaaggaccgggaggagcagctggctgcaagcgagtgccggcggttgcaagggaagcttagccatgaggaggccgtcctagcccggcagagcctcatgcaggagaacaagcagagggtggagcagcagaaggagcagatggccaagctgatgctgcagcgtgcagagagacggctccgggaggacaggtccaggaaggagctggtggagcaggtgatagaggggcagaagaacgccaaggcggcccagacgaagctcgcgaagggccgacagcagacagttcaggaggcgatcgaggagagcagggggctgctgcagcgcagggcgcaggcagcccaggaggagcagcggcgccgttgtgaactcatctcccagctgcgcgcactcgagacacagcccacgcgcaagggcaagctcgtggacctgacccagatccccggctacggcctggaaggagagatgtccatagtggagctgcgagagcggctggccctgctcaaagagaatcagcggcgcaaggaggaagaaaagcgggatcaaatcattcagggcaagcacaccaagagccaggaactgcagaacatggtggagcagatctcgctgtgccgtgcagccatggggagatccgcagccttgaggttggacgagcgcgtgcagcagctgcggcgcaggatctcggagagggcggccgagcgcagcaggcaggcggccttgctgcacgtgtcggcgccgcggaccgcgcgccccaagccccgggcgcagctagaggcgcagcactggctggagctggagcggagccgcgagcgcaggctgcaggcgctgcagcagggaggctcaggacccgggcccgcgcgccgcctggaggccgcctga

SEQ ID NO: 4880 - protein, 376 aa, Homo sapiens
MGASQTPALGGSKQQLRLQFPPRIRKTPKLTFYRPDNILVKLNTTAILREGALYQRQVEQELQRVDKLVDGAGDFSEFFEWQKKMQAKDREEQLAASECRRLQGKLSHEEAVLARQSLMQENKQRVEQQKEQMAKLMLQRAERRLREDRSRKELVEQVIEGQKNAKAAQTKLAKGRQQTVQEAIEESRGLLQRRAQAAQEEQRRRCELISQLRALETQPTRKGKLVDLTQIPGYGLEGEMSIVELRERLALLKENQRRKEEEKRDQIIQGKHTKSQELQNMVEQISLCRAAMGRSAALRLDERVQQLRRRISERAAERSRQAALLHVSAPRTARPKPRAQLEAQHWLELERSRERRLQALQQGGSGPGPARRLEAA

SEQ ID NO: 4881 - DNA, 488 bp, Homo sapiens
tcaagaagaaagtacattaagccaccttcttcccaggaaagagagaaaagcgtcaagtccgtggggtgaggagatggtgcctcagatgaggaggctgagtcccagggtacactcagaccaggaaggcaggcatctcagcagtgacaagaacaggctaaaggacaagagccctactccaatattctgagtttgtgagaaccccaggattttaccacccagggtgcaacagaagtgaccacgtgccagttctgagtctgggcctcaggtggccttggagctcccacttgttctcttggaaccttcgccaggccccatgtgagcatgactagggtggcctgctgggatcagacaccatgtggaggacaccatctcagaggccatcctagactagcagagcacaaaatgagagcgcagccggacaagaacctcccccaaccctgctgtcttatagattcatgagcaacaataaatgtctgtcattcaaagta

SEQ ID NO: 4882 - protein, 45 aa, Homo sapiens
MTRVACWDQTPCGGHHLRGHPRLAEHKMRAQPDKNLPQPCCLIDS

SEQ ID NO: 4883 - DNA, 1076 bp, Homo sapiens
cccgcccgcaaggtttttcgggagtcacggtctgagggcgacccgggcgacccggtcgcccgtgcccggctgccactgaccgctccaacgccgccagggacgacccgccagctgcctccggagccgagcaggccccgaaccttcccattcctagatttccagccgcacaacagccgcggtgcccctggctcgacgcagctggccggaggcgcggagctggtcgttcgtcccgcccgccgttccgcgcccctctcccggctcttgtttcctcgcctcttaacgaggcctttgtgaggaaggttgctgggccttgggactctgacgatcggctggaaaccaggcctggccctgtttcagcatccccgcgtgccaagccctgggccggcgtgcgggtccctgcccctgcgaggaagctgggacttttgcaggcctgggtggagacgtgtacataacagaggaagagtgtggaggattggaggactcagggcagcacggcagaggtgcatgcaggtccccggtcggactggagaatgggcggtgggtttcttgagctccagtccctgagctcgactttgacgtgggtttagcaaccaggaaaaaagcccaccttgtccctgctgcctgagaatacccagaccttagtccatggccagcatctctggtccctcggcaccctcaggcaacgtgaaggtcaccccaaatgccttgggttacattgtttccttacagtgagtttgtttgttttagtggcgcgatctcggctcactgcaagctctaacctcctgggttcacgtgattctcctgcctcagcctcccgaatagcgggtgtggtggcatgtccctgtggtcccagctactcaggaggctgaggcagcaggattacttgagcccaggaggtcatggctgcagtaagctgtgattgcacgtcagcttgattgacagaatgagaccctctctctctcaaaaaaaaaaaatcagatttagaaaaagtaatattagtaatttgtattttacagcctaaggaaaagttagggttttctgtttgtaactgtaatatattgaagatgtgatgttga

SEQ ID NO: 4884 - protein, 93 aa, Homo sapiens
QPGKKPTLSLLPENTQTLVHGQHLWSLGTLRQREGHPKCLGLHCFLTVSLFVLVARSRLTASSNLLGSRDSPASASRIAGVVACPCGPSYSGG

SEQ ID NO: 4885 - DNA, 2949 bp, Homo sapiens
gatggggggcggagccgaggcctccgaagcggaagtgggttgctgttgaggcggcggcatctttctcgaggagctctcctgggcggctgaagaaggagcttcttctccggagtgcgccggcggtggcgcctgcggacctaactagctccaggttaggccgagctttgcgggaaagcagcggacttgaaaatactggaaatctgtccggatccaaattattttgcaagccagatgagtaaccagagggcatgaaaggttgagaacatttgacttccctgcaaaccttggtatagatcacttccttttctgtaggaaaggaaaggcaccaaagagcacaatgagtacaagaaagcgtcgtggtggagcaataaattctagacaagctcagaagcgaactcgggaagcaacctccacccccgagatctccttggaagcagaacccatagaactcgtggaaactgctggagatgaaattgtggacctcacttgtgaatctttagagcctgtggtggttgatctgactcacaatgactctgttgtgattgttgacgaaagaagaagaccaaggaggaatgctaggaggctgccccaggaccatgctgacagctgtgtggtgagcagtgacgatgaggagttgtccagggacagagacgtatatgtgactacccatactcccagaaacgccagggatgagggcgctacaggcctcaggccctcaggtactgtcagttgtcccatctgcatggacggatactcagagatcgtgcagaatggacgtctcatcgtttccacagaatgcggccatgtcttctgtagccagtgcctccgtgattccctgaagaatgctaatacttgcccaacttgtaggaaaaagatcaaccacaaacggtaccaccccatttatatatgaagtattcagagccccccaggagagacggatggacagacagacagccaggttctccagtggtatctgcctccattttcctgagatcaaaaagactgtttcgaaaccaacatctgatatgtaaactgctcttttgtttccaaccccttccttttgttatctccagtttgatgctatggcgctggacccagggccctcccaggccatctctgttcctctggggtggtccagttctagagtgggagaaagggagtcaggcgcattgggaatcgtggttccagtctggttgcagaatctgcacatttgccaagaaattttccctgtttggaaagtttgccccagctttcccgggcacaccaccttttgtcccaagtgtctgccggtcgaccaatctgcctgccacacattgaccaagccagacccggttcacccagctcgaggatcccaggttgaagagtggccccttgaggccctggaaagaccaatcactggacttcttcccttgagagtcagaggtcacccgtgattctgcctgcaccttatcattgatctgcagtgatttctgcaaatcaagagaaactctgcagggcactcccctgtttcctaagaacgaaaaagtgcaataaaggccattcgttacctacttttcagcagcccacaagatgtagcactattagtgtccccctcagaggcttaatgttgcctgtggagcagtgcccatcccagcccgtttctgcccaccagttgttctcaggaaccttacccatgctccagcgtccttcacctggcacaggacatgcaagataaatagggcaggcacgtgtttgggtgtcctctcttttctgataaaatccatcccgtgtttgccacacgccctccagtcctcagttcccactgcctaacgtctgcccccgtgtagatactgagaggtggtggcagtaattgtggccttatcagccgctcagttccaggcttttgcccaggtcactgttgccccatgttcggagaacctggcccacctgtcttggctttctcatccttcccaacccagtgccgtttatttcagaagcttcctggccactgggcttggatgcttcgggcttctgactgctccataggttttgactggtgaaacaggggcccagatgacaacctctccttcgctccacaggtacgcgggagcctcaggttctctcaggggcagcaaagtggcccaagctgcccctgacagcacagggcctggggggtggctaacgagagaggccttacagtgccggcatgcctcctcttccactgtcgtccttcctcagagggcctcacgccaaacaaacggccttttcgtgtgaaacatcttcagggcgggaaaggggccacttctggctttgttagcaataactgaccttcagtttacccttctgaaggagcagggactcagcacagaattcactttagacggggctgaaggagtgtccctcctctatgtgaaaagaaaattgttttattcttcattctgactttttaactgtttggctcacttccagttagtttgaatgaaaataataattttctacttggagttgaagagggcagaatccgcagctctcatcattgtgatgtgtagcatgtctgccctctgactggacatcattgccattaactttcttctgggcatcacggcaatgtcacgatgcccagacttggagcaaggcaaccttggagtcagtccactcataaaatatggtaacacccattttaaaatttaagttttgtccttaaagacaacttcagtggttaattataaaagttgtgttacttcgtcctaaattaaattgatagaaagatttaaaaatgtgttttgtttctactattcagaaactgcgaactagggaaaggttggtatgaagaaatgtctttccttttttcaatgtacatagttcaactctttctttgttacatttaaactatatccatggatatcagtctgctttggactcctctgctagtgttacagatggaaataaaaccattaatttgaaccaaat

SEQ ID NO: 4886 - protein, 190 aa, Homo sapiens; identical to SEQ ID NO: 513

SEQ ID NO: 4887 - DNA, 2939 bp, Homo sapiens
gatggggggcggagccgaggcctccgaagcggaagtgggttgctgttgaggcggcggcatctttctcgaggagctctcctgggcggctgaagaaggagcttcttctccggagtgcgccggcggtggcgcctgcggacctaactagctccaggttaggccgagctttgcgggaaagcagcggacttgaaaatactggaaatctgtccggatccaaattattttgcaagccagatgagtaaccagagggcatgaaaggttgagaacatttgacttccctgcaaaccttggtatagatcacttccttttctgtaggaaaggaaaggcaccaaagagcacaatgagtacaagaaagcgtcgtggtggagcaataaattctagacaagctcagaagcgaactcgggaagcaacctccacccccgagatctccttggaagcagaacccatagaactcgtggaaactgctggagatgaaattgtggacctcacttgtgaatctttagagcctgtggtggttgatctgactcacaatgactctgttgtgaaagaagaagaccaaggaggaatgctaggaggctgccccaggaccatgctgacagctgtgtggtgagcagtgacgatgaggagttgtccagggacagagacgtatatgtgactacccatactcccagaaacgccagggatgagggcgctacaggcctcaggccctcaggtactgtcagttgtcccatctgcatggacggatactcagagatcgtgcagaatggacgtctcatcgtttccacagaatgcggccatgtcttctgtagccagtgcctccgtgattccctgaagaatgctaatacttgcccaacttgtaggaaaaagatcaaccacaaacggtaccaccccatttatatatgaagtattcagagccccccaggagagacggatggacagacagacagccaggttctccagtggtatctgcctccattttcctgagatcaaaaagactgtttcgaaaccaacatctgatatgtaaactgctcttttgtttccaaccccttccttttgttatctccagtttgatgctatggcgctggacccagggccctcccaggccatctctgttcctctggggtggtccagttctagagtgggagaaagggagtcaggcgcattgggaatcgtggttccagtctggttgcagaatctgcacatttgccaagaaattttccctgtttggaaagtttgccccagctttcccgggcacaccaccttttgtcccaagtgtctgccggtcgaccaatctgcctgccacacattgaccaagccagacccggttcacccagctcgaggatcccaggttgaagagtggccccttgaggccctggaaagaccaatcactggacttcttcccttgagagtcagaggtcacccgtgattctgcctgcaccttatcattgatctgcagtgatttctgcaaatcaagagaaactctgcagggcactcccctgtttcctaagaacgaaaaagtgcaataaaggccattcgttacctacttttcagcagcccacaagatgtagcactattagtgtccccctcagaggcttaatgttgcctgtggagcagtgcccatcccagcccgtttctgcccaccagttgttctcaggaaccttacccatgctccagcgtccttcacctggcacaggacatgcaagataaatagggcaggcacgtgtttgggtgtcctctcttttctgataaaatccatcccgtgtttgccacacgccctccagtcctcagttcccactgcctaacgtctgcccccgtgtagatactgagaggtggtggcagtaattgtggccttatcagccgctcagttccaggcttttgcccaggtcactgttgccccatgttcggagaacctggcccacctgtcttggctttctcatccttcccaacccagtgccgtttatttcagaagcttcctggccactgggcttggatgcttcgggcttctgactgctccataggttttgactggtgaaacaggggcccagatgacaacctctccttcgctccacaggtacgcgggagcctcaggttctctcaggggcagcaaagtggcccaagctgcccctgacagcacagggcctggggggtggctaacgagagaggccttacagtgccggcatgcctcctcttccactgtcgtccttcctcagagggcctcacgccaaacaaacggccttttcgtgtgaaacatcttcagggcgggaaaggggccacttctggctttgttagcaataactgaccttcagtttacccttctgaaggagcagggactcagcacagaattcactttagacggggctgaaggagtgtccctcctctatgtgaaaagaaaattgttttattcttcattctgactttttaactgtttggctcacttccagttagtttgaatgaaaataataattttctacttggagttgaagagggcagaatccgcagctctcatcattgtgatgtgtagcatgtctgccctctgactggacatcattgccattaactttcttctgggcatcacggcaatgtcacgatgcccagacttggagcaaggcaaccttggagtcagtccactcataaaatatggtaacacccattttaaaatttaagttttgtccttaaagacaacttcagtggttaattataaaagttgtgttacttcgtcctaaattaaattgatagaaagatttaaaaatgtgttttgtttctactattcagaaactgcgaactagggaaaggttggtatgaagaaatgtctttccttttttcaatgtacatagttcaactctttctttgttacatttaaactatatccatggatatcagtctgctttggactcctctgctagtgttacagatggaaataaaaccattaatttgaaccaaat

SEQ ID NO: 4888 - protein, 89 aa, Homo sapiens
MSTRKRRGGAINSRQAQKRTREATSTPEISLEAEPIELVETAGDEIVDLTCESLEPVVVDLTHNDSVVKEEDQGGMLGGCPRTMLTAVW

SEQ ID NO: 4889 - DNA, 2758 bp, Homo sapiens
gaagcggaagtgggttgctgttgaggcggcggcatctttctcgaggagctctcctgggcggctgaagaaggagcttcttctccggagtgcgccggcggtggcgcctgcggacctaactagctccaggttaggccgagctttgcgggaaagcagcgagaaagcgtcgtggtggagcaataaattctagacaagctcagaagcgaactcgggaagcaacctccacccccgagatctccttggaagcagaacccatagaactcgtggaaactgctggagatgaaattgtggacctcacttgtgaatctttagagcctgtggtggttgatctgactcacaatgactctgttgtgattgttgacgaaagaagaagaccaaggaggaatgctaggaggctgccccaggaccatgctgacagctgtgtggtgagcagtgacgatgaggagttgtccagggacagagacgtatatgtgactacccatactcccagaaacgccagggatgagggcgctacaggcctcaggccctcaggtactgtcagttgtcccatctgcatggacggatactcagagatcgtgcagaatggacgtctcatcgtttccacagaatgcggccatgtcttctgtagccagtgcctccgtgattccctgaagaatgctaatacttgcccaacttgtaggaaaaagatcaaccacaaacggtaccaccccatttatatatgaagtattcagagccccccaggagagacggatggacagacagacagccaggttctccagtggtatctgcctccattttcctgagatcaaaaagactgtttcgaaaccaacatctgatatgtaaactgctcttttgtttccaaccccttccttttgttatctccagtttgatgctatggcgctggacccagggccctcccaggccatctctgttcctctggggtggtccagttctagagtgggagaaagggagtcaggcgcattgggaatcgtggttccagtctggttgcagaatctgcacatttgccaagaaattttccctgtttggaaagtttgccccagctttcccgggcacaccaccttttgtcccaagtgtctgccggtcgaccaatctgcctgccacacattgaccaagccagacccggttcacccagctcgaggatcccaggttgaagagtggccccttgaggccctggaaagaccaatcactggacttcttcccttgagagtcagaggtcacccgtgattctgcctgcaccttatcattgatctgcagtgatttctgcaaatcaagagaaactctgcagggcactcccctgtttcctaagaacgaaaaagtgcaataaaggccattcgttacctacttttcagcagcccacaagatgtagcactattagtgtccccctcagaggcttaatgttgcctgtggagcagtgcccatcccagcccgtttctgcccaccagttgttctcaggaaccttacccatgctccagcgtccttcacctggcacaggacatgcaagataaatagggcaggcacgtgtttgggtgtcctctcttttctgataaaatccatcccgtgtttgccacacgccctccagtcctcagttcccactgcctaacgtctgcccccgtgtagatactgagaggtggtggcagtaattgtggccttatcagccgctcagttccaggcttttgcccaggtcactgttgccccatgttcggagaacctggcccacctgtcttggctttctcatccttcccaacccagtgccgtttatttcagaagcttcctggccactgggcttggatgcttcgggcttctgactgctccataggttttgactggtgaaacaggggcccagatgacaacctctccttcgctccacaggtacgcgggagcctcaggttctctcaggggcagcaaagtggcccaagctgcccctgacagcacagggcctggggggtggctaacgagagaggccttacagtgccggcatgcctcctcttccactgtcgtccttcctcagagggcctcacgccaaacaaacggccttttcgtgtgaaacatcttcagggcgggaaaggggccacttctggctttgttagcaataactgaccttcagtttacccttctgaaggagcagggactcagcacagaattcactttagacggggctgaaggagtgtccctcctctatgtgaaaagaaaattgttttattcttcattctgactttttaactgtttggctcacttccagttagtttgaatgaaaataataattttctacttggagttgaagagggcagaatccgcagctctcatcattgtgatgtgtagcatgtctgccctctgactggacatcattgccattaactttcttctgggcatcacggcaatgtcacgatgcccagacttggagcaaggcaaccttggagtcagtccactcataaaatatggtaacacccattttaaaatttaagttttgtccttaaagacaacttcagtggttaattataaaagttgtgttacttcgtcctaaattaaattgatagaaagatttaaaaatgtgttttgtttctactattcagaaactgcgaactagggaaaggttggtatgaagaaatgtctttccttttttcaatgtacatagttcaactctttctttgttacatttaaactatatccatggatatcagtctgctttggactcctctgctagtgttacagatggaaataaaaccattaatttgaaccaaat

SEQ ID NO: 4890 - protein, 55 aa, Homo sapiens
MDGYSEIVQNGRLIVSTECGHVFCSQCLRDSLKNANTCPTCRKKINHKRYHPIYI

SEQ ID NO: 4891 - DNA, 587 bp, Homo sapiens
ggcatctttctcgaggagctctcctgggcggctgaagaaggagcttcttctccggagtgcgccggcggtggcgcctgcggacctaactagctccaggttaggccgagctttgcgggaaagcagcggacttgaaaatactggaaatctgtccggatccaaattattttgcaagccagatgagtaaccagagggcatgaaaggttgagaacatttgacttccctgcaaaccttggtatagatcacttccttttctgtaggaaaggaaaggcaccaaagagcacaatgagtacagtaagttttatcatctcttgaatttttaattttgtagggctaattaactaccttattccttgtagcacattagtgaaagtgagttccataatgtcacttctaagtaaccccacttcttgaaggagtatgtataggagctttctggtggttacatcagcttacttaccgacattgagctacattcgagtcataaagggcagagccctgaagacaaaaggctgagaaggaatagcttagggtttggtaatctcagaccttcacaacagttgtcagtgtcatagaaatactaaaacttt

SEQ ID NO: 4892 - protein, 31 aa, Homo sapiens
MYRSFLVVTSAYLPTLSYIRVIKGRALKTKG

SEQ ID NO: 4893 - DNA, 2087 bp, Homo sapiens
agaagttaggaggtctgcgtctgggtctcggctcaccctggggggccgcggccatggggcttagttcctagcctaggaagggaaactgagactctgggaggggcaggaacgcccccaaggtcacttggaaagtcgggcaggatgtgctgttagggggaagacccgggcagggtttttgttccccgctgacgacgcctcctttgtgtgttcgcgccgccgccccgccatcgtggggcctgcgagtttgccggggtgcgtgggccgcgtggcggggccttttgtaggtcgggaggatctgagtacgggtgcgggcctgaccgtgggggcgccgaggtcgcagtctaaaacttagtagggcctcgatttccgggcgcgcttccgggccccggctggtggttggtggaacgtgcgactgtgaggcttgcggcccagccctgcaccgctcgggcccttcaccgctctggcgcgcctatagacaggtgtatgaagattctcacgacccgaaacagagttgctagtaaacaccgcttttccgcctttgatccatcgagggaagagggaaaaggatagagcttgggcaagccgttttggtggaatctcactctgtcacccaggatgcagtgcactggcgtgttctcggtctcactgtaacctctgccatctgggctcaagtgattctcctgcctcagcctccggagtagctgggattacaggacttgaaaatactggaaatctgtccggatccaaattattttgcaagccagatgagtaaccagagggcatgaaaggttgagaacatttgacttccctgcaaaccttggtatagatcacttccttttctgtaggaaaggaaaggcaccaaagagcacaatgagtacaagaaagcgtcgtggtggagcaataaattctagacaagctcagaagcgaactcgggaagcaacctccacccccgagatctccttggaagcagaacccatagaactcgtggaaactgctggagatgaaattgtggacctcacttgtgaatctttagagcctgtggtggttgatctgactcacaatgactctgttgtgaaagaagaagaccaaggaggaatgctaggaggctgccccaggaccatgctgacagctgtgtggtgagcagtgacgatgaggagttgtccagggacagagacgtatatgtgactacccatactcccagaaacgccagggatgagggcgctacaggcctcaggccctcaggtactgtcagttgtcccatctgcatggacggatactcagagatcgtgcagaatggacgtctcatcgtttccacagaatgcggccatgtcttctgtagccagtgcctccgtgattccctgaagaatgctaatacttgcccaacttgtaggaaaaagatcaaccacaaacggtaccaccccatttatatatgaagtattcagagccccccaggagagacggatggacagacagacagccaggttctccagtggtatctgcctccattttcctgagatcaaaaagactgtttcgaaaccaacatctgatatgtaaactgctcttttgtttccaaccccttccttttgttatctccagtttgatgctatggcgctggacccagggccctcccaggccatctctgttcctctggggtggtccagttctagagtgggagaaagggagtcaggcgcattgggaatcgtggttccagtctggttgcagaatctgcacatttgccaagaaattttccctgtttggaaagtttgccccagctttcccgggcacaccaccttttgtcccaagtgtctgccggtcgaccaatctgcctgccacacattgaccaagccagacccggttcacccagctcgaggatcccaggttgaagagtggccccttgaggccctggaaagaccaatcactggacttcttcccttgagagtcagaggtcacccgtgattctgcctgcaccttatcattgatctgcagtgatttctgcaaatcaagagaaactctgcagggcactcccctgtttcctaagaacgaaaaagtgcaataaaggccattcgttacctacttttcagcagccc

SEQ ID NO: 4894 - protein, 89 aa, Homo sapiens; identical to SEQ ID NO: 4888

SEQ ID NO: 4895 - DNA, 4122 bp, Homo sapiens
ctctttcaaaaacactctgccatcttttcaaggtatccgccatctctttcaagcatgtgaggagcttgataacttttgttgggggtcggtgttcagaatgacaagggtcttgcccaggctggagtgcagtagcacagtcataactcactctagcctcaacctcccagggcacaagcgatcctcccatcttagcctcctgagtaactgggactacaggcacgtgccaccacaccctgctaatttttttttttctttggtattaatattttgtagagaaggagtttcaccatgttgcccaggctggtccagaactcctgggctcaagcaatcctgccttggcttcccaaagtgctgggattacaggcatgagccaccatgcctggccctagagcttgataatttcattcattcattcttttttttttttttttttgagacaaagtctcagtctgtcacccaggttggagtgcaatggcgcaatcttggctcactgcaacttctgcctcccgagttcaaggggttctcctgcctcagcctcctgagtggcagggattacagatgcccaccaccatgcctggctaatttttgtatttttagtagaggtggggtttcaccatgttggccaggttggtctcaaactcccaacctcaggtaatctgcccaccttggcctcccagagtgctgggattacaggtgtgagctcagaccttgataatttcagtgaggaaaaaaaaaaaatctcatttacatgtttgtgccaagtgctgtgctagtgggtggggacaccatgataagtatttgataagttatgtttcttgatttaagggagtatagaagaaatggttaagtcaggactaggaggagtgagagaaatggaagcaacctttgaggtaggccctgaagaacgagcagaaattccctaaagcggggtgggagcggcaggaccaacctggccaacttcggaccttctttgaggtccaaagtcaggtactttgaactgacttccaggatacctggagtaaagtacagttctgtttgaagtgtttgtttggaaagatgagtttgttccagtgaggttgctgtattagagaaccacttgagagtttgctgcccacagtgtcatctgtgagaaatattaggtgaacgcaaaaagttgaggccagctgaaccaagccatgtaatatacacaccttccacatagatcagtcacctcagttgacttgtatgtgagccacatttgtgtccatctgatgttacagcattcactctctttgcctccacttctcaataactcacaatctgtaaactgactgaggcccgcttccacagagcaagcttcaggcctttttcaaggacttgaaaatactggaaatctgtccggatccaaattattttgcaagccagatgagtaaccagagggcatgaaaggttgagaacatttgacttccctgcaaaccttggtatagatcacttccttttctgtaggaaaggaaaggcaccaaagagcacaatgagtacaagaaagcgtcgtggtggagcaataaattctagacaagctcagaagcgaactcgggaagcaacctccacccccgagatctccttggaagcagaacccatagaactcgtggaaactgctggagatgaaattgtggacctcacttgtgaatctttagagcctgtggtggttgatctgactcacaatgactctgttgtgattgttgacgaaagaagaagaccaaggaggaatgctaggaggctgccccaggaccatgctgacagctgtgtggtgagcagtgacgatgaggagttgtccagggacagagacgtatatgtgactacccatactcccagaaacgccagggatgagggcgctacaggcctcaggccctcaggtactgtcagttgtcccatctgcatggacggatactcagagatcgtgcagaatggacgtctcatcgtttccacagaatgcggccatgtcttctgtagccagtgcctccgtgattccctgaagaatgctaatacttgcccaacttgtaggaaaaagatcaaccacaaacggtaccaccccatttatatatgaagtattcagagccccccaggagagacggatggacagacagacagccaggttctccagtggtatctgcctccattttcctgagatcaaaaagactgtttcgaaaccaacatctgatatgtaaactgctcttttgtttccaaccccttccttttgttatctccagtttgatgctatggcgctggacccagggccctcccaggccatctctgttcctctggggtggtccagttctagagtgggagaaagggagtcaggcgcattgggaatcgtggttccagtctggttgcagaatctgcacatttgccaagaaattttccctgtttggaaagtttgccccagctttcccgggcacaccaccttttgtcccaagtgtctgccggtcgaccaatctgcctgccacacattgaccaagccagacccggttcacccagctcgaggatcccaggttgaagagtggccccttgaggccctggaaagaccaatcactggacttcttcccttgagagtcagaggtcacccgtgattctgcctgcaccttatcattgatctgcagtgatttctgcaaatcaagagaaactctgcagggcactcccctgtttcctaagaacgaaaaagtgcaataaaggccattcgttacctacttttcagcagcccacaagatgtagcactattagtgtccccctcagaggcttaatgttgcctgtggagcagtgcccatcccagcccgtttctgcccaccagttgttctcaggaaccttacccatgctccagcgtccttcacctggcacaggacatgcaagataaatagggcaggcacgtgtttgggtgtcctctcttttctgataaaatccatcccgtgtttgccacacgccctccagtcctcagttcccactgcctaacgtctgcccccgtgtagatactgagaggtggtggcagtaattgtggccttatcagccgctcagttccaggcttttgcccaggtcactgttgccccatgttcggagaacctggcccacctgtcttggctttctcatccttcccaacccagtgccgtttatttcagaagcttcctggccactgggcttggatgcttcgggcttctgactgctccataggttttgactggtgaaacaggggcccagatgacaacctctccttcgctccacaggtacgcgggagcctcaggttctctcaggggcagcaaagtggcccaagctgcccctgacagcacagggcctggggggtggctaacgagagaggccttacagtgccggcatgcctcctcttccactgtcgtccttcctcagagggcctcacgccaaacaaacggccttttcgtgtgaaacatcttcagggcgggaaaggggccacttctggctttgttagcaataactgaccttcagtttacccttctgaaggagcagggactcagcacagaattcactttagacggggctgaaggagtgtccctcctctatgtgaaaagaaaattgttttattcttcattctgactttttaactgtttggctcacttccagttagtttgaatgaaaataataattttctacttggagttgaagagggcagaatccgcagctctcatcattgtgatgtgtagcatgtctgccctctgactggacatcattgccattaactttcttctgggcatcacggcaatgtcacgatgcccagacttggagcaaggcaaccttggagtcagtccactcataaaatatggtaacacccattttaaaatttaagttttgtccttaaagacaacttcagtggttaattataaaagttgtgttacttcgtcctaaattaaattgatagaaagatttaaaaatgtgttttgtttctactattcagaaactgcgaactagggaaaggttggtatgaagaaatgtctttccttttttcaatgtacatagttcaactctttctttgttacatttaaactatatccatggatatcagtctgctttggactcctctgctagtgttacagatggaaataaaaccattaatttgaaccaaat

SEQ ID NO: 4896 - protein, 190 aa, Homo sapiens; identical to SEQ ID NO: 513

SEQ ID NO: 4897 - DNA, 931 bp, Homo sapiens
ggtttttattcttgtgaaactttatgatacaagaaaataaaacaggccagccagattgcttgagcccaggagtaccagaccagcctggacaacatagtgagaccctgtctctataaataaaaaaattagccaagtgtgggaggctgaggtaggaggatcacttgagcctggaacattgaggctgcagtgagccgtgatcgtgccactgcactctagcctgggcaacagcaagaccccacctaaaaaataaataaaagaagttacgttgggttgggcgccatggctggctcctataatcccagcactttgggaggccgaggcgtgcagatcacctgaggtcaggagttcaagaccagcctggccaacatggcgaaaccccatctctactaaaaatgcaaaaattagacgggcgtgatctttgcatcccggggttcaagcaattctcctgcctcagcctcccgagtagctgggattacaggcatgtgccaccacacctcgctaattttgtatttttagtagaaacggagtttctccatgttggtcaggctggtctcgaactctcaacctcaggtgatccgcccacctcagcctcccaaagtgctgggattacaggtgtgaaccactgtgcctggcccattccgtgctttttaatattaatattaatagtaatcagaaataaaaatggttgtgcgtcattttttactttatataaatggaagttgtacgttaactgtttggtccatgtccttctcacctttatcctgtgcacatgtagacatcacagtataccctaagggctgaaaggcaagcttcacaacagatgcaacccattttgtatgttgaggttctagctatcagtatatatcactgttattctccatccaactagggagacaaacttgagagataaatggaaattaaaagtttgtcc

SEQ ID NO: 4898 - protein, 133 aa, Homo sapiens
MQKLDGRDLCIPGFKQFSCLSLPSSWDYRHVPPHLANFVFLVETEFLHVGQAGLELSTSGDPPTSASQSAGITGVNHCAWPIPCFLILILIVIRNKNGCASFFTLYKWKLYVNCLVHVLLTFILCTCRHHSIP

SEQ ID NO: 4899 - DNA, 1900 bp, Homo sapiens
agatcgtgcagaatggacgtctcatcgtttccacagaatgcggccatgtcttctgtagccagtgcctccgtgattccctgaagaatgctaatacttgcccaacttgtaggaaaaagatcaaccacaaacggtaccaccccatttatatatgaagtattcagagccccccaggagagacggatggacagacagacagccaggttctccagtggtatctgcctccattttcctgagatcaaaaagactgtttcgaaaccaacatctgatatgtaaactgctcttttgtttccaaccccttccttttgttatctccagtttgatgctatggccctggaaagaccaatcactggacttcttcccttgagagtcagaggtcacccgtgattctgcctgcaccttatcattgatctgcagtgatttctgcaaatcaagagaaactctgcagggcactcccctgtttcctaagaacgaaaaagtgcaataaaggccattcgttacctacttttcagcagcccacaagatgtagcactattagtgtccccctcagaggcttaatgttgcctgtggagcagtgcccatcccagcccgtttctgcccaccagttgttctcaggaaccttacccatgctccagcgtccttcacctggcacaggacatgcaagataaatagggcaggcacgtgtttgggtgtcctctcttttctgataaaatccatcccgtgtttgccacacgccctccagtcctcagttcccactgcctaacgtctgcccccgtgtagatactgagaggtggtggcagtaattgtggccttatcagccgctcagttccaggcttttgcccaggtcactgttgccccatgttcggagaacctggcccacctgtcttggctttctcatccttcccaacccagtgccgtttatttcagaagcttcctggccactgggcttggatgcttcgggcttctgactgctccataggttttgactggtgaaacaggggcccagatgacaacctctccttcgctccacaggtacgcgggagcctcaggttctctcaggggcagcaaagtggcccaagctgcccctgacagcacagggcctggggggtggctaacgagagaggccttacagtgccggcatgcctcctcttccactgtcgtccttcctcagagggcctcacgccaaacaaacggccttttcgtgtgaaacatcttcagggcgggaaaggggccacttctggctttgttagcaataactgaccttcagtttacccttctgaaggagcagggactcagcacagaattcactttagacggggctgaaggagtgtccctcctctatgtgaaaagaaaattgttttattcttcattctgactttttaactgtttggctcacttccagttagtttgaatgaaaataataattttctacttggagttgaagagggcagaatccgcagctctcatcattgtgatgtgtagcatgtctgccctctgactggacatcattgccattaactttcttctgggcatcacggcaatgtcacgatgcccagacttggagcaaggcaaccttggagtcagtccactcataaaatatggtaacacccattttaaaatttaagttttgtccttaaagacaacttcagtggttaattataaaagttgtgttacttcgtcctaaattaaattgatagaaagatttaaaaatgtgttttgtttctactattcagaaactgcgaactagggaaaggttggtatgaagaaatgtctttccttttttcaatgtacatagttcaactctttctttgttacatttaaactatatccatggatatcagtctgctttggactcctctgctagtgttacagatggaaataaaaccattaatttgaaccaaat

SEQ ID NO: 4900 - protein, 71 aa, Homo sapiens
MKYSEPPRRDGWTDRQPGSPVVSASIFLRSKRLFRNQHLICKLLFCFQPLPFVISSLMLWPWKDQSLDFFP

SEQ ID NO: 4901 - DNA, 4856 bp, Homo sapiens
cacaatgacatgcagacctgcatattggagctggacggagaaactgggctaatgtgacagacagcaacaagagtaaggcagttgcttcgctattgagagaaagaaccatatgaagaaatttcggcagaggcggaccgggaacctcagcagctgcagaactactggtcagaagtgcgctacacggtgcgctgcatctaccgccaggcaggaaccccgctggcagatgaccaggaccagtctctggtgcctgacaaggagggagtgaaggagctcgtggataggctctgcgagagggacccctaccagctgtaccagcgtctggaacagcaagctcgagagtatgtgctggagatgaaggtccgcctgctccggcagctgtcggctgcggccaaggtgaaggcaccatctggcctgcagggcccgccgcaagcgcaccagttcatctccctcctgcttgaggagtacggcgccctctgccaggccgcacgctccatcagcaccttccttggcactctggaaaatgaacacttgaaaaagttccaagtgacgtgggaactgcataataaacacctgtttgaaaatctggtcttttcggagccacttcttcagagcaacttgcccgcactggtgtcacagatcaggctaggaaccaccacacacgacacctgcagtgaggacacatacagtaccttgctgcagaggtaccagcgttccgaggaggagctgcgcagagtcgccgaggagtggctggagtgccagaagaggatcgacgcctatgtcgacgagcagatgacaatgaaaaccaagcagcgcatgttaacagaagactgggagctttttaaacaaagaagattcattgaagaacagttaaccaataagaaagcagttactggcgagaacaacttcacagacaccatgaggcacatgttatcgtcccggctgagcatgcccgactgccccaactgcaactacaggagaagatgtgcttgcgatgactgcagtctctcacacatcctcacgtgtggtatcatggacccccccgtcactgatgacatccacattcaccagctcccacttcaagtggatcctgctcctgactatcttgctgagaggagcccgcccagtgtgtcatctgcaagctcggggtccggctccagctctcccatcacaattcagcagcaccccaggctcatcctcacagacagtggctcggcaccaactttttgtagtgatgatgaagatgttgcaccattgtcagccaaatttgctgatatttatccattgagtaattatgatgataccgaggtggtggccaacatgaatggaatccacagcgaattgaatggtggcggggaaaacatggccctgaaggatgagtctcctcagataagcagtaccagcagtagttcctcagaagctgatgatgaagaagcggacggcgagagtagtggggagcccccaggggccccgaaggaagatggagtgctgggaagcaggagccccaggacagaggagagcaaagcagacagtccacccccatcctacccaacacagcaggctgaacaagctccaaacacttgtgaatgtcatgtttgtaagcaggaagcttctggactgacaccatctgcaatgacagccggagcccttcctcctggccatcagttcttgagcccagagaagcccacacaccctgcactgcacctttaccctcacatccatggacatgtgcctttgcacactgttccacacctgccacgccctctcatccaccccaccttgtatgcaacgccccccttcacacacagtaaggctttaccgccagcacctgttcagaatcacacaaataagcatcaggtattcaatgcatctcttcaagaccatatttatccgagctgttttgggaatactccagagtggaatagttctaaatttataagtctttggggatcagaagtgatgaatgataagaactggaatcctggcactttcttgccagatacaatttctgggagtgaaatattagggccaacactctcagaaacaagaccggaagcccttccacctccatctagcaatgaaacacctgcagtctcggatagtaaagagaaaaagaatgctgcaaaaaagaaatgtttatacaatttccaagatgctttcatggaagcaaataaagttgtcatggccacgtcatcagccacgtcctctgtgtcctgcacagctaccacagtgcagtccagcaacagccagttcagagtgtcatccaagagacctccttcagtaggtgacgtgtttcatggcatcagcaaggaggaccacagacactcggccccagccgccccgaggaatagccccacgggcttggcccccctcccagcgctctcgcctgctgcgctgtcacctgctgcgctctcacctgcctccacacctcaccttgcaaatcttgcagccccatcattccccaaaacagcaaccacaactcctgggtttgtggacacacgcaagagtttctgtcctgcacccctacccccggccacagatggctccattagcgcccctccaagtgtctgcagtgaccctgactgcgaagggcaccgctgcgagaatggtgtctacgacccacagcaggatgatggggacgagagtgcagatgaggacagctgctctgagcacagctccagcacctcgacctccaccaaccagaaggagggcaagtactgcgactgctgctactgcgaattctttgggcacggcgggcctccagctgcaccaacaagtagaaattatgcagaaatgagggaaaagcttcgcttacggctgaccaagaggaaagaggagcaacctaaaaaaatggaccagatctcagaaagggaaagcgtcgttgaccatcggagggtggaggatttgttgcagtttataaatagctccgaaaccaaaccagtgagcagcacgcgtgcagcgaagcgagcaaggcataagcaaaggaagctggaggagaaagctcgcctagaagcagaggccagggcccgggagcacctgcacctccaggaggagcagaggcggcgggaggaggaggaggatgaggaagaagaggaggatcgtttcaaggaggaatttcagcggcttcaggagcttcagaagctaagagctgtaaaaaagaagaagaaggagaggccaagtaaagactgccccaagttggacatgctcactagaaatttccaggcagcaacagagtctgttcctaactctggaaacatccacaatggctcactagagcaaactgaagaaccagaaacctcttctcactccccatccaggcatatgaaccactcagagcccaggccagggctaggggctgatggggatgctgcagaccccgtcgacaccagagactccaaatttctcctccccaaggaggtgaatgggaagcagcatgagccactctcttttttcttcgacatcatgcagcaccataaagaaggaaatggcaagcagaagctgaggcagaccagcaaggccagcagcgagccagcgaggaggcccacagagccccccaaggccacagaggggcagtccaagccccgggcccagactgagtcaaaggctaaggtggtcgacctcatgtccatcacagagcagaaaagagaggagagaaaagtcaacagtaataacaataacaaaaagcagctgaaccacatcaaggacgaaaagtcaaacccaacccctatggagcccacctctcccggtgagcatcagcagaacagcaagctggtgctggcagagtcccctcagccaaagggcaagaacaagaaaaataagaagaagaaaggagacagagtcaacaattcaattgatggagtttcgctcttgttgcccagtctggggtacaatggtgcaatcttggctcactgcaaccttcgcctcccaggttcaagcgattgtgctgcctcagcctcccaagtagttggaattacagatgatgtctttctacctaaagatattgacctagacagtgtggatatggatgagacagagagggaagtggaatatttcaaaaggttctgcttggattctgctagacagacccgacaaagactgtctatcaactggtccaattttagcttgaaaaaagccacctttgctgcccactgaatgaggactccctggagagggacacgcgagaggcaggccaggctgcaccaccccaagagccacgcccctcgctggcgccccagagccgtggtgcttgccaagggctgtgcggagctggtgctgcctgaaaccccagaccgagaagttgatgctcggcccacgccgttagctcgtgtgcgtgtagtctgtgcgtgagactccttcgattgtagctctgtgctgtcggattggaacagtagttcccgccaagtcctcccaccaccgcggcctcggaggcctgggccgtggccagataggagtttgcatcatccacgtggctccgttgcctctgcattgcgccctgtcctgtcatgtgtcctcaccggggtatcggccgtcactcagctctcctgtgcccctgcgtctcaccctaggcgggctgggcggggcaggcctcctttgttctccacaatctactgtctccgagtgtacacgttgcgctgtttgtgtttgatccccctgacttgtagccagcttgtgtaagatcccttgcagaacgagaaagttaaaaacaagcccacccagtactcacaccatcaagtctgttatagagtgtacgactgtattaacacggaggcctgcctggctacttttttaacatattgttaagtaatattaaaatcatgtctttctttttgaaagatggaatacattagtacagcaggaga

SEQ ID NO: 4902 - protein, 1265 aa, Homo sapiens
MKVRLLRQLSAAAKVKAPSGLQGPPQAHQFISLLLEEYGALCQAARSISTFLGTLENEHLKKFQVTWELHNKHLFENLVFSEPLLQSNLPALVSQIRLGTTTHDTCSEDTYSTLLQRYQRSEEELRRVAEEWLECQKRIDAYVDEQMTMKTKQRMLTEDWELFKQRRFIEEQLTNKKAVTGENNFTDTMRHMLSSRLSMPDCPNCNYRRRCACDDCSLSHILTCGIMDPPVTDDIHIHQLPLQVDPAPDYLAERSPPSVSSASSGSGSSSPITIQQHPRLILTDSGSAPTFCSDDEDVAPLSAKFADIYPLSNYDDTEVVANMNGIHSELNGGGENMALKDESPQISSTSSSSSEADDEEADGESSGEPPGAPKEDGVLGSRSPRTEESKADSPPPSYPTQQAEQAPNTCECHVCKQEASGLTPSAMTAGALPPGHQFLSPEKPTHPALHLYPHIHGHVPLHTVPHLPRPLIHPTLYATPPFTHSKALPPAPVQNHTNKHQVFNASLQDHIYPSCFGNTPEWNSSKFISLWGSEVMNDKNWNPGTFLPDTISGSEILGPTLSETRPEALPPPSSNETPAVSDSKEKKNAAKKKCLYNFQDAFMEANKVVMATSSATSSVSCTATTVQSSNSQFRVSSKRPPSVGDVFHGISKEDHRHSAPAAPRNSPTGLAPLPALSPAALSPAALSPASTPHLANLAAPSFPKTATTTPGFVDTRKSFCPAPLPPATDGSISAPPSVCSDPDCEGHRCENGVYDPQQDDGDESADEDSCSEHSSSTSTSTNQKEGKYCDCCYCEFFGHGGPPAAPTSRNYAEMREKLRLRLTKRKEEQPKKMDQISERESVVDHRRVEDLLQFINSSETKPVSSTRAAKRARHKQRKLEEKARLEAEARAREHLHLQEEQRRREEEEDEEEEEDRFKEEFQRLQELQKLRAVKKKKKERPSKDCPKLDMLTRNFQAATESVPNSGNIHNGSLEQTEEPETSSHSPSRHMNHSEPRPGLGADGDAADPVDTRDSKFLLPKEVNGKQHEPLSFFFDIMQHHKEGNGKQKLRQTSKASSEPARRPTEPPKATEGQSKPRAQTESKAKVVDLMSITEQKREERKVNSNNNNKKQLNHIKDEKSNPTPMEPTSPGEHQQNSKLVLAESPQPKGKNKKNKKKKGDRVNNSIDGVSLLLPSLGYNGAILAHCNLRLPGSSDCAASASQVVGITDDVFLPKDIDLDSVDMDETEREVEYFKRFCLDSARQTRQRLSINWSNFSLKKATFAAH

SEQ ID NO: 4903 - DNA, 4686 bp, Homo sapiens
cacaatgacatgcagacctgcatattggagctggacggagaaactgggctaatgtgacagacagcaacaagagtaaggcagttgcttcgctattgagagaaagaaccatatgaagaaatttcggcagaggcggaccgggaacctcagcagctgcagaactactggtcagaagtgcgctacacggtgcgctgcatctaccgccaggcaggaaccccgctggcagatgaccaggaccagtctctggtgcctgacaaggagggagtgaaggagctcgtggataggctctgcgagagggacccctaccagctgtaccagcgtctggaacagcaagctcgagagtatgtgctggagatgaaggtccgcctgctccggcagctgtcggctgcggccaaggtgaaggcaccatctggcctgcagggcccgccgcaagcgcaccagttcatctccctcctgcttgaggagtacggcgccctctgccaggccgcacgctccatcagcaccttccttggcactctggaaaatgaacacttgaaaaagttccaagtgacgtgggaactgcataataaacacctgtttgaaaatctggtcttttcggagccacttcttcagagcaacttgcccgcactggtgtcacagatcaggctaggaaccaccacacacgacacctgcagtgaggacacatacagtaccttgctgcagaggtaccagcgttccgaggaggagctgcgcagagtcgccgaggagtggctggagtgccagaagaggatcgacgcctatgtcgacgagcagatgacaatgaaaaccaagcagcgcatgttaacagaagactgggagctttttaaacaaagaagattcattgaagaacagttaaccaataagaaagcagttactggcgagaacaacttcacagacaccatgaggcacatgttatcgtcccggctgagcatgcccgactgccccaactgcaactacaggagaagatgtgcttgcgatgactgcagtctctcacacatcctcacgtgtggtatcatggacccccccgtcactgatgacatccacattcaccagctcccacttcaagtggatcctgctcctgactatcttgctgagaggagcccgcccagtgtgtcatctgcaagctcggggtccggctccagctctcccatcacaattcagcagcaccccaggctcatcctcacagacagtggctcggcaccaactttttgtagtgatgatgaagatgttgcaccattgtcagccaaatttgctgatatttatccattgagtaattatgatgataccgaggtggtggccaacatgaatggaatccacagcgaattgaatggtggcggggaaaacatggccctgaaggatgagtctcctcagataagcagtaccagcagtagttcctcagaagctgatgatgaagaagcggacggcgagagtagtggggagcccccaggggccccgaaggaagatggagtgctgggaagcaggagccccaggacagaggagagcaaagcagacagtccacccccatcctacccaacacagcaggctgaacaagctccaaacacttgtgaatgtcatgtttgtaagcaggaagcttctggactgacaccatctgcaatgacagccggagcccttcctcctggccatcagttcttgagcccagagaagcccacacaccctgcactgcacctttaccctcacatccatggacatgtgcctttgcacactgttccacacctgccacgccctctcatccaccccaccttgtatgcaacgccccccttcacacacagtaaggctttaccgccagcacctgttcagaatcacacaaataagcatcaggtattcaatgcatctcttcaagaccatatttatccgagctgttttgggaatactccagagtggaatagttctaaatttataagtctttggggatcagaagtgatgaatgataagaactggaatcctggcactttcttgccagatacaatttctgggagtgaaatattagggccaacactctcagaaacaagaccggaagcccttccacctccatctagcaatgaaacacctgcagtctcggatagtaaagagaaaaagaatgctgcaaaaaagaaatgtttatacaatttccaagatgctttcatggaagcaaataaagttgtcatggccacgtcatcagccacgtcctctgtgtcctgcacagctaccacagtgcagtccagcaacagccagttcagagtgtcatccaagagacctccttcagtaggtgacgtgtttcatggcatcagcaaggaggaccacagacactcggccccagccgccccgaggaatagccccacgggcttggcccccctcccagcgctctcgcctgctgcgctgtcacctgctgcgctctcacctgcctccacacctcaccttgcaaatcttgcagccccatcattccccaaaacagcaaccacaactcctgggtttgtggacacacgcaagagtttctgtcctgcacccctacccccggccacagatggctccattagcgcccctccaagtgtctgcagtgaccctgactgcgaagggcaccgctgcgagaatggtgtctacgacccacagcaggatgatggggacgagagtgcagatgaggacagctgctctgagcacagctccagcacctcgacctccaccaaccagaaggaggcctccagctgcaccaacaagtagaaattatgcagaaatgagggaaaagcttcgcttacggctgaccaagaggaaagaggagcaacctaaaaaaatggaccagatctcagaaagggaaagcgtcgttgaccatcggagggtggaggatttgttgcagtttataaatagctccgaaaccaaaccagtgagcagcacgcgtgcagcgaagcgagcaaggcataagcaaaggaagctggaggagaaagctcgcctagaagcagaggccagggcccgggagcacctgcacctccaggaggagcagaggcggcgggaggaggaggaggatgaggaagaagaggaggatcgtttcaaggaggaatttcagcggcttcaggagcttcagaagctaagagctgtaaaaaagaagaagaaggagaggccaagtaaagactgccccaagttggacatgctcactagaaatttccaggcagcaacagagtctgttcctaactctggaaacatccacaatggctcactagagcaaactgaagaaccagaaacctcttctcactccccatccaggcatatgaaccactcagagcccaggccagggctaggggctgatggggatgctgcagaccccgtcgacaccagagactccaaatttctcctccccaaggaggtgaatgggaagcagcatgagccactctcttttttcttcgacatcatgcagcaccataaagaaggaaatggcaagcagaagctgaggcagaccagcaaggccagcagcgagccagcgaggaggcccacagagccccccaaggccacagaggggcagtccaagccccgggcccagactgagtcaaaggctaaggtggtcgacctcatgtccatcacagagcagaaaagagaggagagaaaagtcaacagtaataacaataacaaaaagcagctgaaccacatcaaggacgaaaagtcaaacccaacccctatggagcccacctctcccggtgagcatcagcagaacagcaagctggtgctggcagagtcccctcagccaaagggcaagaacaagaaaaataagaagaagaaaggagacagagtcaacaattcaattgatgatgtctttctacctaaagatattgacctagacagtgtggatatggatgagacagagagggaagtggaatatttcaaaaggttctgcttggattctgctagacagacccgacaaagactgtctatcaactggtccaattttagcttgaaaaaagccacctttgctgcccactgaatgaggactccctggagagggacacgcgagaggcaggccaggctgcaccaccccaagagccacgcccctcgctggcgccccagagccgtggtgcttgccaagggctgtgcggagctggtgctgcctgaaaccccagaccgagaagttgatgctcggcccacgccgttagctcgtgtgcgtgtagtctgtgcgtgagactccttcgattgtagctctgtgctgtcggattggaacagtagttcccgccaagtcctcccaccaccgcggcctcggaggcctgggccgtggccagataggagtttgcatcatccacgtggctccgttgcctctgcattgcgccctgtcctgtcatgtgtcctcaccggggtatcggccgtcactcagctctcctgtgcccctgcgtctcaccctaggcgggctgggcggggcaggcctcctttgttctccacaatctactgtctccgagtgtacacgttgcgctgtttgtgtttgatccccctgacttgtagccagcttgtgtaagatcccttgcagaacgagaaagttaaaaacaagcccacccagtactcacaccatcaagtctgttatagagtgtacgactgtattaacacggaggcctgcctggctacttttttaacatattgttaagtaatattaaaatcatgtctttctttttgaaagatggaatacattagtacagcaggaga

SEQ ID NO: 4904 - protein, 792 aa, Homo sapiens
MKVRLLRQLSAAAKVKAPSGLQGPPQAHQFISLLLEEYGALCQAARSISTFLGTLENEHLKKFQVTWELHNKHLFENLVFSEPLLQSNLPALVSQIRLGTTTHDTCSEDTYSTLLQRYQRSEEELRRVAEEWLECQKRIDAYVDEQMTMKTKQRMLTEDWELFKQRRFIEEQLTNKKAVTGENNFTDTMRHMLSSRLSMPDCPNCNYRRRCACDDCSLSHILTCGIMDPPVTDDIHIHQLPLQVDPAPDYLAERSPPSVSSASSGSGSSSPITIQQHPRLILTDSGSAPTFCSDDEDVAPLSAKFADIYPLSNYDDTEVVANMNGIHSELNGGGENMALKDESPQISSTSSSSSEADDEEADGESSGEPPGAPKEDGVLGSRSPRTEESKADSPPPSYPTQQAEQAPNTCECHVCKQEASGLTPSAMTAGALPPGHQFLSPEKPTHPALHLYPHIHGHVPLHTVPHLPRPLIHPTLYATPPFTHSKALPPAPVQNHTNKHQVFNASLQDHIYPSCFGNTPEWNSSKFISLWGSEVMNDKNWNPGTFLPDTISGSEILGPTLSETRPEALPPPSSNETPAVSDSKEKKNAAKKKCLYNFQDAFMEANKVVMATSSATSSVSCTATTVQSSNSQFRVSSKRPPSVGDVFHGISKEDHRHSAPAAPRNSPTGLAPLPALSPAALSPAALSPASTPHLANLAAPSFPKTATTTPGFVDTRKSFCPAPLPPATDGSISAPPSVCSDPDCEGHRCENGVYDPQQDDGDESADEDSCSEHSSSTSTSTNQKEASSCTNK

SEQ ID NO: 4905 - DNA, 4733 bp, Homo sapiens
cacaatgacatgcagacctgcatattggagctggacggagaaactgggctaatgtgacagacagcaacaagagtaaggcagttgcttcgctattgagagaaagaaccatatgaagaaatttcggcagaggcggaccgggaacctcagcagctgcagaactactggtcagaagtgcgctacacggtgcgctgcatctaccgccaggcaggaaccccgctggcagatgaccaggaccagtctctggtgcctgacaaggagggagtgaaggagctcgtggataggctctgcgagagggacccctaccagctgtaccagcgtctggaacagcaagctcgagagtatgtgctggagatgaaggtccgcctgctccggcagctgtcggctgcggccaaggtgaaggcaccatctggcctgcagggcccgccgcaagcgcaccagttcatctccctcctgcttgaggagtacggcgccctctgccaggccgcacgctccatcagcaccttccttggcactctggaaaatgaacacttgaaaaagttccaagtgacgtgggaactgcataataaacacctgtttgaaaatctggtcttttcggagccacttcttcagagcaacttgcccgcactggtgtcacagatcaggctaggaaccaccacacacgacacctgcagtgaggacacatacagtaccttgctgcagaggtaccagcgttccgaggaggagctgcgcagagtcgccgaggagtggctggagtgccagaagaggatcgacgcctatgtcgacgagcagatgacaatgaaaaccaagcagcgcatgttaacagaagactgggagctttttaaacaaagaagattcattgaagaacagttaaccaataagaaagcagttactggcgagaacaacttcacagacaccatgaggcacatgttatcgtcccggctgagcatgcccgactgccccaactgcaactacaggagaagatgtgcttgcgatgactgcagtctctcacacatcctcacgtgtggtatcatggacccccccgtcactgatgacatccacattcaccagctcccacttcaagtggatcctgctcctgactatcttgctgagaggagcccgcccagtgtgtcatctgcaagctcggggtccggctccagctctcccatcacaattcagcagcaccccaggctcatcctcacagacagtggctcggcaccaactttttgtagtgatgatgaagatgttgcaccattgtcagccaaatttgctgatatttatccattgagtaattatgatgataccgaggtggtggccaacatgaatggaatccacagcgaattgaatggtggcggggaaaacatggccctgaaggatgagtctcctcagataagcagtaccagcagtagttcctcagaagctgatgatgaagaagcggacggcgagagtagtggggagcccccaggggccccgaaggaagatggagtgctgggaagcaggagccccaggacagaggagagcaaagcagacagtccacccccatcctacccaacacagcaggctgaacaagctccaaacacttgtgaatgtcatgtttgtaagcaggaagcttctggactgacaccatctgcaatgacagccggagcccttcctcctggccatcagttcttgagcccagagaagcccacacaccctgcactgcacctttaccctcacatccatggacatgtgcctttgcacactgttccacacctgccacgccctctcatccaccccaccttgtatgcaacgccccccttcacacacagtaaggctttaccgccagcacctgttcagaatcacacaaataagcatcaggtattcaatgcatctcttcaagaccatatttatccgagctgttttgggaatactccagagtggaatagttctaaatttataagtctttggggatcagaagtgatgaatgataagaactggaatcctggcactttcttgccagatacaatttctgggagtgaaatattagggccaacactctcagaaacaagaccggaagcccttccacctccatctagcaatgaaacacctgcagtctcggatagtaaagagaaaaagaatgctgcaaaaaagaaatgtttatacaatttccaagatgctttcatggaagcaaataaagttgtcatggccacgtcatcagccacgtcctctgtgtcctgcacagctaccacagtgcagtccagcaacagccagttcagagtgtcatccaagagacctccttcagtaggtgacgtgtttcatggcatcagcaaggaggaccacagacactcggccccagccgccccgaggaatagccccacgggcttggcccccctcccagcgctctcgcctgctgcgctgtcacctgctgcgctctcacctgcctccacacctcaccttgcaaatcttgcagccccatcattccccaaaacagcaaccacaactcctgggtttgtggacacacgcaagagtttctgtcctgcacccctacccccggccacagatggctccattagcgcccctccaagtgtctgcagtgaccctgactgcgaagggcaccgctgcgagaatggtgtctacgacccacagcaggatgatggggacgagagtgcagatgaggacagctgctctgagcacagctccagcacctcgacctccaccaaccagaaggagggcaagtactgcgactgctgctactgcgaattctttgggcacggcgggcctccagctgcaccaacaagtagaaattatgcagaaatgagggaaaagcttcgcttacggctgaccaagaggaaagaggagcaacctaaaaaaatggaccagatctcagaaagggaaagcgtcgttgaccatcggagggtggaggatttgttgcagtttataaatagctccgaaaccaaaccagtgagcagcacgcgtgcagcgaagcgagcaaggcataagcaaaggaagctggaggagaaagctcgcctagaagcagaggccagggcccgggagcacctgcacctccaggaggagcagaggcggcgggaggaggaggaggatgaggaagaagaggaggatcgtttcaaggaggaatttcagcggcttcaggagcttcagaagctaagagctgtaaaaaagaagaagaaggagaggccaagtaaagactgccccaagttggacatgctcactagaaatttccaggcagcaacagagtctgttcctaactctggaaacatccacaatggctcactagagcaaactgaagaaccagaaacctcttctcactccccatccaggcatatgaaccactcagagcccaggccagggctaggggctgatggggatgctgcagaccccgtcgacaccagagactccaaatttctcctccccaaggaggtgaatgggaagcagcatgagccactctcttttttcttcgacatcatgcagcaccataaagaaggaaatggcaagcagaagctgaggcagaccagcaaggccagcagcgagccagcgaggaggcccacagagccccccaaggccacagaggggcagtccaagccccgggcccagactgagtcaaaggctaaggtggtcgacctcatgtccatcacagagcagaaaagagaggagagaaaagtcaacagtaataacaataacaaaaagcagctgaaccacatcaaggacgaaaagtcaaacccaacccctatggagcccacctctcccggtgagcatcagcagaacagcaagctggtgctggcagagtcccctcagccaaagggcaagaacaagaaaaataagaagaagaaaggagacagagtcaacaattcaattgatgatgtctttctacctaaagatattgacctagacagtgtggatatggatgagacagagagggaagtggaatatttcaaaaggttctgcttggattctgctagacagacccgacaaagactgtctatcaactggtccaattttagcttgaaaaaagccacctttgctgcccactgaatgaggactccctggagagggacacgcgagaggcaggccaggctgcaccaccccaagagccacgcccctcgctggcgccccagagccgtggtgcttgccaagggctgtgcggagctggtgctgcctgaaaccccagaccgagaagttgatgctcggcccacgccgttagctcgtgtgcgtgtagtctgtgcgtgagactccttcgattgtagctctgtgctgtcggattggaacagtagttcccgccaagtcctcccaccaccgcggcctcggaggcctgggccgtggccagataggagtttgcatcatccacgtggctccgttgcctctgcattgcgccctgtcctgtcatgtgtcctcaccggggtatcggccgtcactcagctctcctgtgcccctgcgtctcaccctaggcgggctgggcggggcaggcctcctttgttctccacaatctactgtctccgagtgtacacgttgcgctgtttgtgtttgatccccctgacttgtagccagcttgtgtaagatcccttgcagaacgagaaagttaaaaacaagcccacccagtactcacaccatcaagtctgttatagagtgtacgactgtattaacacggaggcctgcctggctacttttttaacatattgttaagtaatattaaaatcatgtctttctttttgaaagatggaatacattagtacagcaggaga

SEQ ID NO: 4906 - protein, 1224 aa, Homo sapiens; identical to SEQ ID NO: 515

SEQ ID NO: 4907 - DNA, 537 bp, Homo sapiens
cattttgcaggtagggagggaaaagactcatggggcagatccgggacattctggtgttgactgccgtgcagggttctccctgggacccaagtcaagaacatcccagggagtggtgacctggacacactactggccctcctgcacggccacagccctgaagagcctctgccgaagatgcccacttcctggagaaggttaatgcccactgtcctagcttcccccaactcctgctccctctaccagaacagcaaacttgtgaaaatgggctggtgcacccacagatggcagaggggaatgcagctttcagcgccctctctgctgtgctgcccccacatggcacagctgcagcccctgggatgctccaggcctcacgagatgaaggctgctgaggtgctgctgcagcaggagactctgccctccccacctggcatccagaccctgctctcacagtagtccaggctaagaagtcgctggtcagtgacaagccacagcaggaaagtcttccactgaagctgatgcaggttcaaaaaaagccag

SEQ ID NO: 4908 - protein, 92 aa, Homo sapiens
MPTSWRRLMPTVLASPNSCSLYQNSKLVKMGWCTHRWQRGMQLSAPSLLCCPHMAQLQPLGCSRPHEMKAAEVLLQQETLPSPPGIQTLLSQ

SEQ ID NO: 4909 - DNA, 512 bp, Homo sapiens
gaaatgcttttggcagagtttctcataagccccagcatttctaaaggttggtggtgggtggagccgtgctcctaacactgatgagttctcccttccccgtccacctttgtaactccttagacagtaagaacctggaccccatcatccatggtgcctttactgacttgctgagtcctacaacacaggtaaagggttcagaagtccctgcccttacccgatggaaaactccgggcatgctttcggtatttgttcagttctttttgtctttagcctcagggtgtggtgattacactgaatttacaaatgacttaaattagttcttttcacctttagtacaattacgttattgattgaaaacacacctgattgcgtttttccatttgtgttccatttgttttctcccctacccagttcctctttttttttaatctgttcccacccactccctgtaggtaactaatcagtttcttatttgcttttcttttttacataaaaggtagtgtattatagac

SEQ ID NO: 4910 - protein, 78 aa, Homo sapiens
MSSPFPVHLCNSLDSKNLDPIIHGAFTDLLSPTTQVKGSEVPALTRWKTPGMLSVFVQFFLSLASGCGDYTEFTNDLN

SEQ ID NO: 4911 - DNA, 468 bp, Homo sapiens
gggccggcatctacgttcttgacagccttccgggtgaccctcacatatgctgatggttgaacacactggagtggtatgcttttgagaagaaaagtaacattttacatacttgctgttttcctgatgggcaagttttatcagtgcttgttctataatgttttaactactatgtgaattattaatggcaacaaaattttatttattttatttttaagagggaatctcactctatcacccaggctggagttgcagtgagccgacatagcaccattgcactccagcctgggaaacagagagagactttgtctcaggaaaaaaaaaaaaaaaaagccaggcatgcacttgtagtccaagctactcaggaggctgaggccagaggatcacttgaacctaggagtttgaggttgcagtgaactatgatcacggcacttgcactctagcctgggcaacagagcaagaccctgtctg

SEQ ID NO: 4912 - protein, 32 aa, Homo sapiens
MLLRRKVTFYILAVFLMGKFYQCLFYNVLTTM

SEQ ID NO: 4913 - DNA, 915 bp, Homo sapiens
agaatttaagctttccagtcaatgaagctttacattattggcagaaatcatgtcaacaaacagaaaagcgggctgagaaagtgcatatcgttatcaagggttacggaagagaggaattcagtcaactgagaaggtttttttattatgaattttttaactttttgaggttgcaatgagccgagatcgcgtcactgcactccagcctggcaacagcaagactccgtctcaaaaaaaaaaaaattgtgaccaattgctgttagttttaaactggtgcatgaaggtgagttctctccctggccctcaagagatttggaagtttgttttagagagtgctctcagtcacttaaggatgtaaatcttacttacttatttatttattattttttgagacacagtctctcactctgtcatccagggaattagcagcattcccgctgagactggatttgaaacaaagttacagttccttagagccactacagatttctttcctcaatggatacctttagcttaggataaccactaataggaattaatttgaatttacttgaaattatttatgactcttgaccatttgggatacccatttgtcatcttttctactaaaggaaactaaaatattgctctctcaaatactgggtattgttgagctgaagacagagtgcaggggctctctctacctctcctttgtttgcctaaaggtaggacataaatccttttttactgaagacagctactccgcagcccacagatggtgccagtggggcagaggaatctgtgagcagactttaaaccccaaaagactttctaaaaatgaagtctcagttcaggccgaagtgaagtggcttgatcacagttcattgctgggactacagatgcgccaccatgcctagctaattaaaaaaaaaaaaatta

SEQ ID NO: 4914 - protein, 60 aa, Homo sapiens [sequence omitted]

SEQ ID NO: 4915 - DNA, 1432 bp, Homo sapiens
tgaagacctcaatgccaagtggcagcgctacaacgccagcagggacgaatacgtgagggggctccatgcgcagctcagggggctgcagatcccccacgagcccgagctgatgaggaaggagatctcccggctcaacagacagttggaagagaaaataaatgactgtgccgaagtgaagcaggagctggcggcctccaggacggcccgggatgctgcgttggagcgggtgcagatgctggaacagcaggtgtctgtccctcgggctccggacggcactgaccagatgtctgctggccggtggtggccgaaatcatgggacaggctgggctgaaggcttggtggcactgagtgggcagtggtcactgtgggggtgggagaagcctggtggggcgcttcctccttccttgagcagaaatgtgtgtctcgcctctcttcagattctcgcttacaaggatgacttcatgtcagaaagggccgatcgggaacgggctcaaagtaggattcaagaactggaggaaaaggtcgcctctttgctgcaccaggtgtcctggagacaggattctcgagagccagacgccggccggattcacgctgggagcaaaactgccaagtatttggccgccgacgcattagagcttatggtgcctggtggctggaggcctgggactgggtcccagcagccagaaccccctgcagagggcgggcatcctggcgcggcccagagaggccagggggaccttcagtgccctcactgcctgcagtgcttcagtgacgagcaaggggaagagctcctcaggcatgtggctgagtgctgccagtgaccgagactcacccgtgcccttgcggcctcctggcccggtgcagctgccctcagggacagggtgggtgctctcagatgccatgggttgagctctactgagagccaaggcccctagaatagttgcggggcactctgatcgttcactttggtccctttggctatggaacaggctgggtcacagggaactgccagtgaggctggaggctggaggtggagatggggtcaggaacatctggcagagggaggtcccagtctgtgtctccatcaggcttaagccagagctatctggtgctggtgtgccagcccctcccccagcctgcctagaaaggggtggctgcctgagggagtcacttgtatggtccccagggtgggagccccatcctgttctatggaataaagcgtcgcctctctgcctcgaaccagtcaaatggagtattgcggctgcacgtcacactagggtggccacccccgccattgcgagccacatgtctgcactgagaaactgcatttcagtagcatttgtcatccagccggaagttaaagcacacttactttattcacctatttttataataaacgttcttgctgctgtgactgctctgagaatttgtg

SEQ ID NO: 4916 - protein, 203 aa, Homo sapiens
MLRWSGCRCWNSRCLSLGLRTALTRCLLAGGGRNHGTGWAEGLVALSGQWSLWGWEKPGGALPPSLSRNVCLASLQILAYKDDFMSERADRERAQSRIQELEEKVASLLHQVSWRQDSREPDAGRIHAGSKTAKYLAADALELMVPGGWRPGTGSQQPEPPAEGGHPGAAQRGQGDLQCPHCLQCFSDEQGEELLRHVAECCQ

SEQ ID NO: 4917 - DNA, 1464 bp, Homo sapiens
gggttggtttgggttgtggcttcggtgactcctgaccctgcgtggggcagaggttagattcctgtgtccagaatcacctggttgaacccgattgtctgcagacaggacagtgtcatgggctccaaaggagtcggaacacacagatgggcacacctctgtccagagtgttattgagaagttgcaggaagaaaatcgactgttaaaacagaaggtgactcacgttgaagacctcaatgccaagtggcagcgctacaacgccagcagggacgaatacgtgagggggctccatgcgcagctcagggggctgcagatcccccacgagcccgagctgatgaggaaggagatctcccggctcaacagacagttggaagagaaaataaatgactgtgccgaagtgaagcaggagctggcggcctccaggacggcccgggatgctgcgttggagcgggtgcagatgctggaacagcagattctcgcttacaaggatgacttcatgtcagaaagggccgatcgggaacgggctcaaagtaggattcaagaactggaggaaaaggtcgcctctttgctgcaccaggtgtcctggagacaggattctcgagagccagacgccggccggattcacgctgggagcaaaactgccaagtatttggccgccgacgcattagagcttatggtgcctggtggctggaggcctgggactgggtcccagcagccagaaccccctgcagagggcgggcatcctggcgcggcccagagaggccagggggaccttcagtgccctcactgcctgcagtgcttcagtgacgagcaaggggaagagctcctcaggcatgtggctgagtgctgccagtgaccgagactcacccgtgcccttgcggcctcctggcccggtgcagctgccctcagggacagggtgggtgctctcagatgccatgggttgagctctactgagagccaaggcccctagaatagttgcggggcactctgatcgttcactttggtccctttggctatggaacaggctgggtcacagggaactgccagtgaggctggaggctggaggtggagatggggtcaggaacatctggcagagggaggtcccagtctgtgtctccatcaggcttaagccagagctatctggtgctggtgtgccagcccctcccccagcctgcctagaaaggggtggctgcctgagggagtcacttgtatggtccccagggtgggagccccatcctgttctatggaataaagcgtcgcctctctgcctcgaaccagtcaaatggagtattgcggctgcacgtcacactagggtggccacccccgccattgcgagccacatgtctgcactgagaaactgcatttcagtagcatttgtcatccagccggaagttaaagcacacttactttattcacctatttttataataaacgttcttgctgctgtgactgctctgagaatttgtg

SEQ ID NO: 4918 - protein, 173 aa, Homo sapiens [sequence omitted]

SEQ ID NO: 4919 - DNA, 2009 bp, Homo sapiens
aagttgccggcggccgcgcggcctcccgggcgggcctacagccatgtcccgggacccggggtcgggcggctgggaggaggccccgcgcgcagctgccgcgctctgcaccctgtaccacgaggccggacagcggctgcgccgcctgcaggaccagctcgctgcccgcgacgccctcatcgctcgcctccgcgcccgcctggccgcgctggagggggacgccgcgccgtccctagtggacgcgctgctggagcaggttgcgcgcttccgggagcagctgcgaaggcaggagggcggcgccgccgaggcccagatgcgccaggtacgagggcgggtaccagaggagctgcgggagcgagagtgcgtgtggcggccgccgggtcctgggaaattgagaggctgactgagcgactagaagaaaaagagagggagatgcagcagctgctgagccagccccaacacgagcgagagaaggaagtcgtcctgctacggaggagcatggcagaaggggagcgcgcccgggccgccagtgacgtcctgtgccgctccttggccaacgagacccatcagctgcggaggacgctgaccgccaccgcccacatgtgtcagcatctggccaagtgtctggatgaacgacagcatgcacaaaggaatgtgggggagagaagtcctgaccagtcggaacacacagatgggcacacctctgtccagagtgttattgagaagttgcaggaagaaaatcgactgttaaaacagaaggtgactcacgttgaagacctcaatgccaagtggcagcgctacaacgccagcagggacgaatacgtgagggggctccatgcgcagctcagggggctgcagatcccccacgagcccgagctgatgaggaaggagatctcccggctcaacagacagttggaagagaaaataaatgactgtgccgaagtgaagcaggagctggcggcctccaggacggcccgggatgctgcgttggagcgggtgcagatgctggaacagcagattctcgcttacaaggatgacttcatgtcagaaagggccgatcgggaacgggctcaaagtaggattcaagaactggaggaaaaggtcgcctctttgctgcaccaggtgtcctggagacaggattctcgagagccagacgccggccggattcacgctgggagcaaaactgccaagtatttggccgccgacgcattagagcttatggtgcctggtggctggaggcctgggactgggtcccagcagccagaaccccctgcagagggcgggcatcctggcgcggcccagagaggccagggggaccttcagtgccctcactgcctgcagtgcttcagtgacgagcaaggggaagagctcctcaggcatgtggctgagtgctgccagtgaccgagactcacccgtgcccttgcggcctcctggcccggtgcagctgccctcagggacagggtgggtgctctcagatgccatgggttgagctctactgagagccaaggcccctagaatagttgcggggcactctgatcgttcactttggtccctttggctatggaacaggctgggtcacagggaactgccagtgaggctggaggctggaggtggagatggggtcaggaacatctggcagagggaggtcccagtctgtgtctccatcaggcttaagccagagctatctggtgctggtgtgccagcccctcccccagcctgcctagaaaggggtggctgcctgagggagtcacttgtatggtccccagggtgggagccccatcctgttctatggaataaagcgtcgcctctctgcctcgaaccagtcaaatggagtattgcggctgcacgtcacactagggtggccacccccgccattgcgagccacatgtctgcactgagaaactgcatttcagtagcatttgtcatccagccggaagttaaagcacacttactttattcacctatttttataataaacgttcttgctgctgtgactgctctgagaatttgtg

SEQ ID NO: 4920 - protein, 322 aa, Homo sapiens
MQQLLSQPQHEREKEVVLLRRSMAEGERARAASDVLCRSLANETHQLRRTLTATAHMCQHLAKCLDERQHAQRNVGERSPDQSEHTDGHTSVQSVIEKLQEENRLLKQKVTHVEDLNAKWQRYNASRDEYVRGLHAQLRGLQIPHEPELMRKEISRLNRQLEEKINDCAEVKQELAASRTARDAALERVQMLEQQILAYKDDFMSERADRERAQSRIQELEEKVASLLHQVSWRQDSREPDAGRIHAGSKTAKYLAADALELMVPGGWRPGTGSQQPEPPAEGGHPGAAQRGQGDLQCPHCLQCFSDEQGEELLRHVAECCQ

SEQ ID NO: 4921 - DNA, 1988 bp, Homo sapiens
ggaaagttccgggaagggcggcagccggcggggcccgggcgcggaagttgccggcggccgcgcggcctcccgggcgggcctacagccatgtcccgggacccggggtcgggcggctgggaggaggccccgcgcgcagctgccgcgctctgcaccctgtaccacgaggccggacagcggctgcgccgcctgcaggaccagctcgctgcccgcgacgccctcatcgctcgcctccgcgcccgcctggccgcgctggagggggacgccgcgccgtccctagtggacgcgctgctggagcaggttgcgcgcttccgggagcagctgcgaaggcaggagggcggcgccgccgaggcccagatgcgccaggaaattgagaggctgactgagcgactagaagaaaaagagagggagatgcagcagctgctgagccagccccaacacgagcgagagaaggaagtcgtcctgctacggaggagcatggcagaaggggagcgcgcccgggccgccagtgacgtcctgtgccgctccttggccaacgagacccatcagctgcggaggacgctgaccgccaccgcccacatgtgtcagcatctggccaagtgtctggatgaacgacagcatgcacaaaggaatgtgggggagagaagtcctgaccagtcggaacacacagatgggcacacctctgtccagagtgttattgagaagttgcaggaagaaaatcgactgttaaaacagaaggtgactcacgttgaagacctcaatgccaagtggcagcgctacaacgccagcagggacgaatacgtgagggggctccatgcgcagctcagggggctgcagatcccccacgagcccgagctgatgaggaaggagatctcccggctcaacagacagttggaagagaaaataaatgactgtgccgaagtgaagcaggagctggcggcctccaggacggcccgggatgctgcgttggagcgggtgcagatgctggaacagcagattctcgcttacaaggatgacttcatgtcagaaagggccgatcgggaacgggctcaaagtaggattcaagaactggaggaaaaggtcgcctctttgctgcaccaggtgtcctggagacaggattctcgagagccagacgccggccggattcacgctgggagcaaaactgccaagtatttggccgccgacgcattagagcttatggtgcctggtggctggaggcctgggactgggtcccagcagccagaaccccctgcagagggcgggcatcctggcgcggcccagagaggccagggggaccttcagtgccctcactgcctgcagtgcttcagtgacgagcaaggggaagagctcctcaggcatgtggctgagtgctgccagtgaccgagactcacccgtgcccttgcggcctcctggcccggtgcagctgccctcagggacagggtgggtgctctcagatgccatgggttgagctctactgagagccaaggcccctagaatagttgcggggcactctgatcgttcactttggtccctttggctatggaacaggctgggtcacagggaactgccagtgaggctggaggctggaggtggagatggggtcaggaacatctggcagagggaggtcccagtctgtgtctccatcaggcttaagccagagctatctggtgctggtgtgccagcccctcccccagcctgcctagaaaggggtggctgcctgagggagtcacttgtatggtccccagggtgggagccccatcctgttctatggaataaagcgtcgcctctctgcctcgaaccagtcaaatggagtattgcggctgcacgtcacactagggtggccacccccgccattgcgagccacatgtctgcactgagaaactgcatttcagtagcatttgtcatccagccggaagttaaagcacacttactttattcacctatttttataataaacgttcttgctgctgtgactgctctgagaatttgtg

SEQ ID NO: 4922 - protein, 429 aa, Homo sapiens
MSRDPGSGGWEEAPRAAAALCTLYHEAGQRLRRLQDQLAARDALIARLRARLAALEGDAAPSLVDALLEQVARFREQLRRQEGGAAEAQMRQEIERLTERLEEKEREMQQLLSQPQHEREKEVVLLRRSMAEGERARAASDVLCRSLANETHQLRRTLTATAHMCQHLAKCLDERQHAQRNVGERSPDQSEHTDGHTSVQSVIEKLQEENRLLKQKVTHVEDLNAKWQRYNASRDEYVRGLHAQLRGLQIPHEPELMRKEISRLNRQLEEKINDCAEVKQELAASRTARDAALERVQMLEQQILAYKDDFMSERADRERAQSRIQELEEKVASLLHQVSWRQDSREPDAGRIHAGSKTAKYLAADALELMVPGGWRPGTGSQQPEPPAEGGHPGAAQRGQGDLQCPHCLQCFSDEQGEELLRHVAECCQ

SEQ ID NO: 4923 - DNA, 298 bp, Homo sapiens
caggttgaagacctcaatgccaagtggcagcgctacaacgccagcaggaacatctggcagagggaggtcccagtctgtccccatcctgttctatggaataaagcgtcgcctctctgcctcgaaccagtcaaatggagtattgcggctgcacgtcacactagggtggccacccccgccattgcgagccacatgtctgcactgagaaactgcatttcagtagcatttgtcatccagccggaagttaaagcacacttactttattcacctatttttataataaacgttcttgctgctgtga

SEQ ID NO: 4924 - protein, 61 aa, Homo sapiens
MPSGSATTPAGTSGRGRSQSVPILFYGIKRRLSASNQSNGVLRLHVTLGWPPPPLRATCLH

SEQ ID NO: 4925 - DNA, 428 bp, Homo sapiens
gagaaaataaatgactgtgccgaagtgaagcaggagctggcgggccgatcgggaacgggctcaaagtaggattcaagaactggaggaaaaggtcgcctctttgctgcaccaggtgtcctggagacaggattctcgagagccagacgccggccggattcacgctgggagcaaaactgccaagtatttggccgccgacgcattagagcttatggtgcctggtggctggaggcctgggactgggtcccagcagccagaaccccctgcagagggcgggcatcctggcgcggcccagagaggccagggggaccttcagtgccccacatgtctgcactgagaaactgcatttcagtagcatttgtcatccagccggaagttaaagcacacttactttattcacctatttttataataaacgttcttgctgctgt

SEQ ID NO: 4926 - protein, 41 aa, Homo sapiens
MVPGGWRPGTGSQQPEPPAEGGHPGAAQRGQGDLQCPTCLH

SEQ ID NO: 4927 - DNA, 820 bp, Homo sapiens
aagttgccggcggccgcgcggcctcccgggcgggcctacagccatgtcccgggacccggggtcgggcggctgggaggaggccccgcgcgcagctgccgcgctctgcaccctgtaccacgaggccggacagcggctgcgccgcctgcaggaccagctcgctgcccgcgacgccctcatcgctcgcctccgcgcccgcctggccgcgctggagggggacgccgcgccgtccctagtggacgcgctgctggagcaggttgcgcgcttccgggagcagctgcgaaggcaggagggcggcgccgccgaggcccagatgcgccaggaaattgagaggctgactgagcgactagaagaaaaagagagggagatgcagcagctgctgagccagccccaacagagcccgagctgatgaggaaggagatctcccggctcaacagacagttggaagagaaaataaatgactgtgccgaagtgaagcaggagctggcggcctccaggacggcccgggatgctgcgttggagcgggtgcagatgctggaacagcaggtgtctgtccctcgggctccggacggcactgaccagatgtctgctggccggtggtggccgaaatcatgggacaggctgggctgaaggcttggtggcactgagtgggcagtggtcactgtgggggtgggagaagcctggtggggcgcttcctccttccttgagcagaaatgtgtgtctcgcctctcttcagattctcgcttacaaggatgacttcatgtcagaaagggccgatcgggaacgggctcaaagtaggattcaagaactggaggaaaaggtc

SEQ ID NO: 4928 - protein, 120 aa, Homo sapiens
MSRDPGSGGWEEAPRAAAALCTLYHEAGQRLRRLQDQLAARDALIARLRARLAALEGDAAPSLVDALLEQVARFREQLRRQEGGAAEAQMRQEIERLTERLEEKEREMQQLLSQPQQSPS

SEQ ID NO: 4929 - DNA, 2261 bp, Homo sapiens
gcgggcgggacggagctgcggcggcggcgggtcccgcgggcgggagcgcctggcggccgagtcaagccgccgcctcgacccagggcccgcgggccaggagagcgctcggcggcttcatggcggctgaagagatgcattggcctgtccctatgaaggccattggtgcccagaacctgctaaccatgcctgggggcgtggccaaggctggctacctgcacaagaagggcggtacccagcttcagctgctgaaatggcccctgcgctttgtcatcatccacaaacgctgcgtctactacttcaagagtagcacctctgcctccccgcagggcgccttctccctgagtggctataaccgggtgatgcgggcggctgaggagaccacgtccaacaacgttttccccttcaagatcatccatatcagcaagaagcaccgcacgtggttcttctcggcctcctccgaggaggagcgcaagagctggatggccttgctgcgcagggagattggccacttccacgaaaagaaagacctgcccttggacaccagcgactccagctcggacacagacagcttctacggcgcagttgagcggcctgtggatatcagcctttccccgtaccccacggacaatgaagactatgagcacgacgatgaggatgactcctacctggagcctgactccccggagcccggaaggcttgaggatgccctgatgcacccaccggcttacccaccacccccagtgcccacgcccaggaagccagccttctctgacatgccccgggcccactcctttacctccaagggccccggtcccctactgccacccccgccccctaagcacggcctcccagatgttggcctggctgctgaggactccaagagggacccactgtgcccgaggcgggctgagccttgccccagggtacctgctaccccccgaaggatgagcgatccccctctgagcaccatgcccaccgcacccggcctccggaaacccccttgcttccgggagagtgccagccccagcccggagccctggacccctggccacggggcctgctccacttccagtgctgccatcatggccactgccacctccagaaactgtgacaaactcaagtccttccacctgtccccccgaggaccacccacatctgagcccccacctgtgccagccaacaagcccaagttcctgaagatagctgaagaggaccccccaagggaggcagccatgcccggactctttgtgccccccgtggctccccggcctcctgcgctgaagctgccagtgcctgaggccatggcgcggcccgcagtcctgcccaggccagagaagccgcagctcccgcacctccagcgatcaccccccgatgggcagagtttcaggagcttctcctttgaaaagccccggcaaccctcacaggctgacactggcggggacgactcggacgaggactatgagaaggtgccactgcccaactcggtcttcgtcaacaccacggagtcctgcgaagtggaaaggttgttcaaggctacaagcccccggggagagccccaggatggactctactgcatccggaactcctctaccaagtcggggaaggtcctggttgtgtgggacgaaacctctaacaaagtgaggaactatcgcatttttgagaaggactctaagttctacctggagggcgaggtcctgtttgtgagtgtgggcagcatggtggagcactaccacacccacgtgctgcccagccaccagagcctgctgctgcggcacccctacggctacactgggcctaggtgatggcagtccatgtggctgccaggccaaggcagtcacaggggccctgaccccaggccacacagacggacatgggcccacatgggagggtgagcaggagcaaggctgtgcttgcctagggcctctgtgatggacatctcgtaggacccagccagtctcatccagcaggttgggttctagggctgaaccaggcgccaggctccagaggacgaagggactctgttgccccacactaacttgccctgtcccaatcccagaaacccaggaccaagctgtgcctgggctccaaggacaggaacactggtccccccatcacactcacccctaagtgggctgggagccaggcagggccagggcagctgggtgggggccggggctggccctgggacccccaggaacgctaagacacaggctccagtaggggctgttgcctccaataaagcagcagtgagctttgccttg

SEQ ID NO: 4930 - protein, 561 aa, Homo sapiens
MAAEEMHWPVPMKAIGAQNLLTMPGGVAKAGYLHKKGGTQLQLLKWPLRFVIIHKRCVYYFKSSTSASPQGAFSLSGYNRVMRAAEETTSNNVFPFKIIHISKKHRTWFFSASSEEERKSWMALLRREIGHFHEKKDLPLDTSDSSSDTDSFYGAVERPVDISLSPYPTDNEDYEHDDEDDSYLEPDSPEPGRLEDALMHPPAYPPPPVPTPRKPAFSDMPRAHSFTSKGPGPLLPPPPPKHGLPDVGLAAEDSKRDPLCPRRAEPCPRVPATPRRMSDPPLSTMPTAPGLRKPPCFRESASPSPEPWTPGHGACSTSSAAIMATATSRNCDKLKSFHLSPRGPPTSEPPPVPANKPKFLKIAEEDPPREAAMPGLFVPPVAPRPPALKLPVPEAMARPAVLPRPEKPQLPHLQRSPPDGQSFRSFSFEKPRQPSQADTGGDDSDEDYEKVPLPNSVFVNTTESCEVERLFKATSPRGEPQDGLYCIRNSSTKSGKVLVVWDETSNKVRNYRIFEKDSKFYLEGEVLFVSVGSMVEHYHTHVLPSHQSLLLRHPYGYTGPR

SEQ ID NO: 4931 - DNA, 1085 bp, Homo sapiens
tgtgtgtgtgtgtgcacatgcacattagggaagacggggcacctgggatacactctccaggtctctgtttctgtgctcatctccctaccttctctcaaagttgcaattggttcaggtgaccccaaggcctgaggctgctgcggtggggggcagagcagtcaggtgaaaagtgctcagtcccacagagacaccccatcgggttccatttaatgcaggctctgtggctcccaccaccctggggccccatgagccctgtggcgtgtgtggtcatggcctgtgcaggccctcatgtgcgctgtgtctctgcacacccagttaatgtcacaggtggtgcactcacacaggacgtgcacatgagctgcacagctcgcatgcacacaggcgctcagggccacctcctgtgggctcccacggccagccccgaggaaggctgtggctcccacgtggggcccccttactggttcttcaggagggttgagatcaaacagcagccctggtccaatgctgtgatgctacagggggagtccagcccagaggagaggagcaggccaggcttgagcagacaggcaccctacgccccacccagctgcctggagcaggctcagcaggagcgcagtaaacatctgattcacaaggaagcagagggcacttcttggaatcagctcagctacagggatgggggtatggataccacgagggcgctctgccaacccctcagggctcctctgatctccccaggcaactgctccaggtggccgagcccacattcttcccagaggccagctgacaaagatggaccagatgtgaccggaatccatgaagaaagggccagtcacctcagggcgttggggccagcagttccagcacgatctgtgatcgggggccgggaaaccaagcagggcctgaccactctcatggccttggaagttacagagcctgaacccagaggcttgcttcggcaaggaggaggctgtgggccctgccttcaggcggttgtggaaacaattctacacattgcatcaccggcccatgtcacacttcagtgtgaatcagcgccagtgggcggcttttcttgccctccgtga

SEQ ID NO: 4932 - protein, 291 aa, Homo sapiens
MQALWLPPPWGPMSPVACVVMACAGPHVRCVSAHPVNVTGGALTQDVHMSCTARMHTGAQGHLLWAPTASPEEGCGSHVGPPYWFFRRVEIKQQPWSNAVMLQGESSPEERSRPGLSRQAPYAPPSCLEQAQQERSKHLIHKEAEGTSWNQLSYRDGGMDTTRALCQPLRAPLISPGNCSRWPSPHSSQRPADKDGPDVTGIHEERASHLRALGPAVPARSVIGGRETKQGLTTLMALEVTEPEPRGLLRQGGGCGPCLQAVVETILHIASPAHVTLQCESAPVGGFSCPP

SEQ ID NO: 4933 - DNA, 845 bp, Homo sapiens
tcaggggtgcagcctcagcctccacccgccacccgtacccgccctgcctcaggacttcgttcctgctgtacccctgctggctgcctgtccccacaggtggctccttcctccccaccggaggagctgctcccaggcgggaccctgggggtggaatctctgaaatgccttcccctcgggaccctcaccgcgactggacttcgctcagcttcagaccctgggctgcagctgcctaatgagcttcatggcggctgaagagatgcattggcctgtccctatgaaggccattggtgcccagaacctgctaaccatgcctgggggcgtggccaaggctggctacctgcacaagaagggcggtacccagcttcagctgctgaaatggcccctgcgctttgtcatcatccacaaacgctgcgtctactacttcaagagtagcacctctgcctccccgcagggcgccttctccctgagtggctataaccggcagcccagaccccagccagcccaggccctgtcccaaacagaggctgggccctaggattccctgctccagggtcctcccaggccgggatcagtttccagcttcacgcatgtcctgggctgggctctatccagtgatgggccatgagctgccctggagggccttctgcactaacaggcagggtgatgcgggcggctgaggagaccacgtccaacaacgttttccccttcaagatcatccatatcagcaagaagcaccgcacgtggttcttctcggcctcctccgaggaggagcgcaaggtgactgtgggtgctgccccaggagattggccacttccacgaaaagaaagacctgcccttggacacca

SEQ ID NO: 4934 - protein, 100 aa, Homo sapiens
MSFMAAEEMHWPVPMKAIGAQNLLTMPGGVAKAGYLHKKGGTQLQLLKWPLRFVIIHKRCVYYFKSSTSASPQGAFSLSGYNRQPRPQPAQALSQTEAGP

SEQ ID NO: 4935 - DNA, 491 bp, Homo sapiens
gacaccgcagcagcatggtgacaggtccccccagggtgtctgcctctacagaggaagggactgaagcacccagagagctggcaggtgccgttttgcagaggccactttcccgagggagctggttgcaagggcccggcgggatgggacctgggcggggcctcagagccgaggctcccgcgccggccgtggatttccaaccaagctgtgtggactggcaggtgttgggggagtggagcgggaggcctcgtttgcatcgaaggcttcttgattccaggctgcaccaacagatgtgggcctcctgtcccaagcgcccaccaacctccttgcagcgtggggaaactgaggcccgcagggggctcacgtgcctcccgcgcacggtgacgcggcagggggcggggccgggaggggcgcgccgggatcctcacctgcccgcccagtcccccgccgagaggggaggagccggcggctgccaggccagggccggcgggcat

SEQ ID NO: 4936 - protein, 158 aa, Homo sapiens
MVTGPPRVSASTEEGTEAPRELAGAVLQRPLSRGSWLQGPGGMGPGRGLRAEAPAPAVDFQPSCVDWQVLGEWSGRPRLHRRLLDSRLHQQMWASCPKRPPTSLQRGETEARRGLTCLPRTVTRQGAGPGGARRDPHLPAQSPAERGGAGGCQARAGG

SEQ ID NO: 4937 - DNA, 2355 bp, Homo sapiens
ggggaggagccggcggctgccaggccagggccggcgggcatggcgggctccgggccgcggccgcggagctggggccggcgggaggcgggcgcccgggacgaggcggcggcggccgggggacgcggcccggggccgtgccggtgctcgcaggggaggcgggcgtggatcgccccggggaagccggccatgcccgccgcgtggacgcccttcatggcggctgaagagatgcattggcctgtccctatgaaggccattggtgcccagaacctgctaaccatgcctgggggcgtggccaaggctggctacctgcacaagaagggcggtacccagcttcagctgctgaaatggcccctgcgctttgtcatcatccacaaacgctgcgtctactacttcaagagtagcacctctgcctccccgcagggcgccttctccctgagtggctataaccgggtgatgcgggcggctgaggagaccacgtccaacaacgttttccccttcaagatcatccatatcagcaagaagcaccgcacgtggttcttctcggcctcctccgaggaggagcgcaagagctggatggccttgctgcgcagggagattggccacttccacgaaaagaaagacctgcccttggacaccagcgactccagctcggacacagacagcttctacggcgcagttgagcggcctgtggatatcagcctttccccgtaccccacggacaatgaagactatgagcacgacgatgaggatgactcctacctggagcctgactccccggagcccggaaggcttgaggatgccctgatgcacccaccggcttacccaccacccccagtgcccacgcccaggaagccagccttctctgacatgccccgggcccactcctttacctccaagggccccggtcccctactgccacccccgccccctaagcacggcctcccagatgttggcctggctgctgaggactccaagagggacccactgtgcccgaggcgggctgagccttgccccagggtacctgctaccccccgaaggatgagcgatccccctctgagcaccatgcccaccgcacccggcctccggaaacccccttgcttccgggagagtgccagccccagcccggagccctggacccctggccacggggcctgctccacttccagtgctgccatcatggccactgccacctccagaaactgtgacaaactcaagtccttccacctgtccccccgaggaccacccacatctgagcccccacctgtgccagccaacaagcccaagttcctgaagatagctgaagaggaccccccaagggaggcagccatgcccggactctttgtgccccccgtggctccccggcctcctgcgctgaagctgccagtgcctgaggccatggcgcggcccgcagtcctgcccaggccagagaagccgcagctcccgcacctccagcgatcaccccccgatgggcagagtttcaggagcttctcctttgaaaagccccggcaaccctcacaggctgacactggcggggacgactcggacgaggactatgagaaggtgccactgcccaactcggtcttcgtcaacaccacggagtcctgcgaagtggaaaggttgttcaaggctacaagcccccggggagagccccaggatggactctactgcatccggaactcctctaccaagtcggggaaggtcctggttgtgtgggacgaaacctctaacaaagtgaggaactatcgcatttttgagaaggactctaagttctacctggagggcgaggtcctgtttgtgagtgtgggcagcatggtggagcactaccacacccacgtgctgcccagccaccagagcctgctgctgcggcacccctacggctacactgggcctaggtgatggcagtccatgtggctgccaggccaaggcagtcacaggggccctgaccccaggccacacagacggacatgggcccacatgggagggtgagcaggagcaaggctgtgcttgcctagggcctctgtgatggacatctcgtaggacccagccagtctcatccagcaggttgggttctagggctgaaccaggcgccaggctccagaggacgaagggactctgttgccccacactaacttgccctgtcccaatcccagaaacccaggaccaagctgtgcctgggctccaaggacaggaacactggtccccccatcacactcacccctaagtgggctgggagccaggcagggccagggcagctgggtgggggccggggctggccctgggacccccaggaacgctaagacacaggctccagtaggggctgttgcctccaataaagcagcagtgagctttgccttg

SEQ ID NO: 4938 - protein, 618 aa, Homo sapiens
MAGSGPRPRSWGRREAGARDEAAAAGGRGPGPCRCSQGRRAWIAPGKPAMPAAWTPFMAAEEMHWPVPMKAIGAQNLLTMPGGVAKAGYLHKKGGTQLQLLKWPLRFVIIHKRCVYYFKSSTSASPQGAFSLSGYNRVMRAAEETTSNNVFPFKIIHISKKHRTWFFSASSEEERKSWMALLRREIGHFHEKKDLPLDTSDSSSDTDSFYGAVERPVDISLSPYPTDNEDYEHDDEDDSYLEPDSPEPGRLEDALMHPPAYPPPPVPTPRKPAFSDMPRAHSFTSKGPGPLLPPPPPKHGLPDVGLAAEDSKRDPLCPRRAEPCPRVPATPRRMSDPPLSTMPTAPGLRKPPCFRESASPSPEPWTPGHGACSTSSAAIMATATSRNCDKLKSFHLSPRGPPTSEPPPVPANKPKFLKIAEEDPPREAAMPGLFVPPVAPRPPALKLPVPEAMARPAVLPRPEKPQLPHLQRSPPDGQSFRSFSFEKPRQPSQADTGGDDSDEDYEKVPLPNSVFVNTTESCEVERLFKATSPRGEPQDGLYCIRNSSTKSGKVLVVWDETSNKVRNYRIFEKDSKFYLEGEVLFVSVGSMVEHYHTHVLPSHQSLLLRHPYGYTGPR

SEQ ID NO: 4939 - DNA, 5102 bp, Homo sapiens
ggggaggagccggcggctgccaggccagggccggcgggcatggcgggctccgggccgcggccgcggagctggggccggcgggaggcgggcgcccgggacgaggcggcggcggccgggggacgcggcccggggccgtgccggtgctcgcaggggaggcgggcgtggatcgccccggggaagccggccatgcccgccgcgtggacgcccttcatggcggctgaagagatgcattggcctgtccctatgaaggccattggtgcccagaacctgctaaccatgcctgggggcgtggccaaggctggctacctgcacaagaagggcggtacccagcttcagctgctgaaatggcccctgcgctttgtcatcatccacaaacgctgcgtctactacttcaagagtagcacctctgcctccccgcagggcgccttctccctgagtggctataaccgggtgatgcgggcggctgaggagaccacgtccaacaacgttttccccttcaagatcatccatatcagcaagaagcaccgcacgtggttcttctcggcctcctccgaggaggagcgcaagagctggatggccttgctgcgcagggagattggccacttccacgaaaagaaagacctgcccttggacaccagcgactccagctcggacacagacagcttctacggcgcagttgagcggcctgtggatatcagcctttccccgtaccccacggacaatgaagactatgagcacgacgatgaggatgactcctacctggagcctgactccccggagcccggaaggcttgaggatgccctgatgcacccaccggcttacccaccacccccagtgcccacgcccaggaagccagccttctctgacatgccccgggcccactcctttacctccaagggccccggtcccctactgccacccccgccccctaagcacggcctcccagatgttggcctggctgctgaggactccaagagggacccactgtgcccgaggcgggctgagccttgccccagggtacctgctaccccccgaaggatgagcgatccccctctgagcaccatgcccaccgcacccggcctccggaaacccccttgcttccgggagagtgccagccccagcccggagccctggacccctggccacggggcctgctccacttccagtgctgccatcatggccactgccacctccagaaactgtgacaaactcaagtccttccacctgtccccccgaggaccacccacatctgagcccccacctgtgccagccaacaagcccaagttcctgaagatagctgaagaggaccccccaagggaggcagccatgcccggactctttgtgccccccgtggctccccggcctcctgcgctgaagctgccagtgcctgaggccatggcgcggcccgcagtcctgcccaggccagagaagccgcagctcccgcacctccagcgatcaccccccgatgggcagagtttcaggagcttctcctttgaaaagccccggcaaccctcacaggctgacactggcggggacgactcggacgaggactatgagaaggtgccactgcccaactcggtcttcgtcaacaccacggagtcctgcgaagtggaaaggttgttcaaggctacaagcccccggggagagccccaggatggactctactgcatccggaactcctctaccaagtcggggaaggtcctggttgtgtgggacgaaacctctaacaaagtgaggaactatcgcatttttgagaaggactctaagttctacctggagggcgaggtcctgtttgtgagtgtgggcagcatggtggagcactaccacacccacgtgctgcccagccaccagagcctgctgctgcggcacccctacggctacactgggcctaggtgatggcagtccatgtggctgccaggccaaggcagtcacaggggccctgaccccaggccacacagacggacatgggcccacatgggagggtgagcaggagcaaggctgtgcttgcctagggcctctgtgatggacatctcgtaggacccagccagtctcatccagcaggttgggttctagggctgaaccaggcgccaggctccagaggacgaagggactctgttgccccacactaacttgccctgtcccaatcccagaaacccaggaccaagctgtgcctgggctccaaggacaggaacactggtccccccatcacactcacccctaagtgggctgggagccaggcagggccagggcagctgggtgggggccggggctggccctgggacccccaggaacgctaagacacaggctccagtaggggctgttgcctccaataaagcagcagtgagctttgccttggtggctggggcttgattgggaaggaggggattaccagcttactgggtgcccatgctgatgtctaagtggtgaccgcagcagtacccgggaaccccaacagttggttgtcttgtcttccagggtgcaggtcactgagtgacttccccagggtgcacagcgagtaacagatcaggacccaaacttgggcagtctgggctgggagcccacaccccactcaccagttctgctgcctcaggtcaggccagggcagtgctgctgcagagctagaaggccctgcagctacagctgcttcattccctgcattagtgcctggttactgggtacctcctgagtggctgtccccgttccagaacttgcatacactgagcgggctacagagctagaaggccctgcagctacagctgcttcattccctgcattagcgagcagttattgggtacctcctgcatgcctggtcccattccagacaggggcctctggcctggctgagttcacagcccagtctggggacagctgggtatgaggtgcttacggcacagtgtccagggcagctgggtgtgcagggactgggggctcccggaagattttttggaggaagtaacagctacgatgggatgggaacagtggaccctaagcaggccaagggtgcgtagggacggtggtacccagatgcccaagtcttccaggcaatacctggctcaggcccagccccaatccatccccttactttctgccatggagttccagcaggtcactctccctggcacaccttccaggctggatttttaatgaaacagactcagggaggtaggggctggcagggaccctagaatccttgtgatttttcttagcaccttatgtcagggaaacctaaactgaggtcagcacttgggcccactgacagtgactgactgggggagaaggtcctgcagcccccttcccctgggtgtgttctggggacctgtggtttgctggcggaaacaagtgatgaggctggttagcggatgtgggaggctgtgaccccagggggccatagggtgcggtggaactgcaggccctgcagatgacggcagccagctgcttccaggaaccaggtgtccaaggccacctctgcaggggtttcctcttcagcctgcctggggtgagaggtcagtgcaccacagccgaggctggagcacagggagcttctgttgttctgatctatctctggaaaaccagccattcctcctccctgcagtcagaattctttgccctgtctgacctgaacttgcttagggagtcatgccactccccactgtggccatagtttctcttcctgtaaaattttattattttagttttttgtttttgagatgtagtctcaccctgtcgcccaggctggagtgcaatgccgtgatctccgctcactgccacctccgcctctctagttcaagcgattttcctgcctcagcctcccgagtagctgggattccaggcgcccgccaccacgcctggctaattttttgtatttttagtagagacgggattttatcatgttggccaggctggtctcgaactcctgacctcaggtgatctgcccaccttggcctcccaaagtgctgggattacaggcatgagccactgtgcctggccccttcctgtaaaatttttaaatggagaattgggtgcgagatgtggtttccagcctggtgcctggggtgctgagctagtgagtggtgcagtccaggacacctttgctttatgtcacttacacggtcacctggagccggctcaagtggctaaagcatcctggggcccagagccaggtgataggtccctctggccaactggacagttgaggcctgtggttacccgaagcccagctggggccctggtccagcctcgcctcccagactctgcacctgctagcacagctgtccacgtctgtgtgagctgctctaggccgagggcctcagtttcaagagtgtgttggggtgggatggggcaggccgtggtcctccagcatgaagaaggagccatgaggagttcccatgacctcccgagacttgccataagtgttctagtccacatataagggtagggttgggattaccatttactgaccacatctgtgaggtgccgagctgggtgcttgacatcatttgcttggagaagcagctgctagtagacccattttacaggtgagagaaccaagtctcacagaggcctgggttcaagtcccacctctgccactaactggcatgtgaccctatctatccttcactgctctgagcctagaccctggcccctgcctggctccctgccaggctccctgccacccctcacgacctctgatggtcgttgtgggggtctcttgcctggctcccagggctagggttagggctctggaggtgctttcactcaaccaagggggccacagcactggggagtgaaactgccccgcctcaccctgcgttgccctctgggtctgtgagggtgggctggcaggaggcctaggccttgccctaggggcagtcctgcttcctcattttatagatagggaaactgaggctttgggaggactcactgacatacctaccttcaagatgagttcaggtgggctcagttctggggcttgggaaaagggccccagtggctttgggaagcacccccagcccagggtgaaacatgcttcttctcttcctgtggttccatccgaaggattgtggtgagccccgtgccttcagttaataaagatttgtattgtg

SEQ ID NO: 4940 - protein, 618 aa, Homo sapiens; identical to SEQ ID NO: 4938

SEQ ID NO: 4941 - DNA, 5387 bp, Homo sapiens
ggggaggagccggcggctgccaggccagggccggcgggcatggcgggctccgggccgcggccgcggagctggggccggcgggaggcgggcgcccgggacgaggcggcggcggccgggggacgcggcccggggccgtgccggtgctcgcaggggaggcgggcgtggatcgccccggggaagccggccatgcccgccgcgtggacgcccttcatggcggctgaagagatgcattggcctgtccctatgaaggccattggtgcccagaacctgctaaccatgcctgggggcgtggccaaggctggctacctgcacaagaagggcggtacccagcttcagctgctgaaatggcccctgcgctttgtcatcatccacaaacgctgcgtctactacttcaagagtagcacctctgcctccccgcagggcgccttctccctgagtggctataaccgggtgatgcgggcggctgaggagaccacgtccaacaacgttttccccttcaagatcatccatatcagcaagaagcaccgcacgtggttcttctcggcctcctccgaggaggagcgcaagagctggatggccttgctgcgcagggagattggccacttccacgaaaagaaagacctgcccttggacaccagcgactccagctcggacacagacagcttctacggcgcagttgagcggcctgtggatatcagcctttccccgtaccccacggacaatgaagactatgagcacgacgatgaggatgactcctacctggagcctgactccccggagcccggaaggcttgaggatgccctgatgcacccaccggcttacccaccacccccagtgcccacgcccaggaagccagccttctctgacatgccccgggcccactcctttacctccaagggccccggtcccctactgccacccccgccccctaagcacggcctcccagatgttggcctggctgctgaggactccaagagggacccactgtgcccgaggcgggctgagccttgccccagggtacctgctaccccccgaaggatgagcgatccccctctgagcaccatgcccaccgcacccggcctccggaaacccccttgcttccgggagagtgccagccccagcccggagccctggacccctggccacggggcctgctccacttccagtgctgccatcatggccactgccacctccagaaactgtgacaaactcaagtccttccacctgtccccccgaggaccacccacatctgagcccccacctgtgccagccaacaagcccaagttcctgaagatagctgaagaggaccccccaagggaggcagccatgcccggactctttgtgccccccgtggctccccggcctcctgcgctgaagctgccagtgcctgaggccatggcgcggcccgcagtcctgcccaggccagagaagccgcagctcccgcacctccagcgatcaccccccgatgggcagagtttcaggagcttctcctttgaaaagccccggcaaccctcacaggctgacactggcggggacgactcggacgaggactatgagaaggtgccactgcccaactcggtcttcgtcaacaccacggagtcctgcgaagtggaaaggttgttcaaggctacaagcccccggggagagccccaggatggactctactgcatccggaactcctctaccaagtcggggaaggtcctggttgtgtgggacgaaacctctaacaaagtgaggaactatcgcatttttgagaaggactctaagttctacctggagggcgaggtcctgtttgtgagtgtgggcagcatggtggagcactaccacacccacgtgctgcccagccaccagagcctgctgctgcggcacccctacggctacactgggcctaggtgatggcagtccatgtggctgccaggccaaggcagtcacaggggccctgaccccaggccacacagacggacatgggcccacatgggagggtgagcaggagcaaggctgtgcttgcctagggcctctgtgatggacatctcgtaggacccagccagtctcatccagcaggttgggttctagggctgaaccaggcgccaggctccagaggacgaagggactctgttgccccacactaacttgccctgtcccaatcccagaaacccaggaccaagctgtgcctgggctccaaggacaggaacactggtccccccatcacactcacccctaagtgggctgggagccaggcagggccagggcagctgggtgggggccggggctggccctgggacccccaggaacgctaagacacaggctccagtaggggctgttgcctccaataaagcagcagtgagctttgccttggtggctggggcttgattgggaaggaggggattaccagcttactgggtgcccatgctgatgtctaagtggtgaccgcagcagtacccgggaaccccaacagttggttgtcttgtcttccagggtgcaggtcactgagtgacttccccagggtgcacagcgagtaacagatcaggacccaaacttgggcagtctgggctgggagcccacaccccactcaccagttctgctgcctcaggtcaggccagggcagtgctgctgcagagctagaaggccctgcagctacagctgcttcattccctgcattagtgcctggttactgggtacctcctgagtggctgtccccgttccagaacttgcatacactgagcgggctacagagctagaaggccctgcagctacagctgcttcattccctgcattagcgagcagttattgggtacctcctgcatgcctggtcccattccagacaggggcctctggcctggctgagttcacagcccagtctggggacagctgggtatgaggtgcttacggcacagtgtccagggcagctgggtgtgcagggactgggggctcccggaagattttttggaggaagtaacagctacgatgggatgggaacagtggaccctaagcaggccaagggtgcgtagggacggtggtacccagatgcccaagtcttccaggcaatacctggctcaggcccagccccaatccatccccttactttctgccatggagttccagcaggtcactctccctggcacaccttccaggctggatttttaatgaaacagactcagggaggtaggggctggcagggaccctagaatccttgtgatttttcttagcaccttatgtcagggaaacctaaactgaggtcagcacttgggcccactgacagtgactgactgggggagaaggtcctgcagcccccttcccctgggtgtgttctggggacctgtggtttgctggcggaaacaagtgatgaggctggttagcggatgtgggaggctgtgaccccagggggccatagggtgcggtggaactgcaggccctgcagatgacggcagccagctgcttccaggaaccaggtgtccaaggccacctctgcaggggtttcctcttcagcctgcctggggtgagaggtcagtgcaccacagccgaggctggagcacagggagcttctgttgttctgatctatctctggaaaaccagccattcctcctccctgcagtcagaattctttgccctgtctgacctgaacttgcttagggagtcatgccactccccactgtggccatagtttctcttcctgtaaaattttattattttagttttttgtttttgagatgtagtctcaccctgtcgcccaggctggagtgcaatgccgtgatctccgctcactgccacctccgcctctctagttcaagcgattttcctgcctcagcctcccgagtagctgggattccaggcgcccgccaccacgcctggctaattttttgtatttttagtagagacgggattttatcatgttggccaggctggtctcgaactcctgacctcaggtgatctgcccaccttggcctcccaaagtgctgggattacaggcatgagccactgtgcctggccccttcctgtaaaatttttaaatggagaattgggtgcgagatgtggtttccagcctggtgcctggggtgctgagctagtgagtggtgcagtccaggacacctttgctttatgtcacttacacggtcacctggagccggctcaagtggctaaagcatcctggggcccagagccaggtgataggtccctctggccaactggacagttgaggcctgtggttacccgaagcccagctggggccctggtccagcctcgcctcccagactctgcacctgctagcacagctgtccacgtctgtgtgagctgctctaggccgagggcctcagtttcaagagtgtgttggggtgggatggggcaggccgtggtcctccagcatgaagaaggagccatgaggagttcccatgacctcccgagacttgccataagtgttctagtccacatataagggtagggttgggattaccatttactgaccacatctgtgaggtgccgagctgggtgcttgacatcatttgcttggagaagcagctgctagtagacccattttacaggtgagagaaccaagtctcacagaggcctgggttcaagtcccacctctgccactaactggcatgtgaccctatctatccttcactgctctgagcctagaccctggcccctgcctggctccctgccaggctccctgccacccctcacgacctctgatggtcgttgtgggggtctcttgcctggctcccagggctagggttagggctctggaggtgctttcactcaaccaagggggccacagcactggggagtgaaactgccccgcctcaccctgcgttgccctctgggtctgtgagggtgggctggcaggaggcctaggccttgccctaggggcagtcctgcttcctcattttatagatagggaaactgaggctttgggaggactcactgacatacctaccttcaagatgagttcaggtgggctcagttctggggcttgggaaaagggccccagtggctttgggaagcacccccagcccagggtgaaacatgcttcttctcttcctgtggttccatccgaaggattgtggtgagccccgtgccttcagttaataaagatttgtattgtgaaaagattttttcttttttttttgggacacagtctcactctgtcgcccaggctagagtggattggcgtgatctcggctcaatgcaaatctccagggttcaatcgattctcctgcctcaccctcccatgtagctgggattacagctgcctgccaaatttttgtatttttagtggaaccggggtttcaccatgttggccaggctggtcttgaactcctgacctcaactgatccgcccaccttggcctcccaagtgctgggattacaggcgcgagccacggcgcccag

SEQ ID NO: 4942 - protein, 618 aa, Homo sapiens; identical to SEQ ID NO: 4938

SEQ ID NO: 4943 - DNA, 2622 bp, Homo sapiens
ggggctgtctttgggtgcagaaggagctggtggggtccagccgggtgacccaggccgaggccggcagaagacagcctgatgccttgaagacttcctcttgcacttttgttggagggtgctggtttgctaaaagcagagagtatttttctttttatttattttgtttttaattttttaattttagctccagctcagttgcccagactggagagcagtggccaatcatagcttactgcctcctggaactcctggctcaatcgatcctcctggataagcctcctccgggtactatagcttcatggcggctgaagagatgcattggcctgtccctatgaaggccattggtgcccagaacctgctaaccatgcctgggggcgtggccaaggctggctacctgcacaagaagggcggtacccagcttcagctgctgaaatggcccctgcgctttgtcatcatccacaaacgctgcgtctactacttcaagagtagcacctctgcctccccgcagggcgccttctccctgagtggctataaccggcagcccagaccccagccagcccaggccctgtcccaaacagaggctgggccctaggattccctgctccagggtcctcccaggccgggatcagtttccagcttcacgcatgtcctgggctgggctctatccagtgatgggccatgagctgccctggagggccttctgcactaacaggcagggtgatgcgggcggctgaggagaccacgtccaacaacgttttccccttcaagatcatccatatcagcaagaagcaccgcacgtggttcttctcggcctcctccgaggaggagcgcaagagctggatggccttgctgcgcagggagattggccacttccacgaaaagaaagacctgcccttggacaccagcgactccagctcggacacagacagcttctacggcgcagttgagcggcctgtggatatcagcctttccccgtaccccacggacaatgaagactatgagcacgacgatgaggatgactcctacctggagcctgactccccggagcccggaaggcttgaggatgccctgatgcacccaccggcttacccaccacccccagtgcccacgcccaggaagccagccttctctgacatgccccgggcccactcctttacctccaagggccccggtcccctactgccacccccgccccctaagcacggcctcccagatgttggcctggctgctgaggactccaagagggacccactgtgcccgaggcgggctgagccttgccccagggtacctgctaccccccgaaggatgagcgatccccctctgagcaccatgcccaccgcacccggcctccggaaacccccttgcttccgggagagtgccagccccagcccggagccctggacccctggccacggggcctgctccacttccagtgctgccatcatggccactgccacctccagaaactgtgacaaactcaagtccttccacctgtccccccgaggaccacccacatctgagcccccacctgtgccagccaacaagcccaagttcctgaagatagctgaagaggaccccccaagggaggcagccatgcccggactctttgtgccccccgtggctccccggcctcctgcgctgaagctgccagtgcctgaggccatggcgcggcccgcagtcctgcccaggccagagaagccgcagctcccgcacctccagcgatcaccccccgatgggcagagtttcaggagcttctcctttgaaaagccccggcaaccctcacaggctgacactggcggggacgactcggacgaggactatgagaaggtgccactgcccaactcggtcttcgtcaacaccacggagtcctgcgaagtggaaaggttgttcaaggctacaagcccccggggagagccccaggatggactctactgcatccggaactcctctaccaagtcggggaaggtcctggttgtgtgggacgaaacctctaacaaagtgaggaactatcgcatttttgagaaggactctaagttctacctggagggcgaggtcctgtttgtgagtgtgggcagcatggtggagcactaccacacccacgtgctgcccagccaccagagcctgctgctgcggcacccctacggctacactgggcctaggtgatggcagtccatgtggctgccaggccaaggcagtcacaggggccctgaccccaggccacacagacggacatgggcccacatgggagggtgagcaggagcaaggctgtgcttgcctagggcctctgtgatggacatctcgtaggacccagccagtctcatccagcaggttgggttctagggctgaaccaggcgccaggctccagaggacgaagggactctgttgccccacactaacttgccctgtcccaatcccagaaacccaggaccaagctgtgcctgggctccaaggacaggaacactggtccccccatcacactcacccctaagtgggctgggagccaggcagggccagggcagctgggtgggggccggggctggccctgggacccccaggaacgctaagacacaggctccagtaggggctgttgcctccaataaagcagcagtgagctttgccttg

SEQ ID NO: 4944 - protein, 494 aa, Homo sapiens
MSCPGGPSALTGRVMRAAEETTSNNVFPFKIIHISKKHRTWFFSASSEEERKSWMALLRREIGHFHEKKDLPLDTSDSSSDTDSFYGAVERPVDISLSPYPTDNEDYEHDDEDDSYLEPDSPEPGRLEDALMHPPAYPPPPVPTPRKPAFSDMPRAHSFTSKGPGPLLPPPPPKHGLPDVGLAAEDSKRDPLCPRRAEPCPRVPATPRRMSDPPLSTMPTAPGLRKPPCFRESASPSPEPWTPGHGACSTSSAAIMATATSRNCDKLKSFHLSPRGPPTSEPPPVPANKPKFLKIAEEDPPREAAMPGLFVPPVAPRPPALKLPVPEAMARPAVLPRPEKPQLPHLQRSPPDGQSFRSFSFEKPRQPSQADTGGDDSDEDYEKVPLPNSVFVNTTESCEVERLFKATSPRGEPQDGLYCIRNSSTKSGKVLVVWDETSNKVRNYRIFEKDSKFYLEGEVLFVSVGSMVEHYHTHVLPSHQSLLLRHPYGYTGPR

SEQ ID NO: 4945 - DNA, 5369 bp, Homo sapiens
ggggctgtctttgggtgcagaaggagctggtggggtccagccgggtgacccaggccgaggccggcagaagacagcctgatgccttgaagacttcctcttgcacttttgttggagggtgctggtttgctaaaagcagagagtatttttctttttatttattttgtttttaattttttaattttagctccagctcagttgcccagactggagagcagtggccaatcatagcttactgcctcctggaactcctggctcaatcgatcctcctggataagcctcctccgggtactatagcttcatggcggctgaagagatgcattggcctgtccctatgaaggccattggtgcccagaacctgctaaccatgcctgggggcgtggccaaggctggctacctgcacaagaagggcggtacccagcttcagctgctgaaatggcccctgcgctttgtcatcatccacaaacgctgcgtctactacttcaagagtagcacctctgcctccccgcagggcgccttctccctgagtggctataaccggcagcccagaccccagccagcccaggccctgtcccaaacagaggctgggccctaggattccctgctccagggtcctcccaggccgggatcagtttccagcttcacgcatgtcctgggctgggctctatccagtgatgggccatgagctgccctggagggccttctgcactaacaggcagggtgatgcgggcggctgaggagaccacgtccaacaacgttttccccttcaagatcatccatatcagcaagaagcaccgcacgtggttcttctcggcctcctccgaggaggagcgcaagagctggatggccttgctgcgcagggagattggccacttccacgaaaagaaagacctgcccttggacaccagcgactccagctcggacacagacagcttctacggcgcagttgagcggcctgtggatatcagcctttccccgtaccccacggacaatgaagactatgagcacgacgatgaggatgactcctacctggagcctgactccccggagcccggaaggcttgaggatgccctgatgcacccaccggcttacccaccacccccagtgcccacgcccaggaagccagccttctctgacatgccccgggcccactcctttacctccaagggccccggtcccctactgccacccccgccccctaagcacggcctcccagatgttggcctggctgctgaggactccaagagggacccactgtgcccgaggcgggctgagccttgccccagggtacctgctaccccccgaaggatgagcgatccccctctgagcaccatgcccaccgcacccggcctccggaaacccccttgcttccgggagagtgccagccccagcccggagccctggacccctggccacggggcctgctccacttccagtgctgccatcatggccactgccacctccagaaactgtgacaaactcaagtccttccacctgtccccccgaggaccacccacatctgagcccccacctgtgccagccaacaagcccaagttcctgaagatagctgaagaggaccccccaagggaggcagccatgcccggactctttgtgccccccgtggctccccggcctcctgcgctgaagctgccagtgcctgaggccatggcgcggcccgcagtcctgcccaggccagagaagccgcagctcccgcacctccagcgatcaccccccgatgggcagagtttcaggagcttctcctttgaaaagccccggcaaccctcacaggctgacactggcggggacgactcggacgaggactatgagaaggtgccactgcccaactcggtcttcgtcaacaccacggagtcctgcgaagtggaaaggttgttcaaggctacaagcccccggggagagccccaggatggactctactgcatccggaactcctctaccaagtcggggaaggtcctggttgtgtgggacgaaacctctaacaaagtgaggaactatcgcatttttgagaaggactctaagttctacctggagggcgaggtcctgtttgtgagtgtgggcagcatggtggagcactaccacacccacgtgctgcccagccaccagagcctgctgctgcggcacccctacggctacactgggcctaggtgatggcagtccatgtggctgccaggccaaggcagtcacaggggccctgaccccaggccacacagacggacatgggcccacatgggagggtgagcaggagcaaggctgtgcttgcctagggcctctgtgatggacatctcgtaggacccagccagtctcatccagcaggttgggttctagggctgaaccaggcgccaggctccagaggacgaagggactctgttgccccacactaacttgccctgtcccaatcccagaaacccaggaccaagctgtgcctgggctccaaggacaggaacactggtccccccatcacactcacccctaagtgggctgggagccaggcagggccagggcagctgggtgggggccggggctggccctgggacccccaggaacgctaagacacaggctccagtaggggctgttgcctccaataaagcagcagtgagctttgccttggtggctggggcttgattgggaaggaggggattaccagcttactgggtgcccatgctgatgtctaagtggtgaccgcagcagtacccgggaaccccaacagttggttgtcttgtcttccagggtgcaggtcactgagtgacttccccagggtgcacagcgagtaacagatcaggacccaaacttgggcagtctgggctgggagcccacaccccactcaccagttctgctgcctcaggtcaggccagggcagtgctgctgcagagctagaaggccctgcagctacagctgcttcattccctgcattagtgcctggttactgggtacctcctgagtggctgtccccgttccagaacttgcatacactgagcgggctacagagctagaaggccctgcagctacagctgcttcattccctgcattagcgagcagttattgggtacctcctgcatgcctggtcccattccagacaggggcctctggcctggctgagttcacagcccagtctggggacagctgggtatgaggtgcttacggcacagtgtccagggcagctgggtgtgcagggactgggggctcccggaagattttttggaggaagtaacagctacgatgggatgggaacagtggaccctaagcaggccaagggtgcgtagggacggtggtacccagatgcccaagtcttccaggcaatacctggctcaggcccagccccaatccatccccttactttctgccatggagttccagcaggtcactctccctggcacaccttccaggctggatttttaatgaaacagactcagggaggtaggggctggcagggaccctagaatccttgtgatttttcttagcaccttatgtcagggaaacctaaactgaggtcagcacttgggcccactgacagtgactgactgggggagaaggtcctgcagcccccttcccctgggtgtgttctggggacctgtggtttgctggcggaaacaagtgatgaggctggttagcggatgtgggaggctgtgaccccagggggccatagggtgcggtggaactgcaggccctgcagatgacggcagccagctgcttccaggaaccaggtgtccaaggccacctctgcaggggtttcctcttcagcctgcctggggtgagaggtcagtgcaccacagccgaggctggagcacagggagcttctgttgttctgatctatctctggaaaaccagccattcctcctccctgcagtcagaattctttgccctgtctgacctgaacttgcttagggagtcatgccactccccactgtggccatagtttctcttcctgtaaaattttattattttagttttttgtttttgagatgtagtctcaccctgtcgcccaggctggagtgcaatgccgtgatctccgctcactgccacctccgcctctctagttcaagcgattttcctgcctcagcctcccgagtagctgggattccaggcgcccgccaccacgcctggctaattttttgtatttttagtagagacgggattttatcatgttggccaggctggtctcgaactcctgacctcaggtgatctgcccaccttggcctcccaaagtgctgggattacaggcatgagccactgtgcctggccccttcctgtaaaatttttaaatggagaattgggtgcgagatgtggtttccagcctggtgcctggggtgctgagctagtgagtggtgcagtccaggacacctttgctttatgtcacttacacggtcacctggagccggctcaagtggctaaagcatcctggggcccagagccaggtgataggtccctctggccaactggacagttgaggcctgtggttacccgaagcccagctggggccctggtccagcctcgcctcccagactctgcacctgctagcacagctgtccacgtctgtgtgagctgctctaggccgagggcctcagtttcaagagtgtgttggggtgggatggggcaggccgtggtcctccagcatgaagaaggagccatgaggagttcccatgacctcccgagacttgccataagtgttctagtccacatataagggtagggttgggattaccatttactgaccacatctgtgaggtgccgagctgggtgcttgacatcatttgcttggagaagcagctgctagtagacccattttacaggtgagagaaccaagtctcacagaggcctgggttcaagtcccacctctgccactaactggcatgtgaccctatctatccttcactgctctgagcctagaccctggcccctgcctggctccctgccaggctccctgccacccctcacgacctctgatggtcgttgtgggggtctcttgcctggctcccagggctagggttagggctctggaggtgctttcactcaaccaagggggccacagcactggggagtgaaactgccccgcctcaccctgcgttgccctctgggtctgtgagggtgggctggcaggaggcctaggccttgccctaggggcagtcctgcttcctcattttatagatagggaaactgaggctttgggaggactcactgacatacctaccttcaagatgagttcaggtgggctcagttctggggcttgggaaaagggccccagtggctttgggaagcacccccagcccagggtgaaacatgcttcttctcttcctgtggttccatccgaaggattgtggtgagccccgtgccttcagttaataaagatttgtattgtg

SEQ ID NO: 4946 - protein, 494 aa, Homo sapiens; identical to SEQ ID NO: 4944

SEQ ID NO: 4947 - DNA, 5654 bp, Homo sapiens
ggggctgtctttgggtgcagaaggagctggtggggtccagccgggtgacccaggccgaggccggcagaagacagcctgatgccttgaagacttcctcttgcacttttgttggagggtgctggtttgctaaaagcagagagtatttttctttttatttattttgtttttaattttttaattttagctccagctcagttgcccagactggagagcagtggccaatcatagcttactgcctcctggaactcctggctcaatcgatcctcctggataagcctcctccgggtactatagcttcatggcggctgaagagatgcattggcctgtccctatgaaggccattggtgcccagaacctgctaaccatgcctgggggcgtggccaaggctggctacctgcacaagaagggcggtacccagcttcagctgctgaaatggcccctgcgctttgtcatcatccacaaacgctgcgtctactacttcaagagtagcacctctgcctccccgcagggcgccttctccctgagtggctataaccggcagcccagaccccagccagcccaggccctgtcccaaacagaggctgggccctaggattccctgctccagggtcctcccaggccgggatcagtttccagcttcacgcatgtcctgggctgggctctatccagtgatgggccatgagctgccctggagggccttctgcactaacaggcagggtgatgcgggcggctgaggagaccacgtccaacaacgttttccccttcaagatcatccatatcagcaagaagcaccgcacgtggttcttctcggcctcctccgaggaggagcgcaagagctggatggccttgctgcgcagggagattggccacttccacgaaaagaaagacctgcccttggacaccagcgactccagctcggacacagacagcttctacggcgcagttgagcggcctgtggatatcagcctttccccgtaccccacggacaatgaagactatgagcacgacgatgaggatgactcctacctggagcctgactccccggagcccggaaggcttgaggatgccctgatgcacccaccggcttacccaccacccccagtgcccacgcccaggaagccagccttctctgacatgccccgggcccactcctttacctccaagggccccggtcccctactgccacccccgccccctaagcacggcctcccagatgttggcctggctgctgaggactccaagagggacccactgtgcccgaggcgggctgagccttgccccagggtacctgctaccccccgaaggatgagcgatccccctctgagcaccatgcccaccgcacccggcctccggaaacccccttgcttccgggagagtgccagccccagcccggagccctggacccctggccacggggcctgctccacttccagtgctgccatcatggccactgccacctccagaaactgtgacaaactcaagtccttccacctgtccccccgaggaccacccacatctgagcccccacctgtgccagccaacaagcccaagttcctgaagatagctgaagaggaccccccaagggaggcagccatgcccggactctttgtgccccccgtggctccccggcctcctgcgctgaagctgccagtgcctgaggccatggcgcggcccgcagtcctgcccaggccagagaagccgcagctcccgcacctccagcgatcaccccccgatgggcagagtttcaggagcttctcctttgaaaagccccggcaaccctcacaggctgacactggcggggacgactcggacgaggactatgagaaggtgccactgcccaactcggtcttcgtcaacaccacggagtcctgcgaagtggaaaggttgttcaaggctacaagcccccggggagagccccaggatggactctactgcatccggaactcctctaccaagtcggggaaggtcctggttgtgtgggacgaaacctctaacaaagtgaggaactatcgcatttttgagaaggactctaagttctacctggagggcgaggtcctgtttgtgagtgtgggcagcatggtggagcactaccacacccacgtgctgcccagccaccagagcctgctgctgcggcacccctacggctacactgggcctaggtgatggcagtccatgtggctgccaggccaaggcagtcacaggggccctgaccccaggccacacagacggacatgggcccacatgggagggtgagcaggagcaaggctgtgcttgcctagggcctctgtgatggacatctcgtaggacccagccagtctcatccagcaggttgggttctagggctgaaccaggcgccaggctccagaggacgaagggactctgttgccccacactaacttgccctgtcccaatcccagaaacccaggaccaagctgtgcctgggctccaaggacaggaacactggtccccccatcacactcacccctaagtgggctgggagccaggcagggccagggcagctgggtgggggccggggctggccctgggacccccaggaacgctaagacacaggctccagtaggggctgttgcctccaataaagcagcagtgagctttgccttggtggctggggcttgattgggaaggaggggattaccagcttactgggtgcccatgctgatgtctaagtggtgaccgcagcagtacccgggaaccccaacagttggttgtcttgtcttccagggtgcaggtcactgagtgacttccccagggtgcacagcgagtaacagatcaggacccaaacttgggcagtctgggctgggagcccacaccccactcaccagttctgctgcctcaggtcaggccagggcagtgctgctgcagagctagaaggccctgcagctacagctgcttcattccctgcattagtgcctggttactgggtacctcctgagtggctgtccccgttccagaacttgcatacactgagcgggctacagagctagaaggccctgcagctacagctgcttcattccctgcattagcgagcagttattgggtacctcctgcatgcctggtcccattccagacaggggcctctggcctggctgagttcacagcccagtctggggacagctgggtatgaggtgcttacggcacagtgtccagggcagctgggtgtgcagggactgggggctcccggaagattttttggaggaagtaacagctacgatgggatgggaacagtggaccctaagcaggccaagggtgcgtagggacggtggtacccagatgcccaagtcttccaggcaatacctggctcaggcccagccccaatccatccccttactttctgccatggagttccagcaggtcactctccctggcacaccttccaggctggatttttaatgaaacagactcagggaggtaggggctggcagggaccctagaatccttgtgatttttcttagcaccttatgtcagggaaacctaaactgaggtcagcacttgggcccactgacagtgactgactgggggagaaggtcctgcagcccccttcccctgggtgtgttctggggacctgtggtttgctggcggaaacaagtgatgaggctggttagcggatgtgggaggctgtgaccccagggggccatagggtgcggtggaactgcaggccctgcagatgacggcagccagctgcttccaggaaccaggtgtccaaggccacctctgcaggggtttcctcttcagcctgcctggggtgagaggtcagtgcaccacagccgaggctggagcacagggagcttctgttgttctgatctatctctggaaaaccagccattcctcctccctgcagtcagaattctttgccctgtctgacctgaacttgcttagggagtcatgccactccccactgtggccatagtttctcttcctgtaaaattttattattttagttttttgtttttgagatgtagtctcaccctgtcgcccaggctggagtgcaatgccgtgatctccgctcactgccacctccgcctctctagttcaagcgattttcctgcctcagcctcccgagtagctgggattccaggcgcccgccaccacgcctggctaattttttgtatttttagtagagacgggattttatcatgttggccaggctggtctcgaactcctgacctcaggtgatctgcccaccttggcctcccaaagtgctgggattacaggcatgagccactgtgcctggccccttcctgtaaaatttttaaatggagaattgggtgcgagatgtggtttccagcctggtgcctggggtgctgagctagtgagtggtgcagtccaggacacctttgctttatgtcacttacacggtcacctggagccggctcaagtggctaaagcatcctggggcccagagccaggtgataggtccctctggccaactggacagttgaggcctgtggttacccgaagcccagctggggccctggtccagcctcgcctcccagactctgcacctgctagcacagctgtccacgtctgtgtgagctgctctaggccgagggcctcagtttcaagagtgtgttggggtgggatggggcaggccgtggtcctccagcatgaagaaggagccatgaggagttcccatgacctcccgagacttgccataagtgttctagtccacatataagggtagggttgggattaccatttactgaccacatctgtgaggtgccgagctgggtgcttgacatcatttgcttggagaagcagctgctagtagacccattttacaggtgagagaaccaagtctcacagaggcctgggttcaagtcccacctctgccactaactggcatgtgaccctatctatccttcactgctctgagcctagaccctggcccctgcctggctccctgccaggctccctgccacccctcacgacctctgatggtcgttgtgggggtctcttgcctggctcccagggctagggttagggctctggaggtgctttcactcaaccaagggggccacagcactggggagtgaaactgccccgcctcaccctgcgttgccctctgggtctgtgagggtgggctggcaggaggcctaggccttgccctaggggcagtcctgcttcctcattttatagatagggaaactgaggctttgggaggactcactgacatacctaccttcaagatgagttcaggtgggctcagttctggggcttgggaaaagggccccagtggctttgggaagcacccccagcccagggtgaaacatgcttcttctcttcctgtggttccatccgaaggattgtggtgagccccgtgccttcagttaataaagatttgtattgtgaaaagattttttcttttttttttgggacacagtctcactctgtcgcccaggctagagtggattggcgtgatctcggctcaatgcaaatctccagggttcaatcgattctcctgcctcaccctcccatgtagctgggattacagctgcctgccaaatttttgtatttttagtggaaccggggtttcaccatgttggccaggctggtcttgaactcctgacctcaactgatccgcccaccttggcctcccaagtgctgggattacaggcgcgagccacggcgcccag

SEQ ID NO: 4948 - protein, 494 aa, Homo sapiens; identical to SEQ ID NO: 4944

SEQ ID NO: 4949 - DNA, 7337 bp, Homo sapiens
ggggctgtctttgggtgcagaaggagctggtggggtccagccgggtgacccaggccgaggccggcagaagacagcctgatgccttgaagacttcctcttgcacttttgttggagggtgctggtttgctaaaagcagagagtatttttctttttatttattttgtttttaattttttaattttagctccagctcagttgcccagactggagagcagtggccaatcatagcttactgcctcctggaactcctggctcaatcgatcctcctggataagcctcctccgggtactatagcttcatggcggctgaagagatgcattggcctgtccctatgaaggccattggtgcccagaacctgctaaccatgcctgggggcgtggccaaggctggctacctgcacaagaagggcggtacccagcttcagctgctgaaatggcccctgcgctttgtcatcatccacaaacgctgcgtctactacttcaagagtagcacctctgcctccccgcagggcgccttctccctgagtggctataaccgggtgatgcgggcggctgaggagaccacgtccaacaacgttttccccttcaagatcatccatatcagcaagaagcaccgcacgtggttcttctcggcctcctccgaggaggagcgcaagagctggatggccttgctgcgcagggagattggccacttccacgaaaagaaagacctgcccttggacaccagcgactccagctcggacacagacagcttctacggcgcagttgagcggcctgtggatatcagcctttccccgtaccccacggacaatgaagactatgagcacgacgatgaggatgactcctacctggagcctgactccccggagcccggaaggcttgaggatgccctgatgcacccaccggcttacccaccacccccagtgcccacgcccaggaagccagccttctctgacatgccccgggcccactcctttacctccaagggccccggtcccctactgccacccccgccccctaagcacggcctcccagatgttggcctggctgctgaggactccaagagggacccactgtgcccgaggcgggctgagccttgccccagggtacctgctaccccccgaaggatgagcgatccccctctgagcaccatgcccaccgcacccggcctccggaaacccccttgcttccgggagagtgccagccccagcccggagccctggacccctggccacggggcctgctccacttccagtgctgccatcatggccactgccacctccagaaactgtgacaaactcaagtccttccacctgtccccccgaggaccacccacatctgagcccccacctgtgccagccaacaagcccaagttcctgaagatagctgaagaggaccccccaagggaggcagccatgcccggactctttgtgccccccgtggctccccggcctcctgcgctgaagctgccagtgcctgaggccatggcgcggcccgcagtcctgcccaggccagagaagccgcagctcccgcacctccagcgatcaccccccgatgggcagagtttcaggagcttctcctttgaaaagccccggcaaccctcacaggctgacactggcggggacgactcggacgaggactatgagaaggtgccactgcccaactcggtcttcgtcaacaccacggagtcctgcgaagtggaaaggttgttcaaggctacaagcccccggggagagccccaggatggactctactgcatccggaactcctctaccaagtcggggaaggtcctggttgtgtgggacgaaacctctaacaaagtgaggaactatcgcatttttgagaaggactctaagttctacctggagggcgaggtcctgtttgtgagtgtgggcagcatggtggagcactaccacacccacgtgctgcccagccaccagagcctgctgctgcggcacccctacggctacactgggcctaggtgatggcagtccatgtggctgccaggccaaggcagtcacaggggccctgaccccaggccacacagacggacatgggcccacatgggagggtgagcaggagcaaggctgtgcttgcctagggcctctgtgatggacatctcgtaggacccagccagtctcatccagcaggttgggttctagggctgaaccaggcgccaggctccagaggacgaagggactctgttgccccacactaacttgccctgtcccaatcccagaaacccaggaccaagctgtgcctgggctccaaggacaggaacactggtccccccatcacactcacccctaagtgggctgggagccaggcagggccagggcagctgggtgggggccggggctggccctgggacccccaggaacgctaagacacaggctccagtaggggctgttgcctccaataaagcagcagtgagctttgccttggtggctggggcttgattgggaaggaggggattaccagcttactgggtgcccatgctgatgtctaagtggtgaccgcagcagtacccgggaaccccaacagttggttgtcttgtcttccagggtgcaggtcactgagtgacttccccagggtgcacagcgagtaacagatcaggacccaaacttgggcagtctgggctgggagcccacaccccactcaccagttctgctgcctcaggtcaggccagggcagtgctgctgcagagctagaaggccctgcagctacagctgcttcattccctgcattagtgcctggttactgggtacctcctgagtggctgtccccgttccagaacttgcatacactgagcgggctacagagctagaaggccctgcagctacagctgcttcattccctgcattagcgagcagttattgggtacctcctgcatgcctggtcccattccagacaggggcctctggcctggctgagttcacagcccagtctggggacagctgggtatgaggtgcttacggcacagtgtccagggcagctgggtgtgcagggactgggggctcccggaagattttttggaggaagtaacagctacgatgggatgggaacagtggaccctaagcaggccaagggtgcgtagggacggtggtacccagatgcccaagtcttccaggcaatacctggctcaggcccagccccaatccatccccttactttctgccatggagttccagcaggtcactctccctggcacaccttccaggctggatttttaatgaaacagactcagggaggtaggggctggcagggaccctagaatccttgtgatttttcttagcaccttatgtcagggaaacctaaactgaggtcagcacttgggcccactgacagtgactgactgggggagaaggtcctgcagcccccttcccctgggtgtgttctggggacctgtggtttgctggcggaaacaagtgatgaggctggttagcggatgtgggaggctgtgaccccagggggccatagggtgcggtggaactgcaggccctgcagatgacggcagccagctgcttccaggaaccaggtgtccaaggccacctctgcaggggtttcctcttcagcctgcctggggtgagaggtcagtgcaccacagccgaggctggagcacagggagcttctgttgttctgatctatctctggaaaaccagccattcctcctccctgcagtcagaattctttgccctgtctgacctgaacttgcttagggagtcatgccactccccactgtggccatagtttctcttcctgtaaaattttattattttagttttttgtttttgagatgtagtctcaccctgtcgcccaggctggagtgcaatgccgtgatctccgctcactgccacctccgcctctctagttcaagcgattttcctgcctcagcctcccgagtagctgggattccaggcgcccgccaccacgcctggctaattttttgtatttttagtagagacgggattttatcatgttggccaggctggtctcgaactcctgacctcaggtgatctgcccaccttggcctcccaaagtgctgggattacaggcatgagccactgtgcctggccccttcctgtaaaatttttaaatggagaattgggtgcgagatgtggtttccagcctggtgcctggggtgctgagctagtgagtggtgcagtccaggacacctttgctttatgtcacttacacggtcacctggagccggctcaagtggctaaagcatcctggggcccagagccaggtgataggtccctctggccaactggacagttgaggcctgtggttacccgaagcccagctggggccctggtccagcctcgcctcccagactctgcacctgctagcacagctgtccacgtctgtgtgagctgctctaggccgagggcctcagtttcaagagtgtgttggggtgggatggggcaggccgtggtcctccagcatgaagaaggagccatgaggagttcccatgacctcccgagacttgccataagtgttctagtccacatataagggtagggttgggattaccatttactgaccacatctgtgaggtgccgagctgggtgcttgacatcatttgcttggagaagcagctgctagtagacccattttacaggtgagagaaccaagtctcacagaggcctgggttcaagtcccacctctgccactaactggcatgtgaccctatctatccttcactgctctgagcctagaccctggcccctgcctggctccctgccaggctccctgccacccctcacgacctctgatggtcgttgtgggggtctcttgcctggctcccagggctagggttagggctctggaggtgctttcactcaaccaagggggccacagcactggggagtgaaactgccccgcctcaccctgcgttgccctctgggtctgtgagggtgggctggcaggaggcctaggccttgccctaggggcagtcctgcttcctcattttatagatagggaaactgaggctttgggaggactcactgacatacctaccttcaagatgagttcaggtgggctcagttctggggcttgggaaaagggccccagtggctttgggaagcacccccagcccagggtgaaacatgcttcttctcttcctgtggttccatccgaaggattgtggtgagccccgtgccttcagttaataaagatttgtattgtgaaaagattttttcttttttttttgggacacagtctcactctgtcgcccaggctagagtggattggcgtgatctcggctcaatgcaaatctccagggttcaatcgattctcctgcctcaccctcccatgtagctgggattacagctgcctgccaaatttttgtatttttagtggaaccggggtttcaccatgttggccaggctggtcttgaactcctgacctcaactgatccgcccaccttggcctcccaagtgctgggattacaggcgcgagccacggcgcccagccttgaaaagatgtttttagaaccagaagaaacctcggttcccactgatccttctgggccacgttgtgcggagctcccctgctggttggggctcagcgcagccccagggaggtgcttcctgcacctcaggatgggcgagggtgggcattgggggagagggggacctgggacctgcggcttagttccctgaggcaggcagggcttattggggccatttcatagaaaggcagattgaagctcagcagggaagaggcttttgagggtgatccaggcgctggagggatggcctaggacaccagggtcacaccaggaacatgggagggccgtgcttgtctctagacgaggggaatgggggaagggccacaacctctgtttctgtgacccagcagcatcaagcccctcgctgggcacctcgcacacaccccctgccttatctctgcctgcacgccctgttccctccacctagactgcctgctgagggggcagtgccaggaggttgcctgtccttggggaagaggggcagtgaccctgtgaagatgcttgacagacaacccccaccacctcagaagtgtgtgtgagtggtgaacccttttaagccatcttccagccattctcactggagggagatttgatgggtacagagcagacccctacctgtctaccctccttcggacccctaggaagcttcgcaggccttccaggctgccagacagctgccctggcgttgccgtctgcttcttccctggccccactctgaggggctcagagctgaggcagaatccctttttcattcatttcctgcagaataaaacaacatacagaaaagtgaataaaacataaatgcacaacctaacacactgttaggaagtgaacgatctgcaaccaccatcaggaaatagttttgccagcacccaagtgccctcccctcacagtgtcacttccggcctctctgccctggcttatgtgagtcttgtgttcttgtttttctaaaaagtcttcagcacccaattatgcaggcattgcagtattttcctgtttctgtgctttatccccttgaatcatacagatgcaaattctggcagctggcttctttggctcgttattatgtctgtgagatttattcatgttgctgtgcgtagtatagtttgtgcatgttcattgctaaaaacttccattgtttggctgtatcgtagttcacagattcatttcactgtcagtcaagcttgtccaatgcatgcagcccaggatgcctttgaatgtggcccaacacaaatttgtaaactttcttaaaacattataaagatttttgtttgcgatttttttttttagctcatcagctatagttagtggtagtgtattttatgcgtgacccgagacagttcttccggtatggtccatggaagccaaaagattggacatgcctgctgtagatggacagttggtttgtttctagtttggggtaactacacacaatgctgctagcaacagttttgtccatgtctctgatgcacgtgtgttttttgcaaatggtgcacaaatttttctagggtttgtactcaggagtctgactcctgggttctagggtatgaagatctttctaaatattgttctagtttacgtgcccaccagcagtaaaacagaattcccttgccttcccatccttggcagacatttcacttttgccagtctggtggggtgtatagttatggccttaatttgcatttagctaattaccaaggagattgagcatatttttatgtttttattaaccattttgattttgtctcctgtgaagtgtctatcatcttttgcccattttttaacttgttgtctttttctttttcttttcttttttttttttt

SEQ ID NO: 4950 - protein, 561 aa, Homo sapiens; identical to SEQ ID NO: 4930

SEQ ID NO: 4951 - DNA, 3328 bp, Homo sapiens
agtgctttggtggagacgccagtgctgggcgaatgttcttccgagagcgccttatctgcgttgctgcagtcctgcagaatgtcgagtgttttttgagacagagtcttgttttgtcacccaggctggagtgcagtggtgctttctcagctcactgcaacctctgcctccctagttcaagcgattctcctacctcagcctccccagtagctaagactacaggcatgcaccaccatacctggctaatttttgtatttttagtagagatggggtttcgccatgttggccaggctgtctcgaactcctgacctcagtgatcctcccaccttggcctcccaaagtgctgggagttggacaggttggattatttgaaaacagcctgggttgtgagaggaaaatgagcaggccagaggaatttggagctgccagcatcttggagggcccagatacaatcagcagaggaagaaaaccacaggatgaaacagtcccaatgaccagcaccagtgaagacccaagacagcacaaaaggccagctagcagagaaacatgattgttcaccgtccatctctgggacaacctagatgcctgggcagatttctgaagtggagcaagagaaatcttctcttcttcacctgcttcagggaggcatcaaagtgccaaaaaggattctcagacggctgatggaaaacgccccggaccctccgtagtgccgcggggaagtccccggaaagggtgtgaaaaagtatcgaatttgggtgatgcctcctcctcgtccagcgcctgacagggcccagctcctggcccaggtgcccaggaggcaccgatccccgcagccggcctcctcccgcgcgggctccactcccatttcggcctcgcccccacaccccatagtctttcatccgtgagtcctgcaggcaggacgggttggaggtctgcaaacaggaccctctctgggaagccgcgacagcggctgagctcggggtttgggggcgcaggtcgggctagaaccaccccccttctctccgcgtccgggcatcgtcccagcggcccctcctctgtgcccaggatgctcgggcggcggctgcagtgggacctccaccttctctgccaaccagagcggaggaacctttccgcctccctccaagcggcgcactgagcgctctttgcctagaacgacttccctcccgctgcctggggcagcctcaccctgggcgcccacaccccagccctgggagagcgctactccgcctcccgcaccaccgaaaacctcctcctcctttacgggccgcgcctcctttacgggccgcgccccctttatacgcggacgcgccctcttttggtcgccccctccccaacccagcactaaggagcaccctgctctggtctccgccaccacccagcgcctcctggacccatccccccaaacccttgaacgtcctcaggacccccaggtgagcgcggcgcgctgcgggcggggaccctctctgcacctccccgcacccctgggggtcgctctgtccctacggtccccgcctcccctttctcctttctaagcgcctcgcgcccaggccgccgcccggggtggcgcagcccgcagccctcccgctccgggcgccctccgccgctccgagaccccctgggggcgcgtcctctcccgctcccctgttccctcccccggctcagggcgggcgcgtggtcccaggggaggctcccgcccagccccgcactcctttgtgcggccgggcgggcgctgcgtcaaggtggaggcgcggccacacgcgcgcacccacccgcgcgcacccagcccccgggagaggcaggaagggaggcggcggcgcgaggaggagggagcggccgtggagcccaatcgttcgctccccttcccgggtccgcgcgcggcgccgcctccgccattgctgcgagcaggagcaggagacgcggagctcggagcgctcagctgacctgccggagccgggcgtgggctgcagcctcggagctcccggaacgatggtgaagttggggaacaatttcgcagagaagggcaccaagcagccgctgctggaggatggcttcgacaccattcccctgatgacgcccctcgatgtcaatcagctgcagttcccgcccccggataaggtggtcgtgaaaactaagaccgagtatgaacctgaccgcaagaaagggaaagcacgtcctccccaaattgctgagttcaccgtcagcatcacggagggtgtcaccgagaggtttaaggtctccgtgttggtcctcttcgccctggccttcctcacctgcgtcgtcttcctggttgtctacaaggtgtacaagtatgaccgcgcctgccccgatgggttcgtcctcaagaacacccagtgcatcccagaaggcttggagagctactacgcggagcaagactccagtgcccgggagaaattttacacagtcataaaccactacaacctggccaagcagagcatcacgcgctccgtatcgccctggatgtcagttctgtcagaagagaagctgtccgagcaggagactgaagcggctgagaagtcagcttagcgggatgggcaagttccttacaatgtgtcacttgcaaataacaaagggactttgagggacatttcattaaatataattactgatactttagaggttactcatttacggtgcaattgcttctgtttgctaatgctgctttgcaaataaaacttgctgccgaccacccacgggcataaaatcaagtgcatttcagcattgcctaaagagctctgacaccacttttcatgttaagatcttcatttagctcctttactgggatttattggatgctgtaaaaaaataaatttacactggatatgcgaagggtttggatctcagataaatgcattttgtggaattgattttctgaaccgaccctgctgtctgcaaaccttcctccatagccatatctagagtgatctctcgctgtgctaagagcaagcctacttcgcatttcttcctcggccatcagcgggtaacagtgctgactgctgccaaggtgcactgtagtaaggtgtctggagacacagaccgtgaccttggcgcagcggtgtgcatcagaggcgtgtgctgagaagggtggtgttaagctgtggaaaatgactcaagagcaataaatcagtgccaaagcttccctgcgcatctgaatagacacaagtgaagcccgtgtgcgcacagtgcagaggccgagcctgtatttccaggtagacgtggactttattgactgtgaattcatttacatgtaacttctgacatttcactctgtgcaaataaagaacatgaggat

SEQ ID NO: 4952 - protein, 185 aa, Homo sapiens; identical to SEQ ID NO: 521

SEQ ID NO: 4953 - DNA, 3293 bp, Homo sapiens
agagatggggtttcaccatgttggtcaggctggttttgaactcctgaccttgtgatctgctggtcttggcctcccaaagtgctggtgtgtctggaattggttacttctggtgcgttcttcgtctcgctgacttcaagaatgaagccacggaccctcgcgatgcctgggcagatttctgaagtggagcaagagaaatcttctcttcttcacctgcttcagggaggcatcaaagtgccaaaaaggattctcagacggctgatggaaaacgccccggaccctccgtagtgccgcggggaagtccccggaaagggtgtgaaaaagtatcgaatttgggtgatgcctcctcctcgtccagcgcctgacagggcccagctcctggcccaggtgcccaggaggcaccgatccccgcagccggcctcctcccgcgcgggctccactcccatttcggcctcgcccccacaccccatagtctttcatccgtgagtcctgcaggcaggacgggttggaggtctgcaaacaggaccctctctgggaagccgcgacagcggctgagctcggggtttgggggcgcaggtcgggctagaaccaccccccttctctccgcgtccgggcatcgtcccagcggcccctcctctgtgcccaggatgctcgggcggcggctgcagtgggacctccaccttctctgccaaccagagcggaggaacctttccgcctccctccaagcggcgcactgagcgctctttgcctagaacgacttccctcccgctgcctggggcagcctcaccctgggcgcccacaccccagccctgggagagcgctactccgcctcccgcaccaccgaaaacctcctcctcctttacgggccgcgcctcctttacgggccgcgccccctttatacgcggacgcgccctcttttggtcgccccctccccaacccagcactaaggagcaccctgctctggtctccgccaccacccagcgcctcctggacccatccccccaaacccttgaacgtcctcaggacccccaggagcaggagacgcggagctcggagcgctcagctgacctgccggagccgggcgtgggctgcagcctcggagctcccggaacgatggtgaagttggggaacaatttcgcagagaagggcaccaagcagccgctgctggaggatggcttcgacaccattcccctgatgacgcccctcgatgtcaatcagctgcagttcccgcccccggataaggtggtcgtgaaaactaagaccgagtatgaacctgaccgcaagaaagggaaagcacgtcctccccaaattgctgagttcaccgtcagcatcacggagggtgtcaccgagaggtttaaggtctccgtgttggtcctcttcgccctggccttcctcacctgcgtcgtcttcctggttgtctacaaggtgtacaagtatgaccgcgcctgccccgatgggttcgtcctcaagaacacccagtgcatcccagaaggcttggagagctactacgcggagcaagactccagtgcccgggagaaattttacacagtcataaaccactacaacctggccaagcagagcatcacgcgctccgtatcgccctggatgtcagttctgtcagaagagaagctgtccgagcaggagactgaagcggctgagaagtcagcttagcgggatgggcaagttccttacaatgtgtcacttgcaaataacaaagggactttgagggacatttcattaaatataattactgatactttagaggttactcatttacggtgcaattgcttctgtttgctaatgctgctttgcaaataaaacttgctgccgaccacccacgggcataaaatcaagtgcatttcagcattgcctaaagagctctgacaccacttttcatgttaagatcttcatttagctcctttactgggatttattggatgctgtaaaaaaataaatttacactggatatgcgaagggtttggatctcagataaatgcattttgtggaattgattttctgaaccgaccctgctgtctgcaaaccttcctccatagccatatctagagtgatctctcgctgtgctaagagcaagcctacttcgcatttcttcctcggccatcagcgggtaacagtgctgactgctgccaaggtgcactgtagtaagtaagtggcatagagaacgaggaaaaagacccccccacccctccctgtgctgactcctgagtcggggtgggacggccctgcaatgtggcaggctcggtgtggattgactactccctcccctctgactctggcatcttggtaaggagggaggggcaccacccatctgggtggagacagctggggtttgctccagtgtgtgtagactggcagagcatgtgagggagagggctgggaagagacggccctgggcccgtgaggtgcagaactctccctgcaggtagtctgtctgctctgtgatgtgctgataggaaagagcccccactggccctctggttcacttctattatgaataaatttgcaccaatagccccattagtttttaaagaaatgagctgggtgggaaaagtggaaatgtaatttctggtaagcttgagctactttaatttttattctatgaaactgatatcccttgatgtgggaaacaggcaggaaaggctgtggggtgggggtgggggactggtgtggcaccgtgcaaacaaaatgacaaatttcaactcacaatctttgtaagaaaattgttccagtttgaatcttgatattaaagtttatgtttacaaaactgccagttagatgaactaagtgtgtaaaacaaatagaaaagacattcgcagacatttcttctatgttattgaatgtgttgtttctggtgtacgtgtcaaaagtttcagttttttagatcagaaataaacgacaaatagtgtgagatgtgttgtgaacaggcatggtgaccgtggtcagcgccactcttgtttcctgaaatgtgcttctaagacagaaaatgtattttctcatcaagggtgtctggagacacagaccgtgaccttggcgcagcggtgtgcatcagaggcgtgtgctgagaagggtggtgttaagctgtggaaaatgactcaagagcaataaatcagtgccaaagcttccctgcgcatctgaatagacacaagtgaagcccgtgtgcgcacagtgcagaggccgagcctgtatttccaggtagacgtggactttattgactgtgaattcatttacatgtaacttctgacatttcactctgtgcaaataaagaacatgaggatacc

SEQ ID NO: 4954 - protein, 185 aa, Homo sapiens; identical to SEQ ID NO: 521

SEQ ID NO: 4955 - DNA, 1100 bp, Homo sapiens
gaaaaccacaggatgaaacagtcccaatgaccagcaccagtgaagacccaagacagcacaaaaggccagctagcagagaaacatgattgttcaccgtccatctctgggacaacctagatgcctgggcagatttctgaagtggagcaagagaaatcttctcttcttcacctgcttcagggaggcatcaaagtgccaaaaaggctgcagcctcggagctcccggaacgatggtgaagttggggaacaatttcgcagagaagggcaccaagcagccgctgctggaggatggcttcgacaccattcccctgatgacgcccctcgatgtcaatcagctgcagttcccgcccccggataaggtggtcgtgaaaactaagaccgagtatgaacctgaccgcaagaaagggaaagcacgtcctccccaaattgctgagttcaccgtcagcatcacggagggtgtcaccgagaggtttaaggtctccgtgttggtcctcttcgccctggccttcctcacctgcgtcgtcttcctggttgtctacaaggtgtacaagtatgaccgcgcctgccccgatgggttcgtcctcaagaacacccagtgcatcccagaaggcttggagagctactacgcggagcaagactccagtgcccgggagaaattttacacagtcataaaccactacaacctggccaagcagagcatcacgcgctccgtatcgccctggatgtcagttctgtcagaagagaagctgtccgagcaggagactgaagcggctgagaagtcagcttagcgggatgggcaagttccttacaatgtgtcacttgcaaataacaaagggactttgagggacatttcattaaatataattactgatactttagaggttactcatttacggtgcaattgcttctgtttgctaatgctgctttgcaaataaaacttgctgccgaccacccacgggcataaaatcaagtgcatttcagcattgcctaaagagctctgacaccacttttcatgttaagatcttcatttagctcctttactgggatttattggatgctgtaaaaaaataaatttacactggatatgcgaagggtttggatctc

SEQ ID NO: 4956 - protein, 233 aa, Homo sapiens
MIVHRPSLGQPRCLGRFLKWSKRNLLFFTCFREASKCQKGCSLGAPGTMVKLGNNFAEKGTKQPLLEDGFDTIPLMTPLDVNQLQFPPPDKVVVKTKTEYEPDRKKGKARPPQIAEFTVSITEGVTERFKVSVLVLFALAFLTCVVFLVVYKVYKYDRACPDGFVLKNTQCIPEGLESYYAEQDSSAREKFYTVINHYNLAKQSITRSVSPWMSVLSEEKLSEQETEAAEKSA

SEQ ID NO: 4957 - DNA, 2040 bp, Homo sapiens
gaaaaccacaggatgaaacagtcccaatgaccagcaccagtgaagacccaagacagcacaaaaggccagctagcagagaaacatgattgttcaccgtccatctctgggacaacctagatgcctgggcagatttctgaagtggagcaagagaaatcttctcttcttcacctgcttcagggaggcatcaaagtgccaaaaaggctgcagcctcggagctcccggaacgatggtgaagttggggaacaatttcgcagagaagggcaccaagcagccgctgctggaggatggcttcgacaccattcccctgatgacgcccctcgatgtcaatcagctgcagttcccgcccccggataaggtggtcgtgaaaactaagaccgagtatgaacctgaccgcaagaaagggaaagcacgtcctccccaaattgctgagttcaccgtcagcatcacggagggtgtcaccgagaggtttaaggtctccgtgttggtcctcttcgccctggccttcctcacctgcgtcgtcttcctggttgtctacaaggtgtacaagtatgaccgcgcctgccccgatgggttcgtcctcaagaacacccagtgcatcccagaaggcttggagagctactacgcggagcaagactccagtgcccgggagaaattttacacagtcataaaccactacaacctggccaagcagagcatcacgcgctccgtatcgccctggatgtcagttctgtcagaagagaagctgtccgagcaggagactgaagcggctgagaagtcagcttagcgggatgggcaagttccttacaatgtgtcacttgcaaataacaaagggactttgagggacatttcattaaatataattactgatactttagaggttactcatttacggtgcaattgcttctgtttgctaatgctgctttgcaaataaaacttgctgccgaccacccacgggcataaaatcaagtgcatttcagcattgcctaaagagctctgacaccacttttcatgttaagatcttcatttagctcctttactgggatttattggatgctgtaaaaaaataaatttacactggatatgcgaagggtttggatctcagataaatgcattttgtggaattgattttctgaaccgaccctgctgtctgcaaaccttcctccatagccatatctagagtgatctctcgctgtgctaagagcaagcctacttcgcatttcttcctcggccatcagcgggtaacagtgctgactgctgccaaggtgcactgtagtaagtaagtggcatagagaacgaggaaaaagacccccccacccctccctgtgctgactcctgagtcggggtgggacggccctgcaatgtggcaggctcggtgtggattgactactccctcccctctgactctggcatcttggtaaggagggaggggcaccacccatctgggtggagacagctggggtttgctccagtgtgtgtagactggcagagcatgtgagggagagggctgggaagagacggccctgggcccgtgaggtgcagaactctccctgcaggtagtctgtctgctctgtgatgtgctgataggaaagagcccccactggccctctggttcacttctattatgaataaatttgcaccaatagccccattagtttttaaagaaatgagctgggtgggaaaagtggaaatgtaatttctggtaagcttgagctactttaatttttattctatgaaactgatatcccttgatgtgggaaacaggcaggaaaggctgtggggtgggggtgggggactggtgtggcaccgtgcaaacaaaatgacaaatttcaactcacaatctttgtaagaaaattgttccagtttgaatcttgatattaaagtttatgtttacaaaactgccagttagatgaactaagtgtgtaaaacaaatagaaaagacattcgcagacatttcttctatgttattgaatgtgttgtttctggtgtacgtgtcaaaagtttcagttttttagatcagaaataaacgacaaatagtgtgag

SEQ ID NO: 4958 - protein, 233 aa, Homo sapiens; identical to SEQ ID NO: 4956

SEQ ID NO: 4959 - DNA, 2409 bp, Homo sapiens
gaaaaccacaggatgaaacagtcccaatgaccagcaccagtgaagacccaagacagcacaaaaggccagctagcagagaaacatgattgttcaccgtccatctctgggacaacctagatgcctgggcagatttctgaagtggagcaagagaaatcttctcttcttcacctgcttcagggaggcatcaaagtgccaaaaaggctgcagcctcggagctcccggaacgatggtgaagttggggaacaatttcgcagagaagggcaccaagcagccgctgctggaggatggcttcgacaccattcccctgatgacgcccctcgatgtcaatcagctgcagttcccgcccccggataaggtggtcgtgaaaactaagaccgagtatgaacctgaccgcaagaaagggaaagcacgtcctccccaaattgctgagttcaccgtcagcatcacggagggtgtcaccgagaggtttaaggtctccgtgttggtcctcttcgccctggccttcctcacctgcgtcgtcttcctggttgtctacaaggtgtacaagtatgaccgcgcctgccccgatgggttcgtcctcaagaacacccagtgcatcccagaaggcttggagagctactacgcggagcaagactccagtgcccgggagaaattttacacagtcataaaccactacaacctggccaagcagagcatcacgcgctccgtatcgccctggatgtcagttctgtcagaagagaagctgtccgagcaggagactgaagcggctgagaagtcagcttagcgggatgggcaagttccttacaatgtgtcacttgcaaataacaaagggactttgagggacatttcattaaatataattactgatactttagaggttactcatttacggtgcaattgcttctgtttgctaatgctgctttgcaaataaaacttgctgccgaccacccacgggcataaaatcaagtgcatttcagcattgcctaaagagctctgacaccacttttcatgttaagatcttcatttagctcctttactgggatttattggatgctgtaaaaaaataaatttacactggatatgcgaagggtttggatctcagataaatgcattttgtggaattgattttctgaaccgaccctgctgtctgcaaaccttcctccatagccatatctagagtgatctctcgctgtgctaagagcaagcctacttcgcatttcttcctcggccatcagcgggtaacagtgctgactgctgccaaggtgcactgtagtaagtaagtggcatagagaacgaggaaaaagacccccccacccctccctgtgctgactcctgagtcggggtgggacggccctgcaatgtggcaggctcggtgtggattgactactccctcccctctgactctggcatcttggtaaggagggaggggcaccacccatctgggtggagacagctggggtttgctccagtgtgtgtagactggcagagcatgtgagggagagggctgggaagagacggccctgggcccgtgaggtgcagaactctccctgcaggtagtctgtctgctctgtgatgtgctgataggaaagagcccccactggccctctggttcacttctattatgaataaatttgcaccaatagccccattagtttttaaagaaatgagctgggtgggaaaagtggaaatgtaatttctggtaagcttgagctactttaatttttattctatgaaactgatatcccttgatgtgggaaacaggcaggaaaggctgtggggtgggggtgggggactggtgtggcaccgtgcaaacaaaatgacaaatttcaactcacaatctttgtaagaaaattgttccagtttgaatcttgatattaaagtttatgtttacaaaactgccagttagatgaactaagtgtgtaaaacaaatagaaaagacattcgcagacatttcttctatgttattgaatgtgttgtttctggtgtacgtgtcaaaagtttcagttttttagatcagaaataaacgacaaatagtgtgagatgtgttgtgaacaggcatggtgaccgtggtcagcgccactcttgtttcctgaaatgtgcttctaagacagaaaatgtattttctcatcaagggtgtctggagacacagaccgtgaccttggcgcagcggtgtgcatcagaggcgtgtgctgagaagggtggtgttaagctgtggaaaatgactcaagagcaataaatcagtgccaaagcttccctgcgcatctgaatagacacaagtgaagcccgtgtgcgcacagtgcagaggccgagcctgtatttccaggtagacgtggactttattgactgtgaattcatttacatgtaacttctgacatttcactctgtgcaaataaagaacatgaggatacc

SEQ ID NO: 4960 - protein, 233 aa, Homo sapiens; identical to SEQ ID NO: 4956

SEQ ID NO: 4961 - DNA, 1066 bp, Homo sapiens
cctgaccagtgggtcactctcatggcagatgcctgggcagatttctgaagtggagcaagagaaatcttctcttcttcacctgcttcagggaggcatcaaagtgccaaaaaggagcaggagacgcggagctcggagcgctcagctgacctgccggagccgggcgtgggctgcagcctcggagctcccggaacgatggtgaagttggggaacaatttcgcagagaagggcaccaagcagccgctgctggaggatggcttcgacaccattcccctgatgacgcccctcgatgtcaatcagctgcagttcccgcccccggataaggtggtcgtgaaaactaagaccgagtatgaacctgaccgcaagaaagggaaagcacgtcctccccaaattgctgagttcaccgtcagcatcacggagggtgtcaccgagaggtttaaggtctccgtgttggtcctcttcgccctggccttcctcacctgcgtcgtcttcctggttgtctacaaggtgtacaagtatgaccgcgcctgccccgatgggttcgtcctcaagaacacccagtgcatcccagaaggcttggagagctactacgcggagcaagactccagtgcccgggagaaattttacacagtcataaaccactacaacctggccaagcagagcatcacgcgctccgtatcgccctggatgtcagttctgtcagaagagaagctgtccgagcaggagactgaagcggctgagaagtcagcttagcgggatgggcaagttccttacaatgtgtcacttgcaaataacaaagggactttgagggacatttcattaaatataattactgatactttagaggttactcatttacggtgcaattgcttctgtttgctaatgctgctttgcaaataaaacttgctgccgaccacccacgggcataaaatcaagtgcatttcagcattgcctaaagagctctgacaccacttttcatgttaagatcttcatttagctcctttactgggatttattggatgctgtaaaaaaataaatttacactggatatgcgaagggtttggatctc

SEQ ID NO: 4962 - protein, 185 aa, Homo sapiens; identical to SEQ ID NO: 521

SEQ ID NO: 4963 - DNA, 2006 bp, Homo sapiens
cctgaccagtgggtcactctcatggcagatgcctgggcagatttctgaagtggagcaagagaaatcttctcttcttcacctgcttcagggaggcatcaaagtgccaaaaaggagcaggagacgcggagctcggagcgctcagctgacctgccggagccgggcgtgggctgcagcctcggagctcccggaacgatggtgaagttggggaacaatttcgcagagaagggcaccaagcagccgctgctggaggatggcttcgacaccattcccctgatgacgcccctcgatgtcaatcagctgcagttcccgcccccggataaggtggtcgtgaaaactaagaccgagtatgaacctgaccgcaagaaagggaaagcacgtcctccccaaattgctgagttcaccgtcagcatcacggagggtgtcaccgagaggtttaaggtctccgtgttggtcctcttcgccctggccttcctcacctgcgtcgtcttcctggttgtctacaaggtgtacaagtatgaccgcgcctgccccgatgggttcgtcctcaagaacacccagtgcatcccagaaggcttggagagctactacgcggagcaagactccagtgcccgggagaaattttacacagtcataaaccactacaacctggccaagcagagcatcacgcgctccgtatcgccctggatgtcagttctgtcagaagagaagctgtccgagcaggagactgaagcggctgagaagtcagcttagcgggatgggcaagttccttacaatgtgtcacttgcaaataacaaagggactttgagggacatttcattaaatataattactgatactttagaggttactcatttacggtgcaattgcttctgtttgctaatgctgctttgcaaataaaacttgctgccgaccacccacgggcataaaatcaagtgcatttcagcattgcctaaagagctctgacaccacttttcatgttaagatcttcatttagctcctttactgggatttattggatgctgtaaaaaaataaatttacactggatatgcgaagggtttggatctcagataaatgcattttgtggaattgattttctgaaccgaccctgctgtctgcaaaccttcctccatagccatatctagagtgatctctcgctgtgctaagagcaagcctacttcgcatttcttcctcggccatcagcgggtaacagtgctgactgctgccaaggtgcactgtagtaagtaagtggcatagagaacgaggaaaaagacccccccacccctccctgtgctgactcctgagtcggggtgggacggccctgcaatgtggcaggctcggtgtggattgactactccctcccctctgactctggcatcttggtaaggagggaggggcaccacccatctgggtggagacagctggggtttgctccagtgtgtgtagactggcagagcatgtgagggagagggctgggaagagacggccctgggcccgtgaggtgcagaactctccctgcaggtagtctgtctgctctgtgatgtgctgataggaaagagcccccactggccctctggttcacttctattatgaataaatttgcaccaatagccccattagtttttaaagaaatgagctgggtgggaaaagtggaaatgtaatttctggtaagcttgagctactttaatttttattctatgaaactgatatcccttgatgtgggaaacaggcaggaaaggctgtggggtgggggtgggggactggtgtggcaccgtgcaaacaaaatgacaaatttcaactcacaatctttgtaagaaaattgttccagtttgaatcttgatattaaagtttatgtttacaaaactgccagttagatgaactaagtgtgtaaaacaaatagaaaagacattcgcagacatttcttctatgttattgaatgtgttgtttctggtgtacgtgtcaaaagtttcagttttttagatcagaaataaacgacaaatagtgtgag

SEQ ID NO: 4964 - protein, 185 aa, Homo sapiens; identical to SEQ ID NO: 521

SEQ ID NO: 4965 - DNA, 2375 bp, Homo sapiens
cctgaccagtgggtcactctcatggcagatgcctgggcagatttctgaagtggagcaagagaaatcttctcttcttcacctgcttcagggaggcatcaaagtgccaaaaaggagcaggagacgcggagctcggagcgctcagctgacctgccggagccgggcgtgggctgcagcctcggagctcccggaacgatggtgaagttggggaacaatttcgcagagaagggcaccaagcagccgctgctggaggatggcttcgacaccattcccctgatgacgcccctcgatgtcaatcagctgcagttcccgcccccggataaggtggtcgtgaaaactaagaccgagtatgaacctgaccgcaagaaagggaaagcacgtcctccccaaattgctgagttcaccgtcagcatcacggagggtgtcaccgagaggtttaaggtctccgtgttggtcctcttcgccctggccttcctcacctgcgtcgtcttcctggttgtctacaaggtgtacaagtatgaccgcgcctgccccgatgggttcgtcctcaagaacacccagtgcatcccagaaggcttggagagctactacgcggagcaagactccagtgcccgggagaaattttacacagtcataaaccactacaacctggccaagcagagcatcacgcgctccgtatcgccctggatgtcagttctgtcagaagagaagctgtccgagcaggagactgaagcggctgagaagtcagcttagcgggatgggcaagttccttacaatgtgtcacttgcaaataacaaagggactttgagggacatttcattaaatataattactgatactttagaggttactcatttacggtgcaattgcttctgtttgctaatgctgctttgcaaataaaacttgctgccgaccacccacgggcataaaatcaagtgcatttcagcattgcctaaagagctctgacaccacttttcatgttaagatcttcatttagctcctttactgggatttattggatgctgtaaaaaaataaatttacactggatatgcgaagggtttggatctcagataaatgcattttgtggaattgattttctgaaccgaccctgctgtctgcaaaccttcctccatagccatatctagagtgatctctcgctgtgctaagagcaagcctacttcgcatttcttcctcggccatcagcgggtaacagtgctgactgctgccaaggtgcactgtagtaagtaagtggcatagagaacgaggaaaaagacccccccacccctccctgtgctgactcctgagtcggggtgggacggccctgcaatgtggcaggctcggtgtggattgactactccctcccctctgactctggcatcttggtaaggagggaggggcaccacccatctgggtggagacagctggggtttgctccagtgtgtgtagactggcagagcatgtgagggagagggctgggaagagacggccctgggcccgtgaggtgcagaactctccctgcaggtagtctgtctgctctgtgatgtgctgataggaaagagcccccactggccctctggttcacttctattatgaataaatttgcaccaatagccccattagtttttaaagaaatgagctgggtgggaaaagtggaaatgtaatttctggtaagcttgagctactttaatttttattctatgaaactgatatcccttgatgtgggaaacaggcaggaaaggctgtggggtgggggtgggggactggtgtggcaccgtgcaaacaaaatgacaaatttcaactcacaatctttgtaagaaaattgttccagtttgaatcttgatattaaagtttatgtttacaaaactgccagttagatgaactaagtgtgtaaaacaaatagaaaagacattcgcagacatttcttctatgttattgaatgtgttgtttctggtgtacgtgtcaaaagtttcagttttttagatcagaaataaacgacaaatagtgtgagatgtgttgtgaacaggcatggtgaccgtggtcagcgccactcttgtttcctgaaatgtgcttctaagacagaaaatgtattttctcatcaagggtgtctggagacacagaccgtgaccttggcgcagcggtgtgcatcagaggcgtgtgctgagaagggtggtgttaagctgtggaaaatgactcaagagcaataaatcagtgccaaagcttccctgcgcatctgaatagacacaagtgaagcccgtgtgcgcacagtgcagaggccgagcctgtatttccaggtagacgtggactttattgactgtgaattcatttacatgtaacttctgacatttcactctgtgcaaataaagaacatgaggatacc

SEQ ID NO: 4966 - protein, 185 aa, Homo sapiens; identical to SEQ ID NO: 521

SEQ ID NO: 4967 - DNA, 1013 bp, Homo sapiens
ggtcgccccctccccaacccagcactaaggagcaccctgctctggtctccgccaccacccagcgcctcctggacccatccccccaaacccttgaacgtcctcaggacccccaggctgcagcctcggagctcccggaacgatggtgaagttggggaacaatttcgcagagaagggcaccaagcagccgctgctggaggatggcttcgacaccattcccctgatgacgcccctcgatgtcaatcagctgcagttcccgcccccggataaggtggtcgtgaaaactaagaccgagtatgaacctgaccgcaagaaagggaaagcacgtcctccccaaattgctgagttcaccgtcagcatcacggagggtgtcaccgagaggtttaaggtctccgtgttggtcctcttcgccctggccttcctcacctgcgtcgtcttcctggttgtctacaaggtgtacaagtatgaccgcgcctgccccgatgggttcgtcctcaagaacacccagtgcatcccagaaggcttggagagctactacgcggagcaagactccagtgcccgggagaaattttacacagtcataaaccactacaacctggccaagcagagcatcacgcgctccgtatcgccctggatgtcagttctgtcagaagagaagctgtccgagcaggagactgaagcggctgagaagtcagcttagcgggatgggcaagttccttacaatgtgtcacttgcaaataacaaagggactttgagggacatttcattaaatataattactgatactttagaggttactcatttacggtgcaattgcttctgtttgctaatgctgctttgcaaataaaacttgctgccgaccacccacgggcataaaatcaagtgcatttcagcattgcctaaagagctctgacaccacttttcatgttaagatcttcatttagctcctttactgggatttattggatgctgtaaaaaaataaatttacactggatatgcgaagggtttggatctc

SEQ ID NO: 4968 - protein, 185 aa, Homo sapiens; identical to SEQ ID NO: 521

SEQ ID NO: 4969 - DNA, 1953 bp, Homo sapiens
ggtcgccccctccccaacccagcactaaggagcaccctgctctggtctccgccaccacccagcgcctcctggacccatccccccaaacccttgaacgtcctcaggacccccaggctgcagcctcggagctcccggaacgatggtgaagttggggaacaatttcgcagagaagggcaccaagcagccgctgctggaggatggcttcgacaccattcccctgatgacgcccctcgatgtcaatcagctgcagttcccgcccccggataaggtggtcgtgaaaactaagaccgagtatgaacctgaccgcaagaaagggaaagcacgtcctccccaaattgctgagttcaccgtcagcatcacggagggtgtcaccgagaggtttaaggtctccgtgttggtcctcttcgccctggccttcctcacctgcgtcgtcttcctggttgtctacaaggtgtacaagtatgaccgcgcctgccccgatgggttcgtcctcaagaacacccagtgcatcccagaaggcttggagagctactacgcggagcaagactccagtgcccgggagaaattttacacagtcataaaccactacaacctggccaagcagagcatcacgcgctccgtatcgccctggatgtcagttctgtcagaagagaagctgtccgagcaggagactgaagcggctgagaagtcagcttagcgggatgggcaagttccttacaatgtgtcacttgcaaataacaaagggactttgagggacatttcattaaatataattactgatactttagaggttactcatttacggtgcaattgcttctgtttgctaatgctgctttgcaaataaaacttgctgccgaccacccacgggcataaaatcaagtgcatttcagcattgcctaaagagctctgacaccacttttcatgttaagatcttcatttagctcctttactgggatttattggatgctgtaaaaaaataaatttacactggatatgcgaagggtttggatctcagataaatgcattttgtggaattgattttctgaaccgaccctgctgtctgcaaaccttcctccatagccatatctagagtgatctctcgctgtgctaagagcaagcctacttcgcatttcttcctcggccatcagcgggtaacagtgctgactgctgccaaggtgcactgtagtaagtaagtggcatagagaacgaggaaaaagacccccccacccctccctgtgctgactcctgagtcggggtgggacggccctgcaatgtggcaggctcggtgtggattgactactccctcccctctgactctggcatcttggtaaggagggaggggcaccacccatctgggtggagacagctggggtttgctccagtgtgtgtagactggcagagcatgtgagggagagggctgggaagagacggccctgggcccgtgaggtgcagaactctccctgcaggtagtctgtctgctctgtgatgtgctgataggaaagagcccccactggccctctggttcacttctattatgaataaatttgcaccaatagccccattagtttttaaagaaatgagctgggtgggaaaagtggaaatgtaatttctggtaagcttgagctactttaatttttattctatgaaactgatatcccttgatgtgggaaacaggcaggaaaggctgtggggtgggggtgggggactggtgtggcaccgtgcaaacaaaatgacaaatttcaactcacaatctttgtaagaaaattgttccagtttgaatcttgatattaaagtttatgtttacaaaactgccagttagatgaactaagtgtgtaaaacaaatagaaaagacattcgcagacatttcttctatgttattgaatgtgttgtttctggtgtacgtgtcaaaagtttcagttttttagatcagaaataaacgacaaatagtgtgag

SEQ ID NO: 4970 - protein, 185 aa, Homo sapiens; identical to SEQ ID NO: 521

SEQ ID NO: 4971 - DNA, 2322 bp, Homo sapiens
ggtcgccccctccccaacccagcactaaggagcaccctgctctggtctccgccaccacccagcgcctcctggacccatccccccaaacccttgaacgtcctcaggacccccaggctgcagcctcggagctcccggaacgatggtgaagttggggaacaatttcgcagagaagggcaccaagcagccgctgctggaggatggcttcgacaccattcccctgatgacgcccctcgatgtcaatcagctgcagttcccgcccccggataaggtggtcgtgaaaactaagaccgagtatgaacctgaccgcaagaaagggaaagcacgtcctccccaaattgctgagttcaccgtcagcatcacggagggtgtcaccgagaggtttaaggtctccgtgttggtcctcttcgccctggccttcctcacctgcgtcgtcttcctggttgtctacaaggtgtacaagtatgaccgcgcctgccccgatgggttcgtcctcaagaacacccagtgcatcccagaaggcttggagagctactacgcggagcaagactccagtgcccgggagaaattttacacagtcataaaccactacaacctggccaagcagagcatcacgcgctccgtatcgccctggatgtcagttctgtcagaagagaagctgtccgagcaggagactgaagcggctgagaagtcagcttagcgggatgggcaagttccttacaatgtgtcacttgcaaataacaaagggactttgagggacatttcattaaatataattactgatactttagaggttactcatttacggtgcaattgcttctgtttgctaatgctgctttgcaaataaaacttgctgccgaccacccacgggcataaaatcaagtgcatttcagcattgcctaaagagctctgacaccacttttcatgttaagatcttcatttagctcctttactgggatttattggatgctgtaaaaaaataaatttacactggatatgcgaagggtttggatctcagataaatgcattttgtggaattgattttctgaaccgaccctgctgtctgcaaaccttcctccatagccatatctagagtgatctctcgctgtgctaagagcaagcctacttcgcatttcttcctcggccatcagcgggtaacagtgctgactgctgccaaggtgcactgtagtaagtaagtggcatagagaacgaggaaaaagacccccccacccctccctgtgctgactcctgagtcggggtgggacggccctgcaatgtggcaggctcggtgtggattgactactccctcccctctgactctggcatcttggtaaggagggaggggcaccacccatctgggtggagacagctggggtttgctccagtgtgtgtagactggcagagcatgtgagggagagggctgggaagagacggccctgggcccgtgaggtgcagaactctccctgcaggtagtctgtctgctctgtgatgtgctgataggaaagagcccccactggccctctggttcacttctattatgaataaatttgcaccaatagccccattagtttttaaagaaatgagctgggtgggaaaagtggaaatgtaatttctggtaagcttgagctactttaatttttattctatgaaactgatatcccttgatgtgggaaacaggcaggaaaggctgtggggtgggggtgggggactggtgtggcaccgtgcaaacaaaatgacaaatttcaactcacaatctttgtaagaaaattgttccagtttgaatcttgatattaaagtttatgtttacaaaactgccagttagatgaactaagtgtgtaaaacaaatagaaaagacattcgcagacatttcttctatgttattgaatgtgttgtttctggtgtacgtgtcaaaagtttcagttttttagatcagaaataaacgacaaatagtgtgagatgtgttgtgaacaggcatggtgaccgtggtcagcgccactcttgtttcctgaaatgtgcttctaagacagaaaatgtattttctcatcaagggtgtctggagacacagaccgtgaccttggcgcagcggtgtgcatcagaggcgtgtgctgagaagggtggtgttaagctgtggaaaatgactcaagagcaataaatcagtgccaaagcttccctgcgcatctgaatagacacaagtgaagcccgtgtgcgcacagtgcagaggccgagcctgtatttccaggtagacgtggactttattgactgtgaattcatttacatgtaacttctgacatttcactctgtgcaaataaagaacatgaggatacc

SEQ ID NO: 4972 - protein, 185 aa, Homo sapiens; identical to SEQ ID NO: 521

SEQ ID NO: 4973 - DNA, 1062 bp, Homo sapiens
cccctccccaacccagcactaaggagcaccctgctctggtctccgccaccacccagcgcctcctggacccatccccccaaacccttgaacgtcctcaggacccccaggagcaggagacgcggagctcggagcgctcagctgacctgccggagccgggcgtgggctgcagcctcggagctcccggaacgatggtgaagttggggaacaatttcgcagagaagggcaccaagcagccgctgctggaggatggcttcgacaccattcccctgatgacgcccctcgatgtcaatcagctgcagttcccgcccccggataaggtggtcgtgaaaactaagaccgagtatgaacctgaccgcaagaaagggaaagcacgtcctccccaaattgctgagttcaccgtcagcatcacggagggtgtcaccgagaggtttaaggtctccgtgttggtcctcttcgccctggccttcctcacctgcgtcgtcttcctggttgtctacaaggtgtacaagtatgaccgcgcctgccccgatgggttcgtcctcaagaacacccagtgcatcccagaaggcttggagagctactacgcggagcaagactccagtgcccgggagaaattttacacagtcataaaccactacaacctggccaagcagagcatcacgcgctccgtatcgccctggatgtcagttctgtcagaagagaagctgtccgagcaggagactgaagcggctgagaagtcagcttagcgggatgggcaagttccttacaatgtgtcacttgcaaataacaaagggactttgagggacatttcattaaatataattactgatactttagaggttactcatttacggtgcaattgcttctgtttgctaatgctgctttgcaaataaaacttgctgccgaccacccacgggcataaaatcaagtgcatttcagcattgcctaaagagctctgacaccacttttcatgttaagatcttcatttagctcctttactgggatttattggatgctgtaaaaaaataaatttacactggatatgcgaagggtttggatctc

SEQ ID NO: 4974 - protein, 185 aa, Homo sapiens; identical to SEQ ID NO: 521

SEQ ID NO: 4975 - DNA, 2002 bp, Homo sapiens
cccctccccaacccagcactaaggagcaccctgctctggtctccgccaccacccagcgcctcctggacccatccccccaaacccttgaacgtcctcaggacccccaggagcaggagacgcggagctcggagcgctcagctgacctgccggagccgggcgtgggctgcagcctcggagctcccggaacgatggtgaagttggggaacaatttcgcagagaagggcaccaagcagccgctgctggaggatggcttcgacaccattcccctgatgacgcccctcgatgtcaatcagctgcagttcccgcccccggataaggtggtcgtgaaaactaagaccgagtatgaacctgaccgcaagaaagggaaagcacgtcctccccaaattgctgagttcaccgtcagcatcacggagggtgtcaccgagaggtttaaggtctccgtgttggtcctcttcgccctggccttcctcacctgcgtcgtcttcctggttgtctacaaggtgtacaagtatgaccgcgcctgccccgatgggttcgtcctcaagaacacccagtgcatcccagaaggcttggagagctactacgcggagcaagactccagtgcccgggagaaattttacacagtcataaaccactacaacctggccaagcagagcatcacgcgctccgtatcgccctggatgtcagttctgtcagaagagaagctgtccgagcaggagactgaagcggctgagaagtcagcttagcgggatgggcaagttccttacaatgtgtcacttgcaaataacaaagggactttgagggacatttcattaaatataattactgatactttagaggttactcatttacggtgcaattgcttctgtttgctaatgctgctttgcaaataaaacttgctgccgaccacccacgggcataaaatcaagtgcatttcagcattgcctaaagagctctgacaccacttttcatgttaagatcttcatttagctcctttactgggatttattggatgctgtaaaaaaataaatttacactggatatgcgaagggtttggatctcagataaatgcattttgtggaattgattttctgaaccgaccctgctgtctgcaaaccttcctccatagccatatctagagtgatctctcgctgtgctaagagcaagcctacttcgcatttcttcctcggccatcagcgggtaacagtgctgactgctgccaaggtgcactgtagtaagtaagtggcatagagaacgaggaaaaagacccccccacccctccctgtgctgactcctgagtcggggtgggacggccctgcaatgtggcaggctcggtgtggattgactactccctcccctctgactctggcatcttggtaaggagggaggggcaccacccatctgggtggagacagctggggtttgctccagtgtgtgtagactggcagagcatgtgagggagagggctgggaagagacggccctgggcccgtgaggtgcagaactctccctgcaggtagtctgtctgctctgtgatgtgctgataggaaagagcccccactggccctctggttcacttctattatgaataaatttgcaccaatagccccattagtttttaaagaaatgagctgggtgggaaaagtggaaatgtaatttctggtaagcttgagctactttaatttttattctatgaaactgatatcccttgatgtgggaaacaggcaggaaaggctgtggggtgggggtgggggactggtgtggcaccgtgcaaacaaaatgacaaatttcaactcacaatctttgtaagaaaattgttccagtttgaatcttgatattaaagtttatgtttacaaaactgccagttagatgaactaagtgtgtaaaacaaatagaaaagacattcgcagacatttcttctatgttattgaatgtgttgtttctggtgtacgtgtcaaaagtttcagttttttagatcagaaataaacgacaaatagtgtgag

SEQ ID NO: 4976 - protein, 185 aa, Homo sapiens; identical to SEQ ID NO: 521

SEQ ID NO: 4977 - DNA, 2371 bp, Homo sapiens
cccctccccaacccagcactaaggagcaccctgctctggtctccgccaccacccagcgcctcctggacccatccccccaaacccttgaacgtcctcaggacccccaggagcaggagacgcggagctcggagcgctcagctgacctgccggagccgggcgtgggctgcagcctcggagctcccggaacgatggtgaagttggggaacaatttcgcagagaagggcaccaagcagccgctgctggaggatggcttcgacaccattcccctgatgacgcccctcgatgtcaatcagctgcagttcccgcccccggataaggtggtcgtgaaaactaagaccgagtatgaacctgaccgcaagaaagggaaagcacgtcctccccaaattgctgagttcaccgtcagcatcacggagggtgtcaccgagaggtttaaggtctccgtgttggtcctcttcgccctggccttcctcacctgcgtcgtcttcctggttgtctacaaggtgtacaagtatgaccgcgcctgccccgatgggttcgtcctcaagaacacccagtgcatcccagaaggcttggagagctactacgcggagcaagactccagtgcccgggagaaattttacacagtcataaaccactacaacctggccaagcagagcatcacgcgctccgtatcgccctggatgtcagttctgtcagaagagaagctgtccgagcaggagactgaagcggctgagaagtcagcttagcgggatgggcaagttccttacaatgtgtcacttgcaaataacaaagggactttgagggacatttcattaaatataattactgatactttagaggttactcatttacggtgcaattgcttctgtttgctaatgctgctttgcaaataaaacttgctgccgaccacccacgggcataaaatcaagtgcatttcagcattgcctaaagagctctgacaccacttttcatgttaagatcttcatttagctcctttactgggatttattggatgctgtaaaaaaataaatttacactggatatgcgaagggtttggatctcagataaatgcattttgtggaattgattttctgaaccgaccctgctgtctgcaaaccttcctccatagccatatctagagtgatctctcgctgtgctaagagcaagcctacttcgcatttcttcctcggccatcagcgggtaacagtgctgactgctgccaaggtgcactgtagtaagtaagtggcatagagaacgaggaaaaagacccccccacccctccctgtgctgactcctgagtcggggtgggacggccctgcaatgtggcaggctcggtgtggattgactactccctcccctctgactctggcatcttggtaaggagggaggggcaccacccatctgggtggagacagctggggtttgctccagtgtgtgtagactggcagagcatgtgagggagagggctgggaagagacggccctgggcccgtgaggtgcagaactctccctgcaggtagtctgtctgctctgtgatgtgctgataggaaagagcccccactggccctctggttcacttctattatgaataaatttgcaccaatagccccattagtttttaaagaaatgagctgggtgggaaaagtggaaatgtaatttctggtaagcttgagctactttaatttttattctatgaaactgatatcccttgatgtgggaaacaggcaggaaaggctgtggggtgggggtgggggactggtgtggcaccgtgcaaacaaaatgacaaatttcaactcacaatctttgtaagaaaattgttccagtttgaatcttgatattaaagtttatgtttacaaaactgccagttagatgaactaagtgtgtaaaacaaatagaaaagacattcgcagacatttcttctatgttattgaatgtgttgtttctggtgtacgtgtcaaaagtttcagttttttagatcagaaataaacgacaaatagtgtgagatgtgttgtgaacaggcatggtgaccgtggtcagcgccactcttgtttcctgaaatgtgcttctaagacagaaaatgtattttctcatcaagggtgtctggagacacagaccgtgaccttggcgcagcggtgtgcatcagaggcgtgtgctgagaagggtggtgttaagctgtggaaaatgactcaagagcaataaatcagtgccaaagcttccctgcgcatctgaatagacacaagtgaagcccgtgtgcgcacagtgcagaggccgagcctgtatttccaggtagacgtggactttattgactgtgaattcatttacatgtaacttctgacatttcactctgtgcaaataaagaacatgaggatacc

SEQ ID NO: 4978 - protein, 185 aa, Homo sapiens; identical to SEQ ID NO: 521

SEQ ID NO: 4979 - DNA, 1635 bp, Homo sapiens
gccgccgcccggggtggcgcagcccgcagccctcccgctccgggcgccctccgccgctccgagaccccctgggggcgcgtcctctcccgctcccctgttccctcccccggctcagggcgggcgcgtggtcccaggggaggctcccgcccagccccgcactcctttgtgcggccgggcgggcgctgcgtcaaggtggaggcgcggccacacgcgcgcacccacccgcgcgcacccagcccccgggagaggcaggaagggaggcggcggcgcgaggaggagggagcggccgtggagcccaatcgttcgctccccttcccgggtccgcgcgcggcgccgcctccgccattgctgcgagcaggagcaggagacgcggagctcggagcgctcagctgacctgccggagccgggcgtgggctgcagcctcggagctcccggaacgatggtgaagttggggaacaatttcgcagagaagggcaccaagcagccgctgctggaggatggcttcgacaccattcccctgatgacgcccctcgatgtcaatcagctgcagttcccgcccccggataaggtggtcgtgaaaactaagaccgagtatgaacctgaccgcaagaaagggaaagcacgtcctccccaaattgctgagttcaccgtcagcatcacggagggtgtcaccgagaggtttaaggtctccgtgttggtcctcttcgccctggccttcctcacctgcgtcgtcttcctggttgtctacaaggtgtacaagtatgaccgcgcctgccccgatgggttcgtcctcaagaacacccagtgcatcccagaaggcttggagagctactacgcggagcaagactccagtgcccgggagaaattttacacagtcataaaccactacaacctggccaagcagagcatcacgcgctccgtatcgccctggatgtcagttctgtcagaagagaagctgtccgagcaggagactgaagcggctgagaagtcagcttagcgggatgggcaagttccttacaatgtgtcacttgcaaataacaaaatgacaaatttcaactcacaatctttgtaagaaaattgttccagtttgaatcttgatattaaagtttatgtttacaaaactgccagttagatgaactaagtgtgtaaaacaaatagaaaagacattcgcagacatttcttctatgttattgaatgtgttgtttctggtgtacgtgtcaaaagtttcagttttttagatcagaaataaacgacaaatagtgtgagatgtgttgtgaacaggcatggtgaccgtggtcagcgccactcttgtttcctgaaatgtgcttctaagacagaaaatgtattttctcatcaagggtgtctggagacacagaccgtgaccttggcgcagcggtgtgcatcagaggcgtgtgctgagaagggtggtgttaagctgtggaaaatgactcaagagcaataaatcagtgccaaagcttccctgcgcatctgaatagacacaagtgaagcccgtgtgcgcacagtgcagaggccgagcctgtatttccaggtagacgtggactttattgactgtgaattcatttacatgtaacttctgacatttcactctgtgcaaataaagaacatgaggatacc

SEQ ID NO: 4980 - protein, 185 aa, Homo sapiens; identical to SEQ ID NO: 521

SEQ ID NO: 4981 - DNA, 1049 bp, Homo sapiens
cggcgcgaggaggagggagcggccgtggagcccaatcgttcgctccccttcccgggtccgcgcgcggcgccgcctccgccattgctgcgagcaggagcaggagacgcggagctcggagcgctcagctgacctgccggagccgggcgtgggctgcagcctcggagctcccggaacgatggtgaagttggggaacaatttcgcagagaagggcaccaagcagccgctgctggaggatggcttcgacaccattcccctgatgacgcccctcgatgtcaatcagctgcagttcccgcccccggataaggtggtcgtgaaaactaagaccgagtatgaacctgaccgcaagaaagggaaagcacgtcctccccaaattgctgagttcaccgtcagcatcacggagggtgtcaccgagaggtttaaggtctccgtgttggtcctcttcgccctggccttcctcacctgcgtcgtcttcctggttgtctacaaggtgtacaagtatgaccgcgcctgccccgatgggttcgtcctcaagaacacccagtgcatcccagaaggcttggagagctactacgcggagcaagactccagtgcccgggagaaattttacacagtcataaaccactacaacctggccaagcagagcatcacgcgctccgtatcgccctggatgtcagttctgtcagaagagaagctgtccgagcaggagactgaagcggctgagaagtcagcttagcgggatgggcaagttccttacaatgtgtcacttgcaaataacaaagggactttgagggacatttcattaaatataattactgatactttagaggttactcatttacggtgcaattgcttctgtttgctaatgctgctttgcaaataaaacttgctgccgaccacccacgggcataaaatcaagtgcatttcagcattgcctaaagagctctgacaccacttttcatgttaagatcttcatttagctcctttactgggatttattggatgctgtaaaaaaataaatttacactggatatgcgaagggtttggatctc

SEQ ID NO: 4982 - protein, 185 aa, Homo sapiens; identical to SEQ ID NO: 521

SEQ ID NO: 4983 - DNA, 3121 bp, Homo sapiens
gttagattaccaagtgctaatagttaatatgtaatctgttctttttatgaaggcaaatcgaagggagagtggttgagatttccagactccaagagatattcacggaaaaggttttgcaacaggaagctgagattgacagcattcaccagttagttgtgggggcaactgaaaatatcaaggaaggcaacgaagacataagagaggccattaaaaacaacgctggcttccgcgtgtggatcctcttcttcctcgtgatgtgctccttctccttgctcttcctcgactggtacgacagctagccagggccacgggggcccagcacgagagtcctcatgggcactcacagactgcgtgctttcatgtacttccagtgctggagcatggtatgaccagattttatcacagtgccatttgaagggaaaggagttcagacagacagacgtattccccaaaaagggataccccaggccgatggtgttcagccatttagcagctgaaaaaggaaacagtgcacaccaatgggaggcagcctgcgtagccctcatcaggcaagacagactgaatgcaggagtgggtgattagctgctccttgaacttgaggctgccttggcagcaggggcacagcaggcctcaagagcccctaattgtctcagggttcaaaggaagacactgacctttcccatcccggtagcttcagggaagatcatagttaataacgtctctcaacaaatgattacttctttgtttccttgtggcttcttgtctgtctgagtcaacgaatacacagacttactggattatagaagagaaaattcacatctgccttgttaatctaataaatataattacagccccttaatgtgttgtcaatgagtctaagttgacaaattcagtggcagcccagccacctcctatcaatcaatcagggaagaaatgcaggggagactggggccctcagtgaggggctgcctggcattactcctccaaagactgctgcccccagaacaggcagggggtgtgggagggccagtttcccgccactgggtccaaggagcctttgttcaaaggaagaagtgggccacggaagaacgggcctgcttctctcgtgcctgtgcttctgacctccaggaactgtaaacaggaacacctatgtgtaactgaaggcatgagacatctgtacaggaagcatcccagcgcccacatgggcatgagacagtctgcactgcgcctggtgaaatgcgtgtgtgtacagacagtccactgggcagcacaggtatcctcatgttctttatttgcacagagtgaaatgtcagaagttacatgtaaatgaattcacagtcaataaagtccacgtctacctggaaatacaggctcggcctctgcactgtgcgcacacgggcttcacttgtgtctattcagatgcgcagggaagctttggcactgatttattgctcttgagtcattttccacagcttaacaccacccttctcagcacacgcctctgatgcacaccgctgcgccaaggtcacggtctgtgtctccagacacccttgatgagaaaatacattttctgtcttagaagcacatttcaggaaacaagagtggcgctgaccacggtcaccatgcctgttcacaacacatctcacactatttgtcgtttatttctgatctaaaaaactgaaacttttgacacgtacaccagaaacaacacattcaataacatagaagaaatgtctgcgaatgtcttttctatttgttttacacacttagttcatctaactggcagttttgtaaacataaactttaatatcaagattcaaactggaacaattttcttacaaagattgtgagttgaaatttgtcattttgtttgcacggtgccacaccagtcccccacccccaccccacagcctttcctgcctgtttcccacatcaagggatatcagtttcatagaataaaaattaaagtagctcaagcttaccagaaattacatttccacttttcccacccagctcatttctttaaaaactaatggggctattggtgcaaatttattcataatagaagtgaaccagagggccagtgggggctctttcctatcagcacatcacagagcagacagactacctgcagggagagttctgcacctcacgggcccagggccgtctcttcccagccctctccctcacatgctctgccagtctacacacactggagcaaaccccagctgtctccacccagatgggtggtgcccctccctccttaccaagatgccagagtcagaggggagggagtagtcaatccacaccgagcctgccacattgcagggccgtcccaccccgactcaggagtcagcacagggaggggtgggggggtctttttcctcgttctctatgccacttacttactacagtgcaccttggcagcagtcagcactgttacccgctgatggccgaggaagaaatgcgaagtaggcttgctcttagcacagcgagagatcactctagatatggctatggaggaaggtttgcagacagcagggtcggttcagaaaatcaattccacaaaatgcatttatctgagatccaaacccttcgcatatccagtgtaaatttatttttttacagcatccaataaatcccagtaaaggagctaaatgaagatcttaacatgaaaagtggtgtcagagctctttaggcaatgctgaaatgcacttgattttatgcccgtgggtggtcggcagcaagttttatttgcaaagcagcattagcaaacagaagcaattgcaccgtaaatgagtaacctctaaagtatcagtaattatatttaatgaaatgtccctcaaagtccctttgttatttgcaagtgacacattgtaaggaacttgcccatcccgctaagctgacttctcagccgcttcagtctcctgctcggacagcttctcttctgacagaactgacatccagggcgatacggagcgcgtgatgctctgcttggccaggttgtagtggtttatgactgtgtaaaatttctcccgggcactggagtcttgctccgcgtagtagctctccaagccttctgggatgcactgggtgttctgaaagacaagaggccactgag

SEQ ID NO: 4984 - protein, 131 aa, Homo sapiens
MGGAPPSLPRCQSQRGGSSQSTPSLPHCRAVPPRLRSQHREGWGGLFPRSLCHLLTTVHLGSSQHCYPLMAEEEMRSRLALSTARDHSRYGYGGRFADSRVGSENQFHKMHLSEIQTLRISSVNLFFYSIQ

SEQ ID NO: 4985 - DNA, 3904 bp, Homo sapiens
ccaccttcacgtagaagataggatttctttagaagtgtgtaacagtcctgttagattaccaagtgctaatagttaatatgtaatctgttctttttatgaaggcaaatcgaagggagagtggttgagatttccagactccaagagatattcacggaaaaggttttgcaacaggaagctgagattgacagcattcaccagttagttgtgggggcaactgaaaatatcaaggaaggcaacgaagacataagagaggtaggcactgtttaggttccccaggtgcgacgtggcgcagcactgagtcccagcagcgggtgttagtctcgccggcacagctgcccaggagccttgctgggcagagctcacggggctgatcacaaaattgtgtgaccgcggagctgcgtgtgttcatgagacccaccacctgtcgcccacctccagctgctttcgagaggcagtggctcaccagcctccaaaggagcaatccagggtgggtgggggtactcctggcagggtcaggccagctcttcatgtccagggatgtacatgggtagctcgttggcccccaccgaggggtcagagcctggcccctgcttacagaggacactacagccatcctgttgaggggactgtttcccaagctcagtcctcagggttgggtcaccacggacatcatgttactgggaaacacaaagcttgcggtcacactctgctcggggcccttaaccctgggacagaagggagtgattccgagagttgtgttgagggagaattgtgcaggacccaaatgatggccaaacagagggaaatataacccatttgtcttctggtggatctcaaaagccatctattcaaggtaagcacagatggaacgacacccatagttacagccaggatcaggagagcacgtgggaagaggggggcatttcagggctgctcaaaccaaaatcctgtgtgataaaaacacctgtgctcccgtccctgcccaggccattaaaaacaacgctggcttccgcgtgtggatcctcttcttcctcgtgatgtgctccttctccttgctcttcctcgactggtacgacagctagccagggccacgggggcccagcacgagagtcctcatgggcactcacagactgcgtgctttcatgtacttccagtgctggagcatggtatgaccagattttatcacagtgccatttgaagggaaaggagttcagacagacagacgtattccccaaaaagggataccccaggccgatggtgttcagccatttagcagctgaaaaaggaaacagtgcacaccaatgggaggcagcctgcgtagccctcatcaggcaagacagactgaatgcaggagtgggtgattagctgctccttgaacttgaggctgccttggcagcaggggcacagcaggcctcaagagcccctaattgtctcagggttcaaaggaagacactgacctttcccatcccggtagcttcagggaagatcatagttaataacgtctctcaacaaatgattacttctttgtttccttgtggcttcttgtctgtctgagtcaacgaatacacagacttactggattatagaagagaaaattcacatctgccttgttaatctaataaatataattacagccccttaatgtgttgtcaatgagtctaagttgacaaattcagtggcagcccagccacctcctatcaatcaatcagggaagaaatgcaggggagactggggccctcagtgaggggctgcctggcattactcctccaaagactgctgcccccagaacaggcagggggtgtgggagggccagtttcccgccactgggtccaaggagcctttgttcaaaggaagaagtgggccacggaagaacgggcctgcttctctcgtgcctgtgcttctgacctccaggaactgtaaacaggaacacctatgtgtaactgaaggcatgagacatctgtacaggaagcatcccagcgcccacatgggcatgagacagtctgcactgcgcctggtgaaatgcgtgtgtgtacagacagtccactgggcagcacaggtatcctcatgttctttatttgcacagagtgaaatgtcagaagttacatgtaaatgaattcacagtcaataaagtccacgtctacctggaaatacaggctcggcctctgcactgtgcgcacacgggcttcacttgtgtctattcagatgcgcagggaagctttggcactgatttattgctcttgagtcattttccacagcttaacaccacccttctcagcacacgcctctgatgcacaccgctgcgccaaggtcacggtctgtgtctccagacacccttgatgagaaaatacattttctgtcttagaagcacatttcaggaaacaagagtggcgctgaccacggtcaccatgcctgttcacaacacatctcacactatttgtcgtttatttctgatctaaaaaactgaaacttttgacacgtacaccagaaacaacacattcaataacatagaagaaatgtctgcgaatgtcttttctatttgttttacacacttagttcatctaactggcagttttgtaaacataaactttaatatcaagattcaaactggaacaattttcttacaaagattgtgagttgaaatttgtcattttgtttgcacggtgccacaccagtcccccacccccaccccacagcctttcctgcctgtttcccacatcaagggatatcagtttcatagaataaaaattaaagtagctcaagcttaccagaaattacatttccacttttcccacccagctcatttctttaaaaactaatggggctattggtgcaaatttattcataatagaagtgaaccagagggccagtgggggctctttcctatcagcacatcacagagcagacagactacctgcagggagagttctgcacctcacgggcccagggccgtctcttcccagccctctccctcacatgctctgccagtctacacacactggagcaaaccccagctgtctccacccagatgggtggtgcccctccctccttaccaagatgccagagtcagaggggagggagtagtcaatccacaccgagcctgccacattgcagggccgtcccaccccgactcaggagtcagcacagggaggggtgggggggtctttttcctcgttctctatgccacttacttactacagtgcaccttggcagcagtcagcactgttacccgctgatggccgaggaagaaatgcgaagtaggcttgctcttagcacagcgagagatcactctagatatggctatggaggaaggtttgcagacagcagggtcggttcagaaaatcaattccacaaaatgcatttatctgagatccaaacccttcgcatatccagtgtaaatttatttttttacagcatccaataaatcccagtaaaggagctaaatgaagatcttaacatgaaaagtggtgtcagagctctttaggcaatgctgaaatgcacttgattttatgcccgtgggtggtcggcagcaagttttatttgcaaagcagcattagcaaacagaagcaattgcaccgtaaatgagtaacctctaaagtatcagtaattatatttaatgaaatgtccctcaaagtccctttgttatttgcaagtgacacattgtaaggaacttgcccatcccgctaagctgacttctcagccgcttcagtctcctgctcggacagcttctcttctgacagaactgacatccagggcgatacggagcgcgtgatgctctgcttggccaggttgtagtggtttatgactgtgtaaaatttctcccgggcactggagtcttgctccgcgtagtagctctccaagccttctgggatgcactgggtgttctgaaagacaagaggccactgag

SEQ ID NO: 4986 - protein, 131 aa, Homo sapiens; identical to SEQ ID NO: 4984

SEQ ID NO: 4987 - DNA, 3571 bp, Homo sapiens
gaggaacagagcggaacctctgctgtctctaagtagccataccatgtctgaatatgggaggatgacagacacagaacgagaccagatagaccaggatgcccagatattcatgaggacctgttcagaagcaattcagcaactacgaacagaagctcacaaggagatacattcccagcaagtgaaggagcacaggaccgctgttttggatttcattgaagattacttgaaaagagtatgtaaactttactcagaacagagagccatccgagttaaaagagtggtggataagaaaagattatctaagctggaaccagaaccaaatacaaagacaagagaatccacatcttctgagaaagtttcacagagtccttcaaaagactctgaagaaaaccctgccactgaagaacgtccagaaaaaattttggctgaaacacaacctgaattgggaacgtggggagatggcaaaggcgaagatgagttatccccagaagaaatacaaatggcaaatcgaagggagagtggttgagatttccagactccaagagatattcacggaaaaggttttgcaacaggaagctgagattgacagcattcaccagttagttgtgggggcaactgaaaatatcaaggaaggcaacgaagacataagagaggccattaaaaacaacgctggcttccgcgtgtggatcctcttcttcctcgtgatgtgctccttctccttgctcttcctcgactggtacgacagctagccagggccacgggggcccagcacgagagtcctcatgggcactcacagactgcgtgctttcatgtacttccagtgctggagcatggtatgaccagattttatcacagtgccatttgaagggaaaggagttcagacagacagacgtattccccaaaaagggataccccaggccgatggtgttcagccatttagcagctgaaaaaggaaacagtgcacaccaatgggaggcagcctgcgtagccctcatcaggcaagacagactgaatgcaggagtgggtgattagctgctccttgaacttgaggctgccttggcagcaggggcacagcaggcctcaagagcccctaattgtctcagggttcaaaggaagacactgacctttcccatcccggtagcttcagggaagatcatagttaataacgtctctcaacaaatgattacttctttgtttccttgtggcttcttgtctgtctgagtcaacgaatacacagacttactggattatagaagagaaaattcacatctgccttgttaatctaataaatataattacagccccttaatgtgttgtcaatgagtctaagttgacaaattcagtggcagcccagccacctcctatcaatcaatcagggaagaaatgcaggggagactggggccctcagtgaggggctgcctggcattactcctccaaagactgctgcccccagaacaggcagggggtgtgggagggccagtttcccgccactgggtccaaggagcctttgttcaaaggaagaagtgggccacggaagaacgggcctgcttctctcgtgcctgtgcttctgacctccaggaactgtaaacaggaacacctatgtgtaactgaaggcatgagacatctgtacaggaagcatcccagcgcccacatgggcatgagacagtctgcactgcgcctggtgaaatgcgtgtgtgtacagacagtccactgggcagcacaggtatcctcatgttctttatttgcacagagtgaaatgtcagaagttacatgtaaatgaattcacagtcaataaagtccacgtctacctggaaatacaggctcggcctctgcactgtgcgcacacgggcttcacttgtgtctattcagatgcgcagggaagctttggcactgatttattgctcttgagtcattttccacagcttaacaccacccttctcagcacacgcctctgatgcacaccgctgcgccaaggtcacggtctgtgtctccagacacccttgatgagaaaatacattttctgtcttagaagcacatttcaggaaacaagagtggcgctgaccacggtcaccatgcctgttcacaacacatctcacactatttgtcgtttatttctgatctaaaaaactgaaacttttgacacgtacaccagaaacaacacattcaataacatagaagaaatgtctgcgaatgtcttttctatttgttttacacacttagttcatctaactggcagttttgtaaacataaactttaatatcaagattcaaactggaacaattttcttacaaagattgtgagttgaaatttgtcattttgtttgcacggtgccacaccagtcccccacccccaccccacagcctttcctgcctgtttcccacatcaagggatatcagtttcatagaataaaaattaaagtagctcaagcttaccagaaattacatttccacttttcccacccagctcatttctttaaaaactaatggggctattggtgcaaatttattcataatagaagtgaaccagagggccagtgggggctctttcctatcagcacatcacagagcagacagactacctgcagggagagttctgcacctcacgggcccagggccgtctcttcccagccctctccctcacatgctctgccagtctacacacactggagcaaaccccagctgtctccacccagatgggtggtgcccctccctccttaccaagatgccagagtcagaggggagggagtagtcaatccacaccgagcctgccacattgcagggccgtcccaccccgactcaggagtcagcacagggaggggtgggggggtctttttcctcgttctctatgccacttacttactacagtgcaccttggcagcagtcagcactgttacccgctgatggccgaggaagaaatgcgaagtaggcttgctcttagcacagcgagagatcactctagatatggctatggaggaaggtttgcagacagcagggtcggttcagaaaatcaattccacaaaatgcatttatctgagatccaaacccttcgcatatccagtgtaaatttatttttttacagcatccaataaatcccagtaaaggagctaaatgaagatcttaacatgaaaagtggtgtcagagctctttaggcaatgctgaaatgcacttgattttatgcccgtgggtggtcggcagcaagttttatttgcaaagcagcattagcaaacagaagcaattgcaccgtaaatgagtaacctctaaagtatcagtaattatatttaatgaaatgtccctcaaagtccctttgttatttgcaagtgacacattgtaaggaacttgcccatcccgctaagctgacttctcagccgcttcagtctcctgctcggacagcttctcttctgacagaactgacatccagggcgatacggagcgcgtgatgctctgcttggccaggttgtagtggtttatgactgtgtaaaatttctcccgggcactggagtcttgctccgcgtagtagctctccaagccttctgggatgcactgggtgttctgaaagacaagaggccactgag

SEQ ID NO: 4988 - protein, 160 aa, Homo sapiens
MSEYGRMTDTERDQIDQDAQIFMRTCSEAIQQLRTEAHKEIHSQQVKEHRTAVLDFIEDYLKRVCKLYSEQRAIRVKRVVDKKRLSKLEPEPNTKTRESTSSEKVSQSPSKDSEENPATEERPEKILAETQPELGTWGDGKGEDELSPEEIQMANRRESG

SEQ ID NO: 4989 - DNA, 3929 bp, Homo sapiens
gtgtggggcaggaccagtccttcagcggccgggttcgcgccgcggtcgccggctgcttacgtgggcgggcctagtgtggggctgagggtgcgggtcgctatggcggtggacatcacgctgctattccgggccagcgtcaagaccgtgaagacgcggaacaaggcgctgggagtggcggtgggcggcggggtcgatggcagccgggacgagctgttccgccggagcccccggcccaagggcgacttctccagccgggcccgcgaagtgatttctcacattggcaaactgagagattttcttctggaacacaggaaagattatattaatgcttatagccataccatgtctgaatatgggaggatgacagacacagaacgagaccagatagaccaggatgcccagatattcatgaggacctgttcagaagcaattcagcaactacgaacagaagctcacaaggagatacattcccagcaagtgaaggagcacaggaccgctgttttggatttcattgaagattacttgaaaagagtatgtaaactttactcagaacagagagccatccgagttaaaagagtggtggataagaaaagattatctaagctggaaccagaaccaaatacaaagacaagagaatccacatcttctgagaaagtttcacagagtccttcaaaagactctgaagaaaaccctgccactgaagaacgtccagaaaaaattttggctgaaacacaacctgaattgggaacgtggggagatggcaaaggcgaagatgagttatccccagaagaaatacaaatgtttgaacaggaaaatcagcgactaattggtgaaatgaacagcttgtttgatgaagtgaggcaaatcgaagggagagtggttgagatttccagactccaagagatattcacggaaaaggttttgcaacaggaagctgagattgacagcattcaccagttagttgtgggggcaactgaaaatatcaaggaaggcaacgaagacataagagaggccattaaaaacaacgctggcttccgcgtgtggatcctcttcttcctcgtgatgtgctccttctccttgctcttcctcgactggtacgacagctagccagggccacgggggcccagcacgagagtcctcatgggcactcacagactgcgtgctttcatgtacttccagtgctggagcatggtatgaccagattttatcacagtgccatttgaagggaaaggagttcagacagacagacgtattccccaaaaagggataccccaggccgatggtgttcagccatttagcagctgaaaaaggaaacagtgcacaccaatgggaggcagcctgcgtagccctcatcaggcaagacagactgaatgcaggagtgggtgattagctgctccttgaacttgaggctgccttggcagcaggggcacagcaggcctcaagagcccctaattgtctcagggttcaaaggaagacactgacctttcccatcccggtagcttcagggaagatcatagttaataacgtctctcaacaaatgattacttctttgtttccttgtggcttcttgtctgtctgagtcaacgaatacacagacttactggattatagaagagaaaattcacatctgccttgttaatctaataaatataattacagccccttaatgtgttgtcaatgagtctaagttgacaaattcagtggcagcccagccacctcctatcaatcaatcagggaagaaatgcaggggagactggggccctcagtgaggggctgcctggcattactcctccaaagactgctgcccccagaacaggcagggggtgtgggagggccagtttcccgccactgggtccaaggagcctttgttcaaaggaagaagtgggccacggaagaacgggcctgcttctctcgtgcctgtgcttctgacctccaggaactgtaaacaggaacacctatgtgtaactgaaggcatgagacatctgtacaggaagcatcccagcgcccacatgggcatgagacagtctgcactgcgcctggtgaaatgcgtgtgtgtacagacagtccactgggcagcacaggtatcctcatgttctttatttgcacagagtgaaatgtcagaagttacatgtaaatgaattcacagtcaataaagtccacgtctacctggaaatacaggctcggcctctgcactgtgcgcacacgggcttcacttgtgtctattcagatgcgcagggaagctttggcactgatttattgctcttgagtcattttccacagcttaacaccacccttctcagcacacgcctctgatgcacaccgctgcgccaaggtcacggtctgtgtctccagacacccttgatgagaaaatacattttctgtcttagaagcacatttcaggaaacaagagtggcgctgaccacggtcaccatgcctgttcacaacacatctcacactatttgtcgtttatttctgatctaaaaaactgaaacttttgacacgtacaccagaaacaacacattcaataacatagaagaaatgtctgcgaatgtcttttctatttgttttacacacttagttcatctaactggcagttttgtaaacataaactttaatatcaagattcaaactggaacaattttcttacaaagattgtgagttgaaatttgtcattttgtttgcacggtgccacaccagtcccccacccccaccccacagcctttcctgcctgtttcccacatcaagggatatcagtttcatagaataaaaattaaagtagctcaagcttaccagaaattacatttccacttttcccacccagctcatttctttaaaaactaatggggctattggtgcaaatttattcataatagaagtgaaccagagggccagtgggggctctttcctatcagcacatcacagagcagacagactacctgcagggagagttctgcacctcacgggcccagggccgtctcttcccagccctctccctcacatgctctgccagtctacacacactggagcaaaccccagctgtctccacccagatgggtggtgcccctccctccttaccaagatgccagagtcagaggggagggagtagtcaatccacaccgagcctgccacattgcagggccgtcccaccccgactcaggagtcagcacagggaggggtgggggggtctttttcctcgttctctatgccacttacttactacagtgcaccttggcagcagtcagcactgttacccgctgatggccgaggaagaaatgcgaagtaggcttgctcttagcacagcgagagatcactctagatatggctatggaggaaggtttgcagacagcagggtcggttcagaaaatcaattccacaaaatgcatttatctgagatccaaacccttcgcatatccagtgtaaatttatttttttacagcatccaataaatcccagtaaaggagctaaatgaagatcttaacatgaaaagtggtgtcagagctctttaggcaatgctgaaatgcacttgattttatgcccgtgggtggtcggcagcaagttttatttgcaaagcagcattagcaaacagaagcaattgcaccgtaaatgagtaacctctaaagtatcagtaattatatttaatgaaatgtccctcaaagtccctttgttatttgcaagtgacacattgtaaggaacttgcccatcccgctaagctgacttctcagccgcttcagtctcctgctcggacagcttctcttctgacagaactgacatccagggcgatacggagcgcgtgatgctctgcttggccaggttgtagtggtttatgactgtgtaaaatttctcccgggcactggagtcttgctccgcgtagtagctctccaagccttctgggatgcactgggtgttctgaaagacaagaggccactgag

SEQ ID NO: 4990 - protein, 335 aa, Homo sapiens; identical to SEQ ID NO: 525

SEQ ID NO: 4991 - DNA, 1083 bp, Homo sapiens
ttcagaacacccagtgcatcccagaaggcttggagagctactacgcggagcaagactccagtgcccgggagaaattttacacagtcataaaccactacaacctggccaagcagagcatcacgcgctccgtatcgccctggatgtcagttctgtcagaagagaagctgtccgagcaggagactgaagcggctgagaagtcagcttagcgggatgggcaagttccttacaatgtgtcacttgcaaataacaaagggactttgagggacatttcattaaatataattactgatactttagaggttactcatttacggtgcaattgcttctgtttgctaatgctgctttgcaaataaaacttgctgccgaccacccacgggcataaaatcaagtgcatttcagcattgcctaaagagctctgacaccacttttcatgttaagatcttcatttagctcctttactgggatttattggatgctgtaaaaaaataaatttacactggatatgcgaagggtttggatctcagataaatgcattttgtggaattgattttctgaaccgaccctgctgtctgcaaaccttcctccatagccatatctagagtgatctctcgctgtgctaagagcaagcctacttcgcatttcttcctcggccatcagcgggtaacagtgctgactgctgccaaggtgcactgtagtaagtaagtggcatagagaacgaggaaaagtggaaatgtaatttctggtaagcttgagctactttaatttttattctatgaaactgatatcccttgatgtgggaaacaggcaggaaaggctgtggggtgggggtgggggactggtgtggcaccgtgcaaacaaaatgacaaatttcaactcacaatctttgtaagaaaattgttccagtttgaatcttgatattaaagtttatgtttacaaaactgccagttagatgaactaagtgtgtaaaacaaatagaaaagacattcgcagacatttcttctatgttattgaatgtgttgtttctggtgtacgtgtcaaaagtttcagttttttagatcagaaataaacgacaaatagtgtgag

SEQ ID NO: 4992 - protein, 38 aa, Homo sapiens
MKLISLDVGNRQERLWGGGGGLVWHRANKMTNFNSQSL

SEQ ID NO: 4993 - DNA, 899 bp, Homo sapiens
ttcagaacacccagtgcatcccagaaggcttggagagctactacgcggagcaagactccagtgcccgggagaaattttacacagtcataaaccactacaacctggccaagcagagcatcacgcgctccgtatcgccctggatgtcagttctgtcagaagagaagctgtccgagcaggagactgaagcggctgagaagtcagcttagcgggatgggcaagttccttacaatgtgtcacttgcaaataacaaagggactttgagggacatttcattaaatataattactgatactttagaggttactcatttacggtgcaattgcttctgtttgctaatgctgctttgcaaataaaacttgctgccgaccacccacgggcataaaatcaagtgcatttcagcattgcctaaagagctctgacaccacttttcatgttaagatcttcatttagctcctttactgggatttattggatgctgtaaaaaaataaatttacactggatatgcgaagggtttggatctcagataaatgcattttgtggaattgattttctgaaccgaccctgctgtctgcaaaccttcctccatagccatatctagagtgatctctcgctgtgctaagagcaagcctacttcgcatttcttcctcggccatcagcggcggtgtgcatcagaggcgtgtgctgagaagggtggtgttaagctgtggaaaatgactcaagagcaataaatcagtgccaaagcttccctgcgcatctgaatagacacaagtgaagcccgtgtgcgcacagtgcagaggccgagcctgtatttccaggtagacgtggactttattgactgtgaattcatttacatgtaacttctgacatttcactctgtgcaaataaagaacatgaggat

SEQ ID NO: 4994 - protein, 36 aa, Homo sapiens
SLAVLRASLLRISSSAISGGVHQRRVLRRVVLSCGK

SEQ ID NO: 4995 - DNA, 1764 bp, Homo sapiens
ttcagaacacccagtgcatcccagaaggcttggagagctactacgcggagcaagactccagtgcccgggagaaattttacacagtcataaaccactacaacctggccaagcagagcatcacgcgctccgtatcgccctggatgtcagttctgtcagaagagaagctgtccgagcaggagactgaagcggctgagaagtcagcttagcgggatgggcaagttccttacaatgtgtcacttgcaaataacaaagggactttgagggacatttcattaaatataattactgatactttagaggttactcatttacggtgcaattgcttctgtttgctaatgctgctttgcaaataaaacttgctgccgaccacccacgggcataaaatcaagtgcatttcagcattgcctaaagagctctgacaccacttttcatgttaagatcttcatttagctcctttactgggatttattggatgctgtaaaaaaataaatttacactggatatgcgaagggtttggatctcagataaatgcattttgtggaattgattttctgaaccgaccctgctgtctgcaaaccttcctccatagccatatctagagtgatctctcgctgtgctaagagcaagcctacttcgcatttcttcctcggccatcagcgggtaacagtgctgactgctgccaaggtgcactgtagtaagtaagtggcatagagaacgaggaaaaagacccccccacccctccctgtgctgactcctgagtcggggtgggacggccctgcaatgtggcaggctcggtgtggattgactactccctcccctctgactctggcatcttggtaaggagggaggggcaccacccatctgggtggagacagctggggtttgctccagtgtgtgtagactggcagagcatgtgagggagagggctgggaagagacggccctgggcccgtgaggtgcagaactctccctgcaggtagtctgtctgctctgtgatgtgctgataggaaagagcccccactggccctctggttcacttctattatgaataaatttgcaccaatagccccattagtttttaaagaaatgagctgggtgggaaaagtggaaatgtaatttctggtaagcttgagctactttaatttttattctatgaaactgatatcccttgatgtgggaaacaggcaggaaaggctgtggggtgggggtgggggactggtgtggcaccgtgcaaacaaaatgacaaatttcaactcacaatctttgtaactaagtgtgtaaaacaaatagaaaagacattcgcagacatttcttctatgttattgaatgtgttgtttctggtgtacgtgtcaaaagtttcagttttttagatcagaaataaacgacaaatagtgtgagatgtgttgtgaacaggcatggtgaccgtggtcagcgccactcttgtttcctgaaatgtgcttctaagacagaaaatgtattttctcatcaagggtgtctggagacacagaccgtgaccttggcgcagcggtgtgcatcagaggcgtgtgctgagaagggtggtgttaagctgtggaaaatgactcaagagcaataaatcagtgccaaagcttccctgcgcatctgaatagacacaagtgaagcccgtgtgcgcacagtgcagaggccgagcctgtatttccaggtagacgtggactttattgactgtgaattcatttacatgtaacttctgacatttcactctgtgcaaataaagaacatgaggata

SEQ ID NO: 4996 - protein, 38 aa, Homo sapiens; identical to SEQ ID NO: 4992

SEQ ID NO: 4997 - DNA, 1452 bp, Homo sapiens
ttcagaacacccagtgcatcccagaaggcttggagagctactacgcggagcaagactccagtgcccgggagaaattttacacagtcataaaccactacaacctggccaagcagagcatcacgcgctccgtatcgccctggatgtcagttctgtcagaagagaagctgtccgagcaggagactgaagcggctgagaagtcagcttagcgggatgggcaagttccttacaatgtgtcacttgcaaataacaaagggactttgagggacatttcattaaatataattactgatactttagaggttactcatttacggtgcaattgcttctgtttgctaatgctgctttgcaaataaaacttgctgccgaccacccacgggcataaaatcaagtgcatttcagcattgcctaaagagctctgacaccacttttcatgttaagatcttcatttagctcctttactgggatttattggatgctgtaaaaaaataaatttacactggatatgcgaagggtttggatctcagataaatgcattttgtggaattgattttctgaaccgaccctgctgtctgcaaaccttcctccatagccatatctagagtgatctctcgctgtgctaagagcaagcctacttcgcatttcttcctcggccatcagcgggtaacagtgctgactgctgccaaggtgcactgtagtaagtaagtggcatagagaacgaggaaaagtggaaatgtaatttctggtaagcttgagctactttaatttttattctatgaaactgatatcccttgatgtgggaaacaggcaggaaaggctgtggggtgggggtgggggactggtgtggcaccgtgcaaacaaaatgacaaatttcaactcacaatctttgtaagaaaattgttccagtttgaatcttgatattaaagtttatgtttacaaaactgccagttagatgaactaagtgtgtaaaacaaatagaaaagacattcgcagacatttcttctatgttattgaatgtgttgtttctggtgtacgtgtcaaaagtttcagttttttagatcagaaataaacgacaaatagtgtgagatgtgttgtgaacaggcatggtgaccgtggtcagcgccactcttgtttcctgaaatgtgcttctaagacagaaaatgtattttctcatcaagggtgtctggagacacagaccgtgaccttggcgcagcggtgtgcatcagaggcgtgtgctgagaagggtggtgttaagctgtggaaaatgactcaagagcaataaatcagtgccaaagcttccctgcgcatctgaatagacacaagtgaagcccgtgtgcgcacagtgcagaggccgagcctgtatttccaggtagacgtggactttattgactgtgaattcatttacatgtaacttctgacatttcactctgtgcaaataaagaacatgaggatacc

SEQ ID NO: 4998 - protein, 38 aa, Homo sapiens; identical to SEQ ID NO: 4992

SEQ ID NO: 4999 - DNA, 321 bp, Homo sapiens
aaaagtttcagttttttagatcagaaataaacgacaaatagtgtgagatgtgttgtgaacaggcatggtgaccgtggcgcagcggtgtgcatcagaggcgtgtgctgagaagggtggtgttaagctgtggaaaatgactcaagagcaataaatcagtgccaaagcttccctgcgcatctgaatagacacaagtgaagcccgtgtgcgcacagtgcagaggccgagcctgtatttccaggtagacgtggactttattgactgtgaattcatttacatgtaacttctgacatttcactctgtgcaaataaagaacatgaggat

SEQ ID NO: 5000 - DNA, 1362 bp, Homo sapiens
gttagattaccaagtgctaatagttaatatgtaatctgttctttttatgaaggcaaatcgaagggagagtggttgagatttccagactccaagagatattcacggaaaaggttttgcaacaggaagctgagattgacagcattcaccagttagttgtgggggcaactgaaaatatcaaggaaggcaacgaagacataagagaggccattaaaaacaacgctggcttccgcgtgtggatcctcttcttcctcgtgatgtgctccttctccttgctcttcctcgactggtacgacagctagccagggccacgggggcccagcacgagagtcctcatgggcactcacagactgcgtgctttcatgtacttccagtgctggagcatggtatgaccagattttatcacagtgccatttgaagggaaaggagttcagacagacagacgtattccccaaaaagggataccccaggccgatggtgttcagccatttagcagctgaaaaaggaaacagtgcacaccaatgggaggcagcctgcgtagccctcatcaggcaagacagactgaatgcaggagtgggtgattagctgctccttgaacttgaggctgccttggcagcaggggcacagcaggcctcaagagcccctaattgtctcagggttcaaaggaagacactgacctttcccatcccggtagcttcagggaagatcatagttaataacgtctctcaacaaatgattacttctttgtttccttgtggcttcttgtctgtctgagtcaacgaatacacagacttactggattatagaagagaaaattcacatctgccttgttaatctaataaatataattacagccccttaatgtgttgtcaatgagtctaagttgacaaattcagtggcagcccagccacctcctatcaatcaatcagggaagaaatgcaggggagactggggccctcagtgaggggctgcctggcattactcctccaaagactgctgcccccagaacaggcagggggtgtgggagggccagtttcccgccactgggtccaaggagcctttgttcaaaggaagaagtgggccacggaagaacgggcctgcttctctcgtgcctgtgcttctgacctccaggaactgtaaacaggaacacctatgtgtaactgaaggcatgagacatctgtacaggaagcatcccagcgcccacatgggcatgagacagtctgcactgcgcctggtgaaatgcgtgtgtgtacagacagtccactgggcagcacaggtatcctcatgttctttatttgcacagagtgaaatgtcagaagttacatgtaaatgaattcacagtcaataaagtccacgtctacctgg

SEQ ID NO: 5001 - protein, 67 aa, Homo sapiens [sequence omitted]

SEQ ID NO: 5002 - DNA, 2145 bp, Homo sapiens
ccaccttcacgtagaagataggatttctttagaagtgtgtaacagtcctgttagattaccaagtgctaatagttaatatgtaatctgttctttttatgaaggcaaatcgaagggagagtggttgagatttccagactccaagagatattcacggaaaaggttttgcaacaggaagctgagattgacagcattcaccagttagttgtgggggcaactgaaaatatcaaggaaggcaacgaagacataagagaggtaggcactgtttaggttccccaggtgcgacgtggcgcagcactgagtcccagcagcgggtgttagtctcgccggcacagctgcccaggagccttgctgggcagagctcacggggctgatcacaaaattgtgtgaccgcggagctgcgtgtgttcatgagacccaccacctgtcgcccacctccagctgctttcgagaggcagtggctcaccagcctccaaaggagcaatccagggtgggtgggggtactcctggcagggtcaggccagctcttcatgtccagggatgtacatgggtagctcgttggcccccaccgaggggtcagagcctggcccctgcttacagaggacactacagccatcctgttgaggggactgtttcccaagctcagtcctcagggttgggtcaccacggacatcatgttactgggaaacacaaagcttgcggtcacactctgctcggggcccttaaccctgggacagaagggagtgattccgagagttgtgttgagggagaattgtgcaggacccaaatgatggccaaacagagggaaatataacccatttgtcttctggtggatctcaaaagccatctattcaaggtaagcacagatggaacgacacccatagttacagccaggatcaggagagcacgtgggaagaggggggcatttcagggctgctcaaaccaaaatcctgtgtgataaaaacacctgtgctcccgtccctgcccaggccattaaaaacaacgctggcttccgcgtgtggatcctcttcttcctcgtgatgtgctccttctccttgctcttcctcgactggtacgacagctagccagggccacgggggcccagcacgagagtcctcatgggcactcacagactgcgtgctttcatgtacttccagtgctggagcatggtatgaccagattttatcacagtgccatttgaagggaaaggagttcagacagacagacgtattccccaaaaagggataccccaggccgatggtgttcagccatttagcagctgaaaaaggaaacagtgcacaccaatgggaggcagcctgcgtagccctcatcaggcaagacagactgaatgcaggagtgggtgattagctgctccttgaacttgaggctgccttggcagcaggggcacagcaggcctcaagagcccctaattgtctcagggttcaaaggaagacactgacctttcccatcccggtagcttcagggaagatcatagttaataacgtctctcaacaaatgattacttctttgtttccttgtggcttcttgtctgtctgagtcaacgaatacacagacttactggattatagaagagaaaattcacatctgccttgttaatctaataaatataattacagccccttaatgtgttgtcaatgagtctaagttgacaaattcagtggcagcccagccacctcctatcaatcaatcagggaagaaatgcaggggagactggggccctcagtgaggggctgcctggcattactcctccaaagactgctgcccccagaacaggcagggggtgtgggagggccagtttcccgccactgggtccaaggagcctttgttcaaaggaagaagtgggccacggaagaacgggcctgcttctctcgtgcctgtgcttctgacctccaggaactgtaaacaggaacacctatgtgtaactgaaggcatgagacatctgtacaggaagcatcccagcgcccacatgggcatgagacagtctgcactgcgcctggtgaaatgcgtgtgtgtacagacagtccactgggcagcacaggtatcctcatgttctttatttgcacagagtgaaatgtcagaagttacatgtaaatgaattcacagtcaataaagtccacgtctacctgg

SEQ ID NO: 5003 - protein, 67 aa, Homo sapiens [sequence omitted]

SEQ ID NO: 5004 - DNA, 3494 bp, Homo sapiens
gctggggtacttggaggggaggggtcctgggtgggaaggaggctgctggggagaccctgcaactcatttccgccctaggacaatggcaacaaggtcaggctgttgaatgaagtgccagcatagcccgtggtggtcagctgcctcccataaccattgtttcccttgtatttttggtttactaagcaagtgataagccagatcttccatcgattcggagcctccagaggcttgcttgtatgtatccctcccactcctgcttacagaatgcctcagaaaatatttgtggatttgatggcagctttaatctataagaaagaaagaacaactggaatgcctttgcaaagttatgttccacccagttcccgccctcaggaagctcagggtgacacgggaagtttgggatgggcacagtttattacaaggcagaaagggaccgttgggcgctactatcctaagatattttcagaaaatggtaggccaaggataggaatatgagaaataagtttgagcttaggggccagggtaggtgtcctggagaagtggggcctgcgggatgcatcggggaggaaatgcaggacgcccctgactccctgcacattgcgggagttgagtggacacacgaggacagggctgtgggggcctgcagtgagggcaaggagctgttcctgtccattctctgtgctgagtttcaggagcttccatccttttctttggcccatatcaaactggcaagaatggctgggagagcaactgtctgtgccaagctcactcagctccaagaagctcccatgtatccctggtgtcagggcacccgtcctcacccagcctgagcactgggaaacacgctcctctggctctgggcctctgtccctgttgagcagtggagtggccaggctctgaagtcagaggggcccagaggcagctcggccaagctgcccacctccccttcctctccagaccctccccacaccagatccttctccatattaaaaaatatgtatagtccttcagtatagttcatgagagaaaacaacaacaaaagaattttcttaataatggtactagagtcaggaagcaggccgtgggatcccaggggagagcgggtaggtagatacagctacagccatagcagtcagcttgtacccctggagtgcagtggttgagatggagaagtcaattaccaggcagcacagctgttttttaaaactttctcctgaaagcagggacgttgttcacactaatgctaacggtcgtccagcaccggctgccacgttgccgcagctggaaatgggggcttcggcagtgattcctggagcgtaggtccgctttcttgctagactcttgcctaagttcagtatgatgtcatcctgagtgtgtctgtttcctcacagtttgaacaggaaaatcagcgactaattggtgaaatgaacagcttgtttgatgaagtgaggcaaatcgaagggagagtggttgagatttccagactccaagagatattcacggaaaaggttttgcaacaggaagctgagattgacagcattcaccagttagttgtgggggcaactgaaaatatcaaggaaggcaacgaagacataagagaggtaggcactgtttaggttccccaggtgcgacgtggcgcagcactgagtcccagcagcgggtgttagtctcgccggcacagctgcccaggagccttgctgggcagagctcacggggctgatcacaaaattgtgtgaccgcggagctgcgtgtgttcatgagacccaccacctgtcgcccacctccagctgctttcgagaggcagtggctcaccagcctccaaaggagcaatccagggtgggtgggggtactcctggcagggtcaggccagctcttcatgtccagggatgtacatgggtagctcgttggcccccaccgaggggtcagagcctggcccctgcttacagaggacactacagccatcctgttgaggggactgtttcccaagctcagtcctcagggttgggtcaccacggacatcatgttactgggaaacacaaagcttgcggtcacactctgctcggggcccttaaccctgggacagaagggagtgattccgagagttgtgttgagggagaattgtgcaggacccaaatgatggccaaacagagggaaatataacccatttgtcttctggtggatctcaaaagccatctattcaaggtaagcacagatggaacgacacccatagttacagccaggatcaggagagcacgtgggaagaggggggcatttcagggctgctcaaaccaaaatcctgtgtgataaaaacacctgtgctcccgtccctgcccaggccattaaaaacaacgctggcttccgcgtgtggatcctcttcttcctcgtgatgtgctccttctccttgctcttcctcgactggtacgacagctagccagggccacgggggcccagcacgagagtcctcatgggcactcacagactgcgtgctttcatgtacttccagtgctggagcatggtatgaccagattttatcacagtgccatttgaagggaaaggagttcagacagacagacgtattccccaaaaagggataccccaggccgatggtgttcagccatttagcagctgaaaaaggaaacagtgcacaccaatgggaggcagcctgcgtagccctcatcaggcaagacagactgaatgcaggagtgggtgattagctgctccttgaacttgaggctgccttggcagcaggggcacagcaggcctcaagagcccctaattgtctcagggttcaaaggaagacactgacctttcccatcccggtagcttcagggaagatcatagttaataacgtctctcaacaaatgattacttctttgtttccttgtggcttcttgtctgtctgagtcaacgaatacacagacttactggattatagaagagaaaattcacatctgccttgttaatctaataaatataattacagccccttaatgtgttgtcaatgagtctaagttgacaaattcagtggcagcccagccacctcctatcaatcaatcagggaagaaatgcaggggagactggggccctcagtgaggggctgcctggcattactcctccaaagactgctgcccccagaacaggcagggggtgtgggagggccagtttcccgccactgggtccaaggagcctttgttcaaaggaagaagtgggccacggaagaacgggcctgcttctctcgtgcctgtgcttctgacctccaggaactgtaaacaggaacacctatgtgtaactgaaggcatgagacatctgtacaggaagcatcccagcgcccacatgggcatgagacagtctgcactgcgcctggtgaaatgcgtgtgtgtacagacagtccactgggcagcacaggtatcctcatgttctttatttgcacagagtgaaatgtcagaagttacatgtaaatgaattcacagtcaataaagtccacgtctacctgg

SEQ ID NO: 5005 - protein, 63 aa, Homo sapiens
MNSLFDEVRQIEGRVVEISRLQEIFTEKVLQQEAEIDSIHQLVVGATENIKEGNEDIREVGTV

SEQ ID NO: 5006 - DNA, 1812 bp, Homo sapiens
gaggaacagagcggaacctctgctgtctctaagtagccataccatgtctgaatatgggaggatgacagacacagaacgagaccagatagaccaggatgcccagatattcatgaggacctgttcagaagcaattcagcaactacgaacagaagctcacaaggagatacattcccagcaagtgaaggagcacaggaccgctgttttggatttcattgaagattacttgaaaagagtatgtaaactttactcagaacagagagccatccgagttaaaagagtggtggataagaaaagattatctaagctggaaccagaaccaaatacaaagacaagagaatccacatcttctgagaaagtttcacagagtccttcaaaagactctgaagaaaaccctgccactgaagaacgtccagaaaaaattttggctgaaacacaacctgaattgggaacgtggggagatggcaaaggcgaagatgagttatccccagaagaaatacaaatggcaaatcgaagggagagtggttgagatttccagactccaagagatattcacggaaaaggttttgcaacaggaagctgagattgacagcattcaccagttagttgtgggggcaactgaaaatatcaaggaaggcaacgaagacataagagaggccattaaaaacaacgctggcttccgcgtgtggatcctcttcttcctcgtgatgtgctccttctccttgctcttcctcgactggtacgacagctagccagggccacgggggcccagcacgagagtcctcatgggcactcacagactgcgtgctttcatgtacttccagtgctggagcatggtatgaccagattttatcacagtgccatttgaagggaaaggagttcagacagacagacgtattccccaaaaagggataccccaggccgatggtgttcagccatttagcagctgaaaaaggaaacagtgcacaccaatgggaggcagcctgcgtagccctcatcaggcaagacagactgaatgcaggagtgggtgattagctgctccttgaacttgaggctgccttggcagcaggggcacagcaggcctcaagagcccctaattgtctcagggttcaaaggaagacactgacctttcccatcccggtagcttcagggaagatcatagttaataacgtctctcaacaaatgattacttctttgtttccttgtggcttcttgtctgtctgagtcaacgaatacacagacttactggattatagaagagaaaattcacatctgccttgttaatctaataaatataattacagccccttaatgtgttgtcaatgagtctaagttgacaaattcagtggcagcccagccacctcctatcaatcaatcagggaagaaatgcaggggagactggggccctcagtgaggggctgcctggcattactcctccaaagactgctgcccccagaacaggcagggggtgtgggagggccagtttcccgccactgggtccaaggagcctttgttcaaaggaagaagtgggccacggaagaacgggcctgcttctctcgtgcctgtgcttctgacctccaggaactgtaaacaggaacacctatgtgtaactgaaggcatgagacatctgtacaggaagcatcccagcgcccacatgggcatgagacagtctgcactgcgcctggtgaaatgcgtgtgtgtacagacagtccactgggcagcacaggtatcctcatgttctttatttgcacagagtgaaatgtcagaagttacatgtaaatgaattcacagtcaataaagtccacgtctacctgg

SEQ ID NO: 5007 - protein, 160 aa, Homo sapiens; identical to SEQ ID NO: 4988

SEQ ID NO: 5008 - DNA, 2170 bp, Homo sapiens
gtgtggggcaggaccagtccttcagcggccgggttcgcgccgcggtcgccggctgcttacgtgggcgggcctagtgtggggctgagggtgcgggtcgctatggcggtggacatcacgctgctattccgggccagcgtcaagaccgtgaagacgcggaacaaggcgctgggagtggcggtgggcggcggggtcgatggcagccgggacgagctgttccgccggagcccccggcccaagggcgacttctccagccgggcccgcgaagtgatttctcacattggcaaactgagagattttcttctggaacacaggaaagattatattaatgcttatagccataccatgtctgaatatgggaggatgacagacacagaacgagaccagatagaccaggatgcccagatattcatgaggacctgttcagaagcaattcagcaactacgaacagaagctcacaaggagatacattcccagcaagtgaaggagcacaggaccgctgttttggatttcattgaagattacttgaaaagagtatgtaaactttactcagaacagagagccatccgagttaaaagagtggtggataagaaaagattatctaagctggaaccagaaccaaatacaaagacaagagaatccacatcttctgagaaagtttcacagagtccttcaaaagactctgaagaaaaccctgccactgaagaacgtccagaaaaaattttggctgaaacacaacctgaattgggaacgtggggagatggcaaaggcgaagatgagttatccccagaagaaatacaaatgtttgaacaggaaaatcagcgactaattggtgaaatgaacagcttgtttgatgaagtgaggcaaatcgaagggagagtggttgagatttccagactccaagagatattcacggaaaaggttttgcaacaggaagctgagattgacagcattcaccagttagttgtgggggcaactgaaaatatcaaggaaggcaacgaagacataagagaggccattaaaaacaacgctggcttccgcgtgtggatcctcttcttcctcgtgatgtgctccttctccttgctcttcctcgactggtacgacagctagccagggccacgggggcccagcacgagagtcctcatgggcactcacagactgcgtgctttcatgtacttccagtgctggagcatggtatgaccagattttatcacagtgccatttgaagggaaaggagttcagacagacagacgtattccccaaaaagggataccccaggccgatggtgttcagccatttagcagctgaaaaaggaaacagtgcacaccaatgggaggcagcctgcgtagccctcatcaggcaagacagactgaatgcaggagtgggtgattagctgctccttgaacttgaggctgccttggcagcaggggcacagcaggcctcaagagcccctaattgtctcagggttcaaaggaagacactgacctttcccatcccggtagcttcagggaagatcatagttaataacgtctctcaacaaatgattacttctttgtttccttgtggcttcttgtctgtctgagtcaacgaatacacagacttactggattatagaagagaaaattcacatctgccttgttaatctaataaatataattacagccccttaatgtgttgtcaatgagtctaagttgacaaattcagtggcagcccagccacctcctatcaatcaatcagggaagaaatgcaggggagactggggccctcagtgaggggctgcctggcattactcctccaaagactgctgcccccagaacaggcagggggtgtgggagggccagtttcccgccactgggtccaaggagcctttgttcaaaggaagaagtgggccacggaagaacgggcctgcttctctcgtgcctgtgcttctgacctccaggaactgtaaacaggaacacctatgtgtaactgaaggcatgagacatctgtacaggaagcatcccagcgcccacatgggcatgagacagtctgcactgcgcctggtgaaatgcgtgtgtgtacagacagtccactgggcagcacaggtatcctcatgttctttatttgcacagagtgaaatgtcagaagttacatgtaaatgaattcacagtcaataaagtccacgtctacctgg

SEQ ID NO: 5009 - protein, 335 aa, Homo sapiens; identical to SEQ ID NO: 525

SEQ ID NO: 5010 - DNA, 1640 bp, Homo sapiens
ccaccttcacgtagaagataggatttctttagaagtgtgtaacagtcctgttagattaccaagtgctaatagttaatatgtaatctgttctttttatgaaggcaaatcgaagggagagtggttgagatttccagactccaagagatattcacggaaaaggttttgcaacaggaagctgagattgacagcattcaccagttagttgtgggggcaactgaaaatatcaaggaaggcaacgaagacataagagaggtaggcactgtttaggttccccaggtgcgacgtggcgcagcactgagtcccagcagcgggtgttagtctcgccggcacagctgcccaggagccttgctgggcagagctcacggggctgatcacaaaattgtgtgaccgcggagctgcgtgtgttcatgagacccaccacctgtcgcccacctccagctgctttcgagaggcagtggctcaccagcctccaaaggagcaatccagggtgggtgggggtactcctggcagggtcaggccagctcttcatgtccagggatgtacatgggtagctcgttggcccccaccgaggggtcagagcctggcccctgcttacagaggacactacagccatcctgttgaggggactgtttcccaagctcagtcctcagggttgggtcaccacggacatcatgttactgggaaacacaaagcttgcggtcacactctgctcggggcccttaaccctgggacagaagggagtgattccgagagttgtgttgagggagaattgtgcaggacccaaatgatggccaaacagagggaaatataacccatttgtcttctggtggatctcaaaagccatctattcaaggtaagcacagatggaacgacacccatagttacagccaggatcaggagagcacgtgggaagaggggggcatttcagggctgctcaaaccaaaatcctgtgtgataaaaacacctgtgctcccgtccctgcccaggccattaaaaacaacgctggcttccgcgtgtggatcctcttcttcctcgtgatgtgctccttctccttgctcttcctcgactggtacgacagctagccagggccacgggggcccagcacgagagtcctcatgggcactcacagactgcgtgctttcatgtacttccagtgctggagcatggtatgaccagattttatcacagtgccatttgaagggaaaggagttcagacagacagacgtattccccaaaaagggataccccaggccgatggtgttcagccatttagcagctgaaaaaggaaacagtgcacaccaatgggaggcagcctgcgtagccctcatcaggcaagacagactgaatgcaggagtgggtgattagctgctccttgaacttgaggctgccttggcagcaggggcacagcaggcctcaagagcccctaattgtctcagggttcaaaggaagacactgacctttcccatcccggtagcttcagggaagatcatagttaataacgtctctcaacaaatgattacttctttgtttccttgtggcttcttgtctgtctgagtcaacgaatacacagacttactggattatagaagagaaaattcacatctgccttgttaatctaataaatataattacagcccctt

SEQ ID NO: 5011 - protein, 47 aa, Homo sapiens
MRPTTCRPPPAAFERQWLTSLQRSNPGWVGVLLAGSGQLFMSRDVHG

SEQ ID NO: 5012 - DNA, 1307 bp, Homo sapiens
gaggaacagagcggaacctctgctgtctctaagtagccataccatgtctgaatatgggaggatgacagacacagaacgagaccagatagaccaggatgcccagatattcatgaggacctgttcagaagcaattcagcaactacgaacagaagctcacaaggagatacattcccagcaagtgaaggagcacaggaccgctgttttggatttcattgaagattacttgaaaagagtatgtaaactttactcagaacagagagccatccgagttaaaagagtggtggataagaaaagattatctaagctggaaccagaaccaaatacaaagacaagagaatccacatcttctgagaaagtttcacagagtccttcaaaagactctgaagaaaaccctgccactgaagaacgtccagaaaaaattttggctgaaacacaacctgaattgggaacgtggggagatggcaaaggcgaagatgagttatccccagaagaaatacaaatggcaaatcgaagggagagtggttgagatttccagactccaagagatattcacggaaaaggttttgcaacaggaagctgagattgacagcattcaccagttagttgtgggggcaactgaaaatatcaaggaaggcaacgaagacataagagaggccattaaaaacaacgctggcttccgcgtgtggatcctcttcttcctcgtgatgtgctccttctccttgctcttcctcgactggtacgacagctagccagggccacgggggcccagcacgagagtcctcatgggcactcacagactgcgtgctttcatgtacttccagtgctggagcatggtatgaccagattttatcacagtgccatttgaagggaaaggagttcagacagacagacgtattccccaaaaagggataccccaggccgatggtgttcagccatttagcagctgaaaaaggaaacagtgcacaccaatgggaggcagcctgcgtagccctcatcaggcaagacagactgaatgcaggagtgggtgattagctgctccttgaacttgaggctgccttggcagcaggggcacagcaggcctcaagagcccctaattgtctcagggttcaaaggaagacactgacctttcccatcccggtagcttcagggaagatcatagttaataacgtctctcaacaaatgattacttctttgtttccttgtggcttcttgtctgtctgagtcaacgaatacacagacttactggattatagaagagaaaattcacatctgccttgttaatctaataaatataattacagcccctt

SEQ ID NO: 5013 - protein, 160 aa, Homo sapiens; identical to SEQ ID NO: 4988

SEQ ID NO: 5014 - DNA, 1665 bp, Homo sapiens
gtgtggggcaggaccagtccttcagcggccgggttcgcgccgcggtcgccggctgcttacgtgggcgggcctagtgtggggctgagggtgcgggtcgctatggcggtggacatcacgctgctattccgggccagcgtcaagaccgtgaagacgcggaacaaggcgctgggagtggcggtgggcggcggggtcgatggcagccgggacgagctgttccgccggagcccccggcccaagggcgacttctccagccgggcccgcgaagtgatttctcacattggcaaactgagagattttcttctggaacacaggaaagattatattaatgcttatagccataccatgtctgaatatgggaggatgacagacacagaacgagaccagatagaccaggatgcccagatattcatgaggacctgttcagaagcaattcagcaactacgaacagaagctcacaaggagatacattcccagcaagtgaaggagcacaggaccgctgttttggatttcattgaagattacttgaaaagagtatgtaaactttactcagaacagagagccatccgagttaaaagagtggtggataagaaaagattatctaagctggaaccagaaccaaatacaaagacaagagaatccacatcttctgagaaagtttcacagagtccttcaaaagactctgaagaaaaccctgccactgaagaacgtccagaaaaaattttggctgaaacacaacctgaattgggaacgtggggagatggcaaaggcgaagatgagttatccccagaagaaatacaaatgtttgaacaggaaaatcagcgactaattggtgaaatgaacagcttgtttgatgaagtgaggcaaatcgaagggagagtggttgagatttccagactccaagagatattcacggaaaaggttttgcaacaggaagctgagattgacagcattcaccagttagttgtgggggcaactgaaaatatcaaggaaggcaacgaagacataagagaggccattaaaaacaacgctggcttccgcgtgtggatcctcttcttcctcgtgatgtgctccttctccttgctcttcctcgactggtacgacagctagccagggccacgggggcccagcacgagagtcctcatgggcactcacagactgcgtgctttcatgtacttccagtgctggagcatggtatgaccagattttatcacagtgccatttgaagggaaaggagttcagacagacagacgtattccccaaaaagggataccccaggccgatggtgttcagccatttagcagctgaaaaaggaaacagtgcacaccaatgggaggcagcctgcgtagccctcatcaggcaagacagactgaatgcaggagtgggtgattagctgctccttgaacttgaggctgccttggcagcaggggcacagcaggcctcaagagcccctaattgtctcagggttcaaaggaagacactgacctttcccatcccggtagcttcagggaagatcatagttaataacgtctctcaacaaatgattacttctttgtttccttgtggcttcttgtctgtctgagtcaacgaatacacagacttactggattatagaagagaaaattcacatctgccttgttaatctaataaatataattacagcccctt

SEQ ID NO: 5015 - protein, 335 aa, Homo sapiens; identical to SEQ ID NO: 525

SEQ ID NO: 5016 - DNA, 809 bp, Homo sapiens
tccggcctcagccggcgcacctggcggaggaggaacctcgcgacgcgctctcgggcatcggtttctcccagcaaagcttggagggtttagctgcgcggagagctcagcgagctcttctgtgtctgtttggggcgtgtgggctccgggagcgtgaggaccgggaagctaggaggctccttcccttctggcggctccctcactgagaccgggcggtttggttgcgggggaagtggagacgagccacccttgacctttgactgcaagaactcaccttgagcaggatagaggcacgtggacggtgaccctcgggatgcaataaatgctgagacagatcaggtgtgcaaggcacagagctagaggccagaggcctttcttctccaaccttcagtcacctctttttaaagtgaagccagcatcctcctcggggtttactgtgaaaattaagtgagctgacgcgtgctgtgttttgatgttgcttggctcctacaaacattgagtgggccagacactgttctgaaaaatacgcagtcgacttttgaacagcacaggcttgaactgcatgcggccactaatactcggacttccttctgcctctgccatccctaagacagcaagacccacccctcctgctcctcagcctactcgatgtgatgatggtgagtatgaagacctttactttatgatgatccacttccatttaatggatagtaaatatattttctcttcctatgattttcttaataccattttcttttctctagcttactttattgaaagaatacagtatctaatacatatgacatgcaaaa

SEQ ID NO: 5017 - protein, 82 aa, Homo sapiens
MRPLILGLPSASAIPKTARPTPPAPQPTRCDDGEYEDLYFMMIHFHLMDSKYIFSSYDFLNTIFFSLAYFIERIQYLIHMTC

SEQ ID NO: 5018 - DNA, 999 bp, Homo sapiens
ggcctcagccggcgcacctggcggaggaggaacctcgcgacgcgctctcgggcatcggtttctcccagcaaagcttggagggtttagctgcgcggagagctcagcgagctcttctgtgtctgtttggggcgtgtgggctccgggagcgtgaggaccgggaagctaggaggctccttcccttctggcggctccctcactgagaccgggcggtttggttgcgggggaagtggagacgagccacccttgacctttgactgcaagaactcaccttgagcaggatagaggcacgtggacggtgaccctcgggatgcaataaatgctgagacagatcagcaaacattgagtgggccagacactgttctgaaaaatacgcagtcgacttttgaacagcacaggcttgaactgcatgcggccactaatactcggacttccttctgcctctgccatccctaagacagcaagacccacccctcctgctcctcagcctactcgatgtgatgatgtctggcttccttttcccttcaatggaataacatatacaaactctacctaagagtgctgtgtgaagtacatgccagcctacaagacatgtctctaaccaagtcgaaagagtgcagtattcgttcattcactcattcattcattcaacaaatgtttattaataggtattgtttaccaagcactgtgtgttaaggagaagatggtatgaaacaagcagacccaggcctcagggaagagaggctgttacattcagagacaattaccatacactacaatgaatgctttgatgaagggaggcaaaaaaacaaaaacaaaaacaacaacaacaaaaaccccacaacgatgtggatccctccctgtgggggtgaggagaaaggaaaacagcttcagggatctccaagcccttgtgccggccactcttctttcttctcttccttcctcctctgtctttcctttcatccttcctcctcccttctctttggacatcactaataaaag

SEQ ID NO: 5019 - protein, 48 aa, Homo sapiens
MRPLILGLPSASAIPKTARPTPPAPQPTRCDDVWLPFPFNGITYTNST

SEQ ID NO: 5020 - DNA, 715 bp, Homo sapiens
gccggcgcacctggcggaggaggaacctcgcgacgcgctctcgggcatcggtttctcccagcaaagcttggagggtttagctgcgcggagagctcagcgagctcttctgtgtctgtttggggcgtgtgggctccgggagcgtgaggaccgggaagctaggaggctccttcccttctggcggctccctcactgagaccgggcggtttggttgcgggggaagtggagacgagccacccttgacctttgactgcaagaactcaccttgagcaggatagaggcacgtggacggtgaccctcgggatgcaataaatgctgagacagatcagcaaacattgagtgggccagacactgttctgaaaaatacgcagtcgacttttgaacagcacaggcttgaactgcatgcggccactaatactcggacttccttctgcctctgccatccctaagacagcaagacccacccctcctgctcctcagcctactcgatgtgatgatgaaggggacacagatacacatacagagaagacaatggcatgaaggcagaggccgagtggagtgatgcagccacagccagggaatgccaggaacctctgggagctggaagaggccaggaaggatcctcccccggagcctctggagggagtgtggccccaccgacaccctgacctcagccttctggcctcctgaactgtgagaaaataaatgtctgttgttt

SEQ ID NO: 5021 - protein, 45 aa, Homo sapiens
MRPLILGLPSASAIPKTARPTPPAPQPTRCDDEGDTDTHTEKTMA

SEQ ID NO: 5022 - DNA, 2430 bp, Homo sapiens
tcgcgacgcgctctcgggcatcggtttctcccagcaaagcttggagggtttagctgcgcggagagctcagcgagctcttctgtgtctgtttggggcgtgtgggctccgggagcgtgaggaccgggaagctaggaggctccttcccttctggcggctccctcactgagaccgggcggtttggttgcgggggaagtggagacgagccacccttgacctttgactgcaagaactcaccttgagcaggatagaggcacgtggacggtgaccctcgggatgcaataaatgctgagacagatcagcaaacattgagtgggccagacactgttctgaaaaatacgcagtcgacttttgaacagcacaggcttgaactgcatgcggccactaatactcggacttccttctgcctctgccatccctaagacagcaagacccacccctcctgctcctcagcctactcgatgtgatgatgatgcagagattcagagagtctaagcaacttttctaaatcatctagctggaattcagtaactgagccaggatctaccccaggtctgtctgactccaaagcctgtgtcttccagcacacactgctgctgcctggggaatgtggatatgatgtctggagctctagcaaccatatcagaccacaaggatgaatgtacaccccaggaatggaagagaggaaagccagaaaaagactcggtccctgatggctgaagagctaccatacctgcccctagatcttctatttctgatcatcttctatgcaaggcctggaatgtaatcatggatagccatggatgatcagctttcatcatgtgggcatggaacaagatggaaggaagctggggccctgagtgacctgtggagcagaggcctttgcccaccctgggctgcctgatttcccctggactatcatgagacagaagaaaaagcttctatcttatttgaaccactgtgttttgggaaccttggactagagcagcctagccttcatacactaacaaggtacattactgacttctcctgttagctctgtcgtgcttacatcatgatgcccatttttcaggtaaagaaatagtggctcaaacaaggtgagtggccaaagataacatagctcatatgtagcaaagcagggactttgatctgggtctcagcactttgtccaccatggtgtccactggttgactcaggtgattcacctgggtaacaaggcttcctgaaggccacctgctggtaaatgtcattgccagttcattgaccgggagcccccatgtgtttctaccaagaccccgctcctctcttcgcatacagtaatctgttgtatacactttgtacctcacccacaagcgtgtgaaaagccttagctgttctggtgccaggactaatgggagctgcttacagtctatgaggacaatcagacttggccgcctgccttctttccatataatttttaataagccagtaatatctctccaagcactacagacctctggcttggaccaggaaacctggaactgtttaagagaacattaatttcctttgagctaggattacaggccatctaaaacttcttaatgaatggccacactgcctttttgaagcatttgtgtatttgccaacacagactcgaaggttgcattagatattgggagttgtcttttctggaagttagggtcttctagaagctgacgggcgatggaggcctgatgctctgccatttctttggtgagacctctggactgcttcgttcatagtcctctttcccacatatgctcccctgatgtcttactcttttattttatgggtttttggtaactgaaacattttaagactcaattccgccactttgttgaagataaaatcaagttcaaaccctgctttattttatttttcttttttttggacggaactagtgaggaaactgtgtgtgcaaaccccagaaaacccacttgagacctgatgctaattggctggatgatgttcaataggacacggctccactgagcctcaatttcctgatgagggttaaactgatgattcttaaccaggtctgacattctgtaaattaagcatacttgcttctgatttcacagtttccatgggatcagaggattgaaatgtcaaggaacctcccttgatgtccccctaagactctgaattgaactgtgatgaggacccttttgagaatctttcagtgatccccttctctaggaaggaagggtgaagtatgctttgtaagagagattgtctatttgtcttttatctcctgatttcaaacacagtggttccgctaagctgcatcttttttgttctttctgctgtgaaaataattttgtcggaaaatgtaaccagtgcaattatactgaaatttcatatgaaatgttaataaaatggatgtgtgaccaataaaatacttgatgccaaatt

SEQ ID NO: 5023 - protein, 43 aa, Homo sapiens
MNVHPRNGREESQKKTRSLMAEELPYLPLDLLFLIIFYARPGM

SEQ ID NO: 5024 - DNA, 580 bp, Homo sapiens
cagatgggagttctaaccccagccctgccacttattcccaggtgacactgagtggaaattaggccaaaataaatactactttctgcttaaaaaaatgcagtgatgtccaaagagaagggaggaggaaggatgaaaggaaagacagaggaggaaggaagagaagaaagaagagtggccggcacaagggcttggagatccctgaagctgttttcctttctcctcacccccacagggagggatccacatcgttgtggggtttttgttgttgttgtttttgtttttgtttttttgcctcccttcatcaaagcattcattgtagtgtatggtaattgtctctgaatgtaacagcctctcttccctgaggcctgggtctgcttgtttcataccatcttctccttaacacacagtgcttggtaaacaatacctattaataaacatttgttgaatgaatgaatgagtgaatgaacgaatactgcactctttcgacttggttagagacatgtcttgtaggctggcatgtacttcacacagcactcttaggtagagtttgtatatgttattccattgaagggaaaaggaa

SEQ ID NO: 5025 - protein, 78 aa, Homo sapiens
MSKEKGGGRMKGKTEEEGREERRVAGTRAWRSLKLFSFLLTPTGRDPHRCGVFVVVVFVFVFLPPFIKAFIVVYGNCL

SEQ ID NO: 5026 - DNA, 2341 bp, Homo sapiens
aaattttgcattcggctgccttagcactctgcgtcctcgcaccgaccctggggtcctgtttgtccggagacagcgtggcaccaacccagctgtgtgtgctttggagctggatactcctaaacacgtttgggtttgaactccagctctgatcctgccagcgaggagccttagagcaagtgacttaaccttctgggcctcagtttccctcatctgaaaatgggcgtgatcaagtcacctcccagggatattttcgaggatgagaggggcctatgtgacaacttccctggcatccatacctccacagcccagagtggggtctccgggatgtgagctgtacccaggcctaacttacgtccggactgaccagcacgccttcagaaagactctcaggtttacagtacacgagagtgcacagctctccaagacattccaagcaatgttacttcatcgacttatggaaatttgcctttctcataatgaggaaactgaggcacagagtggccaagtgactttttcaatatcatagggctggagaatggtgactagttttaatggccagcaaaagcaggaacaaaagctaccatctgcttggaagcgtcgttacttttgaacagaaactctggtgtctggcagacagcaatgaattcatctacttttgcataggagtacggttatcttgccctttgactgtgcccttgtaggccagcagaagttctgagattcaaggtggatgaagggattgaaccatgacctggagtggaaaatgcatccttggggctaagtatgtcctgtgtgccccgggcctgggctccacgtggccctcactgccttctaacaatcattgctggctatgtgtgaagcgccttgtgctaggtactgtcctgtgtgaaatcagtggcatgctgggaaatgtctgacaaacagcccttggagatagaactcccatccacagtatttctcctccatggtgtaaataatcccacttcccaccatggtggatctcaagctatcaatatgagattattgacagggaattgggaggggttgcacacaactgggtctcctgtgtggctccagtgcactgattcttaagaactcacagcaccctgattgggggacagcacttttattatgccagttttatagattagagcattaactcatggagaggttaagacaagcacttcccaagatcacctgtcaagtaaattctgatgctgaacccttgtctccaggaacccagatgaagatgctgccctctgagcaatggcctgtgtccagctcctctcttcctgatcttctcagggccaagtctaccccgagttaaactctactctccttaagggcaagaatcccagcacaaagcatgagcaccaggcacacactaagcaacaaggaaatatttggagaattgaattgaatgctttaatttcagttggatcaacaaccttgtccaaggtcacacagggaggcaataacagagcccatgactggaacccatgactggaactcatgattgttgactttggatatgaaccttaagtagcaccttcagtgtcaattctgagattactgtcacatccaagcatggacatggagagttctgttattcctgggagggggcagaggggccgtggctttgtactttgcattttcaatgcacctttgtcccctttctttggtcatgaaaagcatgacccagcaccttgtatgtgttggaggctgggcaagaccaagggcacctggagggtggaggtctgagatttatgggatacttgatcattttcaagattttttttcatttgctgtggactgaatgcttgtttcctctcaaaatatgtatatagaagccctaatcccccatggggtggtatttggagatggggcccatgggagctggttaaggttagatgatgtcatggagatggaacccccatgatagattttgctcttgcaaaaggagaaaaagacaggataggtttctctccactgaatgaggatgcaacaagaagatagtctgcaaaccagaagagcactctcagcagacaccaaatctgctagtaccctgatcttggacttcccagtgtccagagctgtgagaaatgttcattgtctaagccacccagtctatggtattttgttatagcgtccaaatagactaagacacatgatgtaagtgtttcctaaagtagcattgcactgggggcaaccagtgtaacatggttggtgatatgtgaatgaaccttttaaaatgttaatacttttgcatttattttaatatgtgttaaaaatatttctggtgtattatatcagaaatagttttcactgcaaacaacaagac

SEQ ID NO: 5027 - protein, 89 aa, Homo sapiens
MRGAYVTTSLASIPPQPRVGSPGCELYPGLTYVRTDQHAFRKTLRFTVHESAQLSKTFQAMLLHRLMEICLSHNEETEAQSGQVTFSIS

SEQ ID NO: 5028 - DNA, 526 bp, Homo sapiens
acgtgaatgggccacaacatctaaaggaactggggcacctgggagttttcatttccattatttcacttggagccagtggttttcagagcggggggccagtggcaccacagagctgcctttgaatgaccttggatgagcgactattcacccccattatattctccatctgtcagatggagactgtgatgtaaaccccatgtggctgggaggactaaccaaggtccacatctccagggccgctcttagctcagagtctttctgagggaaactgcctggcaccagtccgtgttgaaggtgtcagcctattggaacctgccctctcagataggtaagatccaaagatgtcagccgcaagcttccagtccctggatgagaacttagagtagggccaagagagctctctcagggataaaaatagagttgctgtgaagatgaagtaaatgaagacatgctgagaactcagaacaacgcttggcaacagtaattgtttaatacgtgctattattaacaagtaatagtctttccc

SEQ ID NO: 5029 - protein, 44 aa, Homo sapiens
REWATTSKGTGAPGSFHFHYFTWSQWFSERGASGTTELPLNDLG

SEQ ID NO: 5030 - DNA, 5889 bp, Homo sapiens
gcggccgctcctgctgctgctgctgctgctgggcgcctgcggggcggcggggcgctcccctgagcccgggcgcctgggtcctcacgcccaactgacccgggtgccgcggagccctcccgcggggcgcgcggagcccggtggcggcgaggaccggcaggcgcgcggcacggagccaggcgccccgggtccgagtcccggtcccgctcctggtcccggcgaggacggcgcccccgccgcgggctaccggcgctgggagcgggcggcgccgctggccggagtggcttcgcgggcgcaggtctcgctcatcagcacgtcgttcgtgctcaagggggacgcgacgcacaaccaggcgatggtgcactggacgggcgagaacagcagcgtggtcatcagatttcgggacgtcctacaccaagctcaccctccagcctggtgtcaccaccgtcatcgacaatttctacatctgcccgaccaacaagaggaaggtcatccttgtcagctcctcactcagtgaccgggaccagagcctattcctcagcgcagacgaaggcgccacctttcagaagcagcccattcccttcttcgtggaaactctgattttccaccctaaggaggaggacaaggtcctcgcctacacaaaggagagcaagctctacgtgtcatctgacttggggaaaaagtggacacttctgcaagagcgagtgaccaaagaccacgtgttctggtctgtgtctggggtggacgctgaccctgacttggtccacgtggaagcccaagacctcggtggagattttcggtacgtcacctgcgcaatccacaattgctccgagaagatgctgacagccccattcgcaggccccattgaccacgggtctctgaccgtgcaggacgattacatcttctttaaggcaacatcagcaaaccagacaaaatactacgtctcttatcgtcgaaatgaatttgtcctgatgaagctgccgaagtatgcattgccaaaggatctgcagatcatcagcacggacgagagtcaggtgttcgtggcggtgcaggagtggtaccagatggacacctacaacctgtaccagtcggacccacggggcgtgcgctacgcgctggtgctgcaggacgtgcgcagctcacggcaggcggaggagagcgtgctcatcgacatcctggaggtcagaggggtgaaaggagtcttcctggcaaaccaaaaaattgatgggaaagtgatgacgcttataacctacaacaagggccgcgactgggattacctgaggccacccagcatggacatgaatggaaaaccaaccaactgcaagcctccagactgccacctgcacctgcacctgcgctgggcagacaacccctacgtatcaggcaccgtgcacaccaaggacaccgccccaggcctcatcatgggtgcaggtaacctgggctcacagctggtggaatataaagaagaaatgtacatcacgtcagactgtggtcacacctggcggcaggtgtttgaggaagagcatcacatcctgtacctggaccacggcggcgtgatcgtggccatcaaagacacctccatccctttgaagatcctcaagttcagtgtggacgagggcctcacctggagcacgcacaacttcaccagcacctcggtgtttgtggacgggctgctgagtgagccaggggacgagacgctggtcatgacggtctttggccacatcagcttccgctccgattgggagctggtcaaggtggacttccggccctcattctccaggcagtgcggcgaggaggactacagctcctgggagctctccaacctgcagggcgaccgctgtatcatgggccagcagagaagtttccggaaaagaaagtccacgtcctggtgcatcaaggggaggagcttcacgtcggcgctcacgtcccgcgtgtgcgagtgccgggactcggacttcctgtgcgactacggatttgagcgctcctcctcctcagagtccagcaccaacaagtgctctgccaacttctggtttaacccattgtccccgcctgacgactgtgccctgggccagacctacaccagcagccttgggtaccggaaagtggtgtccaacgtgtgtgagggtggggtggacatgcagcagagtcaggtgcagctgcagtgccccctcacgccgccccggggcctgcaggtcagcattcaaggcgaggcggtggccgtgcggcctggagaggacgtcctgtttgtggtgcggcaggagcagggtgatgtcctgactaccaagtaccaggtagaccttggggacggcttcaaggccatgtacgtgaaccttacactgaccggggagcccatccggcaccgctacgagagccccggcatctaccgcgtgtccgtcagggcagagaacacggcaggccacgatgaggcggtgctctttgtccaggtcaactcccccctgcaggccctctacctggaggtggttcctgtcattggcctcaaccaggaggtgaacctcacagctgtgctgcttcccttgaaccctaacctcaccgtcttctactggtggatcggccacagcctgcagcccctcctttccctggataattctgtgacaacgcggttttcggacacgggcgacgtgcgtgtgacggtgcaggccgcctgtgggaactcggtgctgcaggactccagggtcctccgtgtgctggatcaatttcaagtcatgcctctgcagttttccaaggagctggatgcctacaaccccaacacccctgagtggagggaagacgtgggcctggtggtcacccggctgctctccaaggagaccagcgtccctcaggagcttctggtgactgtggtgaagccggggctgcccactttggccgatctgtacgtgctcctgccccctcccaggcccacaaggaagaggagcctctcgagtgataagaggctcgccgccatccagcaggtgctgaacgcacagaagatcagcttcctcctgcgaggcggagtccgggtcctggtggccctgcgggacacaggcacaggtgctgagcagctgggcggcggtggcggctactgggcggtagtggtgctgtttgtcatcgggctcttcgcagcgggagccttcatcctctacaagttcaaaaggaaacggccaggcaggaccgtgtacgcccaaatgcacaacgagaaggagcaggagatgaccagccctgtgagtcacagtgaggacgtccagggcgctgtccagggcaaccactcaggcgtggtcctgagcatcaactcccgagagatgcacagctacctggtgagctgatgccaccccagcatctgtcttttcacccacggagggcacagaaccaccagcaaagccggcggctggactggcgcccctcagagacctgcggaaagccccctccctgagtcgtcgccacaccaggcgacaggcaccaccccctctgataaatccaagcccgcccaggcccacggggggcccacgggaccccccgggactccccggacatggccctgcccctatgggacaccaggcctgactcaggcaggttctgccccccagaccccacacacggccgccccacgtgctgtcgctcagcccgaggcctgacttctctgggctgaggctggtcgtcctggagccctcccagtacctcgggctgcaagagctgcagacccgttcagacactgcgttgcgggctccttccccgcagaggccggggcctccctgactttgcttcttcactcccacctgtgcggccacccagtccctctgtgggagcccgggtgccaggccctcccaacaccacaccaccctccaggcccccctgccctccggctggaaactgcagctctgtaaatgcctctctaggtagctgctggcggtggtgggggtgtctcactctctgtctttatagccggcggtagccaccggggtggctctgtcagagttccgtactcgggagcccctttccctgagtgcccagggtgtctcctctgcccagaggggcagcagctctccctggttctccccagggcagacggggtagggcgggctcaggacccagtgcccatggttcctcactcctaccagcaagcagcaccatcccgcaggcttctcccacctgatggctgttctcccaccgggtctgggctctggaaggagccagatgcccccagaaaggtgggtggtggagacggcaccagatgtaccagttttctgcagttccttataggcgaagggaaccgggtggaaaccaagctgggagaggctgaggatggcagggctggaagggccatcagcgtgaccctcattttcaagaaggggaaactgaggcccagggaggagagtaactgaaggtcacagcacggtcacagcagaggtggccgaacccagccctctgcgcgccagtgctgtgcggtctccacacccttacggtttcctagaatcagggatgttagtgtaagtctataggaatataggggggtgggggggtcaccttttgccttgaaatgggaagtcagtagccccttcctcctcctccctcctccccctcctctctggcagggatctcagatgaccgtggcctccctctcagagggggagaacgccagagccctggctggtgatgtgctggctgggggtgaatcccaatgagggtccctctcagagcgggagaacgccagagccctggatggtgatgcgctggctgggggtgaatcccaatgagggtccctctcagaaagggagaacgccagagccctggctggtgacatgctggctgggggtgaatccgaatgacagtgcagacgttctcccatccaccatgtctgagcttgggggaattgcctcatttcccctggaaaagaaacatggtccattagaggggaaagcccaggggtgaatcttcacgccccaaacagtgcccggtggggaggaggcacccgctccttgttgagtaaaaccacccatggagactggaacctcatctccctgggtcggggggtgttcaaggccacaggacaaggggagcaccctgggccacacaggcgtggaggtgtccccaccccttccacctgtcccccagacccaaagctctctccccaccctacctgcccacctggggctcctgtgccccctccccactccagaggccaccctacaagttgtcctcaaggtcatcctggagatgggatccaggacgtggggccatgactctctgggaccttgccacagcccccattcccctgcttgcagtctgcaaggacacctttgcagggattcttgtcctgctggccaccccacccacacctgtccctggccagcaggccgcctgcaagcgtcaggcacacagggacagacatggcgagcacagtgcaggcccggggcccacgggcaacatggaaccctgggaactgccctcccccttagctcacagtgcctgcggtagccactctaggtcgttggccttccttgaccactccatttaattctctctgctgtttgggttgggtttttccccttagttatctgtgggtttcctgtattttatgttaatatttctattaagaacatgttgggcatgtggacccaagcacctgggaaggaggtggcatctgagacagcctgatacgttcccgtctgtgcacccatggagatccaggcgtgggcccgtgtctgtccctggttgtaaattcgagggtctgcatatctgatgttcaggtagacctgggcgcctgggaacgaggccatcagctgccatgcacataacaaagagacaatgcattccttcttatttttcctttttaaaaatcgatgaatcatttgtgatgcttttaacaaagattaaatgaatttgatcagcttttgcctt

SEQ ID NO: 5031 - protein, 827 aa, Homo sapiens
MLTAPFAGPIDHGSLTVQDDYIFFKATSANQTKYYVSYRRNEFVLMKLPKYALPKDLQIISTDESQVFVAVQEWYQMDTYNLYQSDPRGVRYALVLQDVRSSRQAEESVLIDILEVRGVKGVFLANQKIDGKVMTLITYNKGRDWDYLRPPSMDMNGKPTNCKPPDCHLHLHLRWADNPYVSGTVHTKDTAPGLIMGAGNLGSQLVEYKEEMYITSDCGHTWRQVFEEEHHILYLDHGGVIVAIKDTSIPLKILKFSVDEGLTWSTHNFTSTSVFVDGLLSEPGDETLVMTVFGHISFRSDWELVKVDFRPSFSRQCGEEDYSSWELSNLQGDRCIMGQQRSFRKRKSTSWCIKGRSFTSALTSRVCECRDSDFLCDYGFERSSSSESSTNKCSANFWFNPLSPPDDCALGQTYTSSLGYRKVVSNVCEGGVDMQQSQVQLQCPLTPPRGLQVSIQGEAVAVRPGEDVLFVVRQEQGDVLTTKYQVDLGDGFKAMYVNLTLTGEPIRHRYESPGIYRVSVRAENTAGHDEAVLFVQVNSPLQALYLEVVPVIGLNQEVNLTAVLLPLNPNLTVFYWWIGHSLQPLLSLDNSVTTRFSDTGDVRVTVQAACGNSVLQDSRVLRVLDQFQVMPLQFSKELDAYNPNTPEWREDVGLVVTRLLSKETSVPQELLVTVVKPGLPTLADLYVLLPPPRPTRKRSLSSDKRLAAIQQVLNAQKISFLLRGGVRVLVALRDTGTGAEQLGGGGGYWAVVVLFVIGLFAAGAFILYKFKRKRPGRTVYAQMHNEKEQEMTSPVSHSEDVQGAVQGNHSGVVLSINSREMHSYLVS

SEQ ID NO: 5032 - DNA, 1984 bp, Homo sapiens
agaagaaaaagaagaagaagccagaccaggaaagtgaaaggaaatggatatcgctgctggaggcaacgactaatttaagcagagtaggagaaaaactctttttttttttcctttgtgccagttccttttacacgacttcagaacattctatgacaacccagcgtgcaacttggcactgtcagaagagtcctgggaaagaaaggaaatgcgaaaatgagaaaaccaatattggactgtactggacaggacatatgtactatatcagattctccctggccacatgcatagagtctctgtcttttcccaccactttaaagacattgataaaatgccataccacagggcatgagatctggcatcccaagttgccaccagcaaacctagaagtgtgggttccaactctatgggtatatctcagtcatttagcatctgctctatctttgaggctgagtttccagaagacctgattcaaccagaagcaaaagacagtagccaagaagatggcatagcataagaatcttggaaattgataaaaacatcccagagatatccaacaaaattagtaactatgtgaagagattctgtaatattgggtctattgggctctgtgggaaggtattccctttggaaatgactgaaatggaaattttgaaccactttcaatgatacaagtttggggttaacatggagatggtgcttcacagaagacaccacatttcaataattgtattcttatcgaattgtttaaaattggtcagtgactaatattaagcctctaagaacaaaattcattaggtttatttagcctgtttttgcattactgctacaaaatccaatagtttaaatagctaactgaatacttttgatgttaaagagcaaaatttcatgaagattttagatcaagagagctaccactgagaaaaaacaatgcagatttgtggtaaagtcccatgaatttgttgaactgccaaggcttctgatcatcactgctgaagaacttctaatggtgacttccatctcagctttctcattgccaactattaagaatgtatggattatccagatgttgcaacacagttgtgtttttggcttcaccactccctctgggctgtgattctgttttttttttcttttattgttgatgttctttgtttttaatatgagaaagatttgtgtattatacttcagttttagtttccttaatcacagactagacaaaagaaaattggcttggtttcctattaggaaaccacttagaagccattatcagaatcgtagaccatcactgtgaactatatccaggtgttgtcatgaaagtatgacatcctagagtggaaaagcaacctgggtttccgagactgttttactcttttatctggaatgttgttttagctgctatggctccaacagggtgaacatagcattttatttaatctaaatatctttctgctttttttttctaagttgcaaaaagtcaatgaccacatttcatctctagcctctcgtgaggtttaaattacacaaggaagaaatatttacaatgtcaaatgctgaagattgtttggagtcagaagtgattgttcagaatctgtcttaatgacaagtcagaaattagacaaagagatgaaatgctaagcccccaatgtgttctgaaaagttaaataaccatcttacatcagttggtacgtttttgtaagagtccaggatgtaaaagtgataaataaattaatgaaaagcacttttaaaaatcaacaaaagacatggcaggaaatggaagaaaagagaagcaagggatgcattctaatagatattaagaacaagccaaagtgcagtatttgctctagggttttactgttcattgtgtcaagactcacagattttagatattttttttaattgggaaagtaaatgaggcaggtagataagtagaaaaagttgtgtgaaactcatcagtactgaaaataaatagttgtacttctctgtg

SEQ ID NO: 5033 - protein, 105 aa, Homo sapiens; identical to SEQ ID NO: 530

SEQ ID NO: 5034 - DNA, 2325 bp, Homo sapiens; identical to SEQ ID NO: 529

SEQ ID NO: 5035 - protein, 105 aa, Homo sapiens; identical to SEQ ID NO: 530

SEQ ID NO: 5036 - DNA, 455 bp, Homo sapiens
ctgcagctatcattttaaactttctaaggaattatttcctgacttcattatgcggcagtagagacgcagcttcaccatgttgaccaggccagccttggactcctgacctcacgtgatctggccaccttggcctcccaaagtgctgggattacagatatgcttaaggtgggaagagaagctggaaacctagaattatttcaactcaatcaccagccattcactgactttttaccatgtataaatcctgatcaacctcaaaaagagtaatattaagtttgattcttacactttttaaaaaaaatatatccaagatacaactatcaaaagatggcccagaatcaactgccagattaactatatggcccatagataatgatagaggagggaacttaaaaaactactttcttgtgcaaaaattatacctgtcacaaaataaagataaagtggagcactag

SEQ ID NO: 5037 - protein, 36 aa, Homo sapiens
MLKVGREAGNLELFQLNHQPFTDFLPCINPDQPQKE

SEQ ID NO: 5038 - DNA, 818 bp, Homo sapiens
gcgggcgcacacgaatgcgggcgcacacgaatgcgggcgcacacgaatgcgggcgcacccttgagtcccctccacaaccgcggtttgatcccagcggtccagtcggccggtgctgcccatccgtcccgccccctagacgcacgtccgctcgcccggcgcccgagccagtccgcgcgcacgccgtctgcgccccgaaagccccgccccaaggcgcgcccgcccaccgctctccacgtgctcgctggagggcggtgcgaggggccgagccgacaagatgttcttgctgcctcttccggctgcggggcgagtagtcgtccgacgtctggccgtgagacgtttcgggagccggagtctctccaccgcagacatgacgaagggccttgttttaggaatctattccaaagaaaaagaagatgatgtgccacagttcacaagtgcaggagagaattttgataaattgttagctggaaagctgagagagactttgaacatatctggaccacctctgaaggcagggaagactcgaaccttttatggtctgcatcaggacttccccagcgtggtgctagttggcctcggcaaaaaggcagctggaatcgacgaacaggaaaactggcatgaaggcaaagaaaacatcagagctgctgttgcagcggggtgcaggcagattcaagacctggagctctcgtctgtggaggtggatccctgtggagacgctcaggctgctgcggagggagcggtgcttggtctctatgaatacgatgacctaaagcaaaaaaagaagatggctgtgtcggcaaagctctatggaagtgggg

SEQ ID NO: 5039 - protein, 180 aa, Homo sapiens
MFLLPLPAAGRVVVRRLAVRRFGSRSLSTADMTKGLVLGIYSKEKEDDVPQFTSAGENFDKLLAGKLRETLNISGPPLKAGKTRTFYGLHQDFPSVVLVGLGKKAAGIDEQENWHEGKENIRAAVAAGCRQIQDLELSSVEVDPCGDAQAAAEGAVLGLYEYDDLKQKKKMAVSAKLYGS

SEQ ID NO: 5040 - DNA, 2220 bp, Homo sapiens
gcgggcgcacacgaatgcgggcgcacacgaatgcgggcgcacacgaatgcgggcgcacccttgagtcccctccacaaccgcggtttgatcccagcggtccagtcggccggtgctgcccatccgtcccgccccctagacgcacgtccgctcgcccggcgcccgagccagtccgcgcgcacgccgtctgcgccccgaaagccccgccccaaggcgcgcccgcccaccgctctccacgtgctcgctggagggcggtgcgaggggccgagccgacaagatgttcttgctgcctcttccggctgcggggcgagtagtcgtccgacgtctggccgtgagacgtttcgggagccggagtctctccaccgcagacatgacgaagggccttgttttaggaatctattccaaagaaaaagaagatgatgtgccacagttcacaagtgcaggagagaattttgataaattgttagctggaaagctgagagagactttgaacatatctggaccacctctgaaggcagggaagactcgaaccttttatggtctgcatcaggacttccccagcgtggtgctagttggcctcggcaaaaaggcagctggaatcgacgaacaggaaaactggcatgaaggcaaagaaaacatcagagctgctgttgcagcggggtgcaggcagattcaagacctggagctctcgtctgtggaggtggatccctgtggagacgctcaggctgctgcggagggagcggtgcttggtctctatgaatacgatgacctaaagcaaaaaaagaagatggctgtgtcggcaaagctctatggaagtggggatcaggaggcctggcagaaaggagtcctgtttgcttctgggcagaacttggcacgccaattgatggagacgccagccaatgagatgacgccaaccagatttgctgaaattattgagaagaatctcaaaagtgctagtagtaaaaccgaggtccatatcagacccaagtcttggattgaggaacaggcaatgggatcattcctcagtgtggccaaaggatctgacgagcccccagtcttcttggaaattcactacaaaggcagccccaatgcaaacgaaccacccctggtgtttgttgggaaaggaattacctttgacagtggtggtatctccatcaaggcttctgcaaatatggacctcatgagggctgacatgggaggagctgcaactatatgctcagccatcgtgtctgctgcaaagcttaatttgcccattaatattataggtctggcccctctttgtgaaaatatgcccagcggcaaggccaacaagccgggggatgttgttagagccaaaaacgggaagaccatccaggttgataacactgatgctgaggggaggctcatactggctgatgcgctctgttacgcacacacgtttaacccgaaggtcatcctcaatgccgccaccttaacaggtgccatggatgtagctttgggatcaggtgccactggggtctttaccaattcatcctggctctggaacaaactcttcgaggccagcattgaaacaggggaccgtgtctggaggatgcctctcttcgaacattatacaagacaggttgtagattgccagcttgctgatgttaacaacattggaaaatacagatctgcaggagcatgtacagctgcagcattcctgaaagaattcgtaactcatcctaagtgggcacatttagacatagcaggcgtgatgaccaacaaagatgaagttccctatctacggaaaggcatgactgggaggcccacaaggactctcattgagttcttacttcgtttcagtcaagacaatgcttagttcagatactcaaaaatgtcttcactctgtcttaaattggacagttgaacttaaaaggtttttgaataaatggatgaaaatcttttaacggagacaaaggatggtatttaaaaatgtagaacacaatgaaatttgtatgccttgatttttttttcatttcacacaaagatttataaaggtaaagttaatatcttacttgataaggatttttaagatactctataaatgattaaaatttttagaacttcctaatcacttttcagagtatatgtttttcattgagaagcaaaattgtaactcagatttgtgatgctaggaacatgagcaaactgaaaattactatgcacttgtcagaaacaataaatgcaacttgttgtgctctctgg

SEQ ID NO: 5041 - protein, 519 aa, Homo sapiens; identical to SEQ ID NO: 535

SEQ ID NO: 5042 - DNA, 1081 bp, Homo sapiens
cgagccgacaagatgttcttgctgcctcttccggctgcggggcgagtagtcgtccgacgtctggccgtgagacgtttcgggagccggagtctctccaccgcagacatgacgaagggccttgttttaggaatctattccaaagaaaaagaagatgatgtgccacagttcacaagtgcaggagagaattttgataaattgttagctggaaagctgagagagactttgaacatatctggaccacctctgaaggcagggaagactcgaaccttttatggtctgcatcaggacttccccagcgtggtgctagttggcctcggcaaaaaggcagctggaatcgacgaacaggaaaactggcatgaaggcaaagaaaacatcagagctgctgttgcaggttatttcactttttaagtttaaagaatcctgaggatccactctttttgatgacctctctttcccctttttgtccttttaccagttgccaccccttaccacgttcacacagaaataattcatcttaacaaaaattcagttcctcttgctgaatatggttggccttatgataaatacagaaggttagctaatggaattttatttttaatatatctatatctcatttgggtgttttactaccatttgttcgctcttgtcatattagagctgtgttttcccagaacctgtagtgtatagattttttgtaatgccaccctgatgcctcccgacttttaaataacacagagtcatcagattttacaaataaagagactaaggaagcaaagcgtggcgtgcttgtttatcactagccaaaggtgtgtgcctgtcccagtatgtcccaggcaggggccattgagtcacttagcattaagcagcaggacgggcctaataccgtcaagagccatgattaaagatgctttgtaaaacatttctgaaacagtgataattggcttgattactatttaggcctgtgtatattataaatgctcattaactttacttcaaatatcattgaagtggttatttaataacttttgagagtttttgctgacctgatcttaataaaatgctgtgttaataatggactttg

SEQ ID NO: 5043 - protein, 131 aa, Homo sapiens
MFLLPLPAAGRVVVRRLAVRRFGSRSLSTADMTKGLVLGIYSKEKEDDVPQFTSAGENFDKLLAGKLRETLNISGPPLKAGKTRTFYGLHQDFPSVVLVGLGKKAAGIDEQENWHEGKENIRAAVAGYFTF

SEQ ID NO: 5044 - DNA, 1961 bp, Homo sapiens
gggctcaggcctcccaccctagcctcctcaatagctgggattacaggtgtgtgccaccatgcccagctaatttcttaattttttgtagagatgggtctcccgctgtgttgcccaggctggtcttacactcctgggctgaagcaatctcaccttttcctcctaaagtgctgagattacagccatgaccccgccatgcggcctggtatttagaatattcacagagttgtgctaccatgaccacaatcaattttagaacattttcataacccccaaaggaaaccctatacccattagcagttactccctgtttcccattccctaaagccagcaggggatggacactttggttgtttttaccttttatttctttttggtatatgcctaggagttgaattgctgaatcaaatcgtagttctgtttaactttttgaggaacttcacatggcttattttggtgaattattcctatcatcacttttggacacaaatgaagaacacagcatgcctaactagacatgggatgagaatttctgcctcatagattcccttagcctagactccagcattggtgctcccaggtgtccctgaatgctgtgtcagtgggaggctgttggagctgaaagcctgctcgtccagttccgtcgctctcttgggatctccagccctttaagcaaaccaactctgagcatttgggaatttataattaaaacaaatgaacagacccaagtcttggattgaggaacaggcaatgggatcattcctcagtgtggccaaaggatctgacgagcccccagtcttcttggaaattcactacaaaggcagccccaatgcaaacgaaccacccctggtgtttgttgggaaaggaattacctttgacagtggtggtatctccatcaaggcttctgcaaatatggacctcatgagggctgacatgggaggagctgcaactatatgctcagccatcgtgtctgctgcaaagcttaatttgcccattaatattataggtctggcccctctttgtgaaaatatgcccagcggcaaggccaacaagccgggggatgttgttagagccaaaaacgggaagaccatccaggttgataacactgatgctgaggggaggctcatactggctgatgcgctctgttacgcacacacgtttaacccgaaggtcatcctcaatgccgccaccttaacaggtgccatggatgtagctttgggatcaggtgccactggggtctttaccaattcatcctggctctggaacaaactcttcgaggccagcattgaaacaggggaccgtgtctggaggatgcctctcttcgaacattatacaagacaggttgtagattgccagcttgctgatgttaacaacattggaaaatacagatctgcaggagcatgtacagctgcagcattcctgaaagaattcgtaactcatcctaagtgggcacatttagacatagcaggcgtgatgaccaacaaagatgaagttccctatctacggaaaggcatgactgggaggcccacaaggactctcattgagttcttacttcgtttcagtcaagacaatgcttagttcagatactcaaaaatgtcttcactctgtcttaaattggacagttgaacttaaaaggtttttgaataaatggatgaaaatcttttaacggagacaaaggatggtatttaaaaatgtagaacacaatgaaatttgtatgccttgatttttttttcatttcacacaaagatttataaaggtaaagttaatatcttacttgataaggatttttaagatactctataaatgattaaaatttttagaacttcctaatcacttttcagagtatatgtttttcattgagaagcaaaattgtaactcagatttgtgatgctaggaacatgagcaaactgaaaattactatgcacttgtcagaaacaataaatgcaacttgttgtgctctctgg

SEQ ID NO: 5045 - protein, 287 aa, Homo sapiens [sequence omitted]

SEQ ID NO: 5046 - DNA, 447 bp, Homo sapiens
ctaatagtctacagtctatataattaatttcctctctccaatctactcagatatttctacaattttaatttaaagatgaagttagaaggccgggtgcggtggctcatgcctgtaatcccagcactttggaaggctgaggtgagagaattgcttcagctcaggagtttgaaaccagcctgggcaaaaaagtgaaactgtctctaaaacaaataaggctaggagcacaaaagggctttgtattgatttctggccacggtaactaggccaagaaagaaattctatcctcctgcagaccagcaacaaccacagccaaggaatgctcctccggcatttgccatccacttgttaaaatgattaaactaggactgcatcatggtgggatgaccagcacacttcaaagggaaaaaaattttaaatcggaagatgaaacagttttaaaaatcactt

SEQ ID NO: 5047 - protein, 38 aa, Homo sapiens
MKLEGRVRWLMPVIPALWKAEVRELLQLRSLKPAWAKK

SEQ ID NO: 5048 - DNA, 750 bp, Homo sapiens
cacgtgacaggaccgagcgatgggaggattctggtgcaccccggaaggaggatttttaattcttctgttttcttgtctatcgcaaaacagagtttacatgtattttccttttttcttagcttaagaattgaagactttggccggattagacctggttgtgtggagaggagaattaataactacagtggagcgagccctcctgcgagagtcaggatactactatgctagtcccgactctgccccaaatgcctggagagactttggctaagtcactttttctttccgcgggctgtttaccgttggtaaaaggagagggtcacccactcactccacaaacatttgttgagtcattggttatagcgggaacaagacaggcaaagttcttcctgaattctggtcggagatggataacggaaacaactttgttgagggtctcgttctgtcgccctggccggagtgcagtgtcatgatcagggctcgacctcccgggctcaaacaatccccctacttcagccacccaagtagctaggaccacaggctaggagcacaaaagggctttgtattgatttctggccacggtaactaggccaagaaagaaattctatcctcctgcagaccagcaacaaccacagccaaggaatgctcctccggcatttgccatccacttgttaaaatgattaaactaggactgcatcatggtgggatgaccagcacacttcaaagggaaaaaaattttaaatcggaagatga

SEQ ID NO: 5049 - protein, 82 aa, Homo sapiens
MLVPTLPQMPGETLAKSLFLSAGCLPLVKGEGHPLTPQTFVESLVIAGTRQAKFFLNSGRRWITETTLLRVSFCRPGRSAVS

SEQ ID NO: 5050 - DNA, 1080 bp, Homo sapiens
gatctctcttgcgccattccaaacatggcggctccactagggggtatgttttctgggcagccacccggtccccctcaggccccgccgggccttccgggccaagcttcgcttcttcaggcagctccaggcgctcctagaccttccagcagtactttggtggacgagttggagtcatctttcgaggcttgctttgcatctctggtgagtcaggactatgtcaatggcaccgatcaggaagaaattcgaaccggtgttgatcagtgtatccagaagtttctggatattgcaagacagacagaatgttttttcttacaaaaaagattgcagttatctgtccagaaaccagagcaagttatcaaagaggatgtgtcagaactaaggaatgaattacagcggaaagatgcactagtccagaagcacttgacaaagctgaggcattggcagcaggtgctggaggacatcaacgtgcagcacaaaaagcccgccgacatccctcagggctccttggcctacctggagcaggcatctgccaacatccctgcacctctgaagccaacgtgagcaaagggcagaggcagttggcctatgagtgggctgatgcgtgaggttggccacacattccttcctgtggacttgacattttggaagaactctttgccagataatgagttcattttagttttatgctcccattgaaaaattttccactatttttataagctgttaatttcttgagtactttataacatgtctgtagcttggataaaccaagtaagtattttttttttgtctttagcaaagtttagactgtgaatatgatgacacagattcttttttatggtggctttgcttgttttaaatttttgcatgacttttcatctttttatgtgtgtttcctgtagtttgatccgaaggaaaagagtatagtagcctgagaatcaggagatgggagttttagtcgtaggccttatgataattaccccgcggtggtgtgtagaaaagtatgtaaatttgctctgttttaagactttgaactacctcaagaagaggaatctaatacaatatttgtaatgtttccag

SEQ ID NO: 5051 - protein, 178 aa, Homo sapiens; identical to SEQ ID NO: 537

SEQ ID NO: 5052 - DNA, 1300 bp, Homo sapiens
gatctctcttgcgccattccaaacatggcggctccactagggggtatgttttctgggcagccacccggtccccctcaggccccgccgggccttccgggccaagcttcgcttcttcaggcagctccaggcgctcctagaccttccagcagtactttggtggacgagttggagtcatctttcgaggcttgctttgcatctctggtgagtcaggactatgtcaatggcaccgatcaggaagaaattcgaaccggtgttgatcagtgtatccagaagtttctggatattgcaagacagacagaatgttttttcttacaaaaaagattgcagttatctgtccagaaaccagagcaagttatcaaagaggatgtgtcagaactaaggaatgaattacagcggaaagatgcactagtccagaagcacttgacaaagctgaggcattggcagcaggtgctggaggacatcaacgtgcagcacaaaaagcccgccgacatccctcagggctccttggcctacctggagcaggcatctgccaacatccctgcacctctgaagccaacgtgagcaaagggcagaggcagttggcctatgagtgggctgatgcgtgaggttggccacacattccttcctgtggacttgacattttggaagaactctttgccagataatgagttcattttagttttatgctcccattgaaaaattttccactatttttataagctgttaatttcttgagtactttataacatgtctgtagcttggataaaccaagtaagtattttttttttgtctttagcaaagtttagactgtgaatatgatgacacagattcttttttatggtggctttgcttgttttaaatttttgcatgacttttcatctttttatgtgtgtttcctgtagtttgatccgaaggaaaagagtatagtagcctgagaatcaggagatgggagttttagtcgtaggccttatgataattaccccgcggtggtgtgtagaaaagtatgtaaatttgctctgttttaagactttgaactacctcaagaagaggaatctaatacaatatttgtaatgtttccagagctctcagaatgaggatttttttgtaaataggtcagaagacgatggaactgtcctgggttagtatagtaatcttacagtaggatccttaggttgatgctgacttctgtttggggtatgtttatattttatgtggtgtttactttttttttttgacatagaaggatatagtgggagcagtgatacgctaacattcattacattctgcagtaatgaatctg

SEQ ID NO: 5053 - protein, 178 aa, Homo sapiens; identical to SEQ ID NO: 537

SEQ ID NO: 5054 - DNA, 2034 bp, Homo sapiens
gatctctcttgcgccattccaaacatggcggctccactagggggtatgttttctgggcagccacccggtccccctcaggccccgccgggccttccgggccaagcttcgcttcttcaggcagctccaggcgctcctagaccttccagcagtactttggtggacgagttggagtcatctttcgaggcttgctttgcatctctggtgagtcaggactatgtcaatggcaccgatcaggaagaaattcgaaccggtgttgatcagtgtatccagaagtttctggatattgcaagacagacagaatgttttttcttacaaaaaagattgcagttatctgtccagaaaccagagcaagttatcaaagaggatgtgtcagaactaaggaatgaattacagcggaaagatgcactagtccagaagcacttgacaaagctgaggcattggcagcaggtgctggaggacatcaacgtgcagcacaaaaagcccgccgacatccctcagggctccttggcctacctggagcaggcatctgccaacatccctgcacctctgaagccaacgtgagcaaagggcagaggcagttggcctatgagtgggctgatgcgtgaggttggccacacattccttcctgtggacttgacattttggaagaactctttgccagataatgagttcattttagttttatgctcccattgaaaaattttccactatttttataagctgttaatttcttgagtactttataacatgtctgtagcttggataaaccaagtaagtattttttttttgtctttagcaaagtttagactgtgaatatgatgacacagattcttttttatggtggctttgcttgttttaaatttttgcatgacttttcatctttttatgtgtgtttcctgtagtttgatccgaaggaaaagagtatagtagcctgagaatcaggagatgggagttttagtcgtaggccttatgataattaccccgcggtggtgtgtagaaaagtatgtaaatttgctctgttttaagactttgaactacctcaagaagaggaatctaatacaatatttgtaatgtttccagagctctcagaatgaggatttttttgtaaataggtcagaagacgatggaactgtcctgggttagtatagtaatcttacagtaggatccttaggttgatgctgacttctgtttggggtatgtttatattttatgtggtgtttactttttttttttgacatagaaggatatagtgggagcagtgatacgctaacattcattacattctgcagtaatgaatctgtttaatgggtcagtcactgttttcagtagcatgacagtggggtcataggtgagctgtgaggggctaaatcttgctctgattgtctctttctgttttgagttttgtttgcgtgtatcatttttgttctacattttgggaggggaaacattttccgttaaggaaggttgttgccagtggatttgactccaagggactagagtgtcgtggtgggggtggggaggggctgcagggtgatcattggctactgagcctccacagagagcatgtggtgccctgcctttgggagggtattttgctctcgttagttttgtgggcagcctcagattccctgttgagttgctgttaagaaatggagatttctggctctcattgggtaaggttttctgagttttatatcttattagatcacatccctttacccagaacaaatgcttcactgtcttctgattggcagtactcctgtggctttgtgccttgactcattttgttgtcttcagccttgaaggccccttcccacatggactgacatccactcatgtgcctgatccctgaagcctcccagcacccattcagttgcatccccagggcacaggactttgatctcttctgttgccctcgctaggttctccctggtgggttagtgctttgtatctgtctctctgcccctcactaattctacacccatgagaattagacattattctccttaaatatataaggaccatataatctgt

SEQ ID NO: 5055 - protein, 178 aa, Homo sapiens; identical to SEQ ID NO: 537

SEQ ID NO: 5056 - DNA, 2391 bp, Homo sapiens
gatctctcttgcgccattccaaacatggcggctccactagggggtatgttttctgggcagccacccggtccccctcaggccccgccgggccttccgggccaagcttcgcttcttcaggcagctccaggcgctcctagaccttccagcagtactttggtggacgagttggagtcatctttcgaggcttgctttgcatctctggtgagtcaggactatgtcaatggcaccgatcaggaagaaattcgaaccggtgttgatcagtgtatccagaagtttctggatattgcaagacagacagaatgttttttcttacaaaaaagattgcagttatctgtccagaaaccagagcaagttatcaaagaggatgtgtcagaactaaggaatgaattacagcggaaagatgcactagtccagaagcacttgacaaagctgaggcattggcagcaggtgctggaggacatcaacgtgcagcacaaaaagcccgccgacatccctcagggctccttggcctacctggagcaggcatctgccaacatccctgcacctctgaagccaacgtgagcaaagggcagaggcagttggcctatgagtgggctgatgcgtgaggttggccacacattccttcctgtggacttgacattttggaagaactctttgccagataatgagttcattttagttttatgctcccattgaaaaattttccactatttttataagctgttaatttcttgagtactttataacatgtctgtagcttggataaaccaagtaagtattttttttttgtctttagcaaagtttagactgtgaatatgatgacacagattcttttttatggtggctttgcttgttttaaatttttgcatgacttttcatctttttatgtgtgtttcctgtagtttgatccgaaggaaaagagtatagtagcctgagaatcaggagatgggagttttagtcgtaggccttatgataattaccccgcggtggtgtgtagaaaagtatgtaaatttgctctgttttaagactttgaactacctcaagaagaggaatctaatacaatatttgtaatgtttccagagctctcagaatgaggatttttttgtaaataggtcagaagacgatggaactgtcctgggttagtatagtaatcttacagtaggatccttaggttgatgctgacttctgtttggggtatgtttatattttatgtggtgtttactttttttttttgacatagaaggatatagtgggagcagtgatacgctaacattcattacattctgcagtaatgaatctgtttaatgggtcagtcactgttttcagtagcatgacagtggggtcataggtgagctgtgaggggctaaatcttgctctgattgtctctttctgttttgagttttgtttgcgtgtatcatttttgttctacattttgggaggggaaacattttccgttaaggaaggttgttgccagtggatttgactccaagggactagagtgtcgtggtgggggtggggaggggctgcagggtgatcattggctactgagcctccacagagagcatgtggtgccctgcctttgggagggtattttgctctcgttagttttgtgggcagcctcagattccctgttgagttgctgttaagaaatggagatttctggctctcattgggtaaggttttctgagttttatatcttattagatcacatccctttacccagaacaaatgcttcactgtcttctgattggcagtactcctgtggctttgtgccttgactcattttgttgtcttcagccttgaaggccccttcccacatggactgacatccactcatgtgcctgatccctgaagcctcccagcacccattcagttgcatccccagggcacaggactttgatctcttctgttgccctcgctaggttctccctggtgggttagtgctttgtatctgtctctctgcccctcactaattctacacccatgagaattagacattattctccttaaatatataaggaccatataatctgtatctttttggtgtgtgtatatggtatctggcacatggatctctgattaccagcctgacatcaacaaatcccctcagttacaacgtataggttaaacaaagcttttaaaagctcatgtggtatgacctcaaggttgctaacctggtcactcatggtaattagaaactctgattggcagctttgtatttcttgactaaaaacctaaataaactgattaggttttaggcgttctttcaaagaggttcttgagaagattgagaactatcctatttggtgcttagtgaaaagattttgaattactgtacgtaccagttgttgccatttctttattaaattcagaagtttttttgccaaataa

SEQ ID NO: 5057 - protein, 178 aa, Homo sapiens; identical to SEQ ID NO: 537

SEQ ID NO: 5058 - DNA, 778 bp, Homo sapiens
ctctcttgcgccattccaaacatggcggctccactagggggtatgttttctgggcagccacccggtccccctcaggccccgccgggccttccgggccaagcttcgcttcttcaggcagctccaggcgctcctagaccttccagcagtactttggtggacgagttggagtcatctttcgaggcttgctttgcatctctggtgagtcaggactatgtcaatggcaccgatcaggaagaaattcgaaccggtgttgatcagtgtatccagaagtttctggatattgcaagacagacagaatgttttttcttacaaaaaagattgcagttatctgtccagaaaccagagcaagttatcaaagaggatgtgtcagaactaaggaatgaattacagcggaaagatgcactagtccagaagcacttgacaaagctgaggcattggcagcaggtgctggaggacatcaacgtgcagcacaaaaagcccgccgacatccctcagggctccttggcctacctggagcaggcatctgccaacatccctgcacctctgaagccaacgtgagcaaagggcagaggcagttggcctatgagtgggctgatgcgtgaggttggccacacattccttcctgtggacttgacattttggaagaactctttgccagataatgagttcattttagttttatgctcccattgaaaaattttccactatttttataagctgttaatttcttgagtactttataacatgtctgtagcttggataaaccaagtaagtattt

SEQ ID NO: 5059 - protein, 178 aa, Homo sapiens; identical to SEQ ID NO: 537

SEQ ID NO: 5060 - DNA, 840 bp, Homo sapiens
ctctcttgcgccattccaaacatggcggctccactagggggtatgttttctgggcagccacccggtccccctcaggccccgccgggccttccgggccaagcttcgcttcttcaggcagctccaggcgctcctagaccttccagcagtactttggtggacgagttggagtcatctttcgaggcttgctttgcatctctggtgagtcaggactatgtcaatggcaccgatcaggaagaaattcgaaccggtgttgatcagtgtatccagaagtttctggatattgcaagacagacagaatgttttttcttacaaaaaagattgcagttatctgtccagaaaccagagcaagttatcaaagaggatgtgtcagaactaaggaatgaattacagcggaaagatgcactagtccagaagcacttgacaaagctgaggcattggcagcaggtgctggaggacatcaacgtgcagcacaaaaagcccgccgacatccctcagggctccttggcctacctggagcaggcatctgccaacatccctgcacctctgaagccaacgtgagcaaagggcagaggcagttggcctatgagtgggctgatgcgtgaggttggccacacattccttcctgtggacttgacattttggaagaactctttgccagataatgagttcattttagttttatgctcccattgaaaaattttccactatttttataagctgttaatttcttgagtactttataacatgtctgtagcttggataaaccaagtaagtattttttttttgtctttagcaaagtttagactgtgaatatgatgacacagattcttttttatggtg

SEQ ID NO: 5061 - protein, 178 aa, Homo sapiens; identical to SEQ ID NO: 537

SEQ ID NO: 5062 - DNA, 896 bp, Homo sapiens
cattccaaacatggcggctccactagggggtatgttttctgggcagccacccggtccccctcaggccccgccgggccttccgggccaagcttcgcttcttcaggcagctccaggcgctcctagaccttccagcagtactttggtggacgagttggagtcatctttcgaggcttgctttgcatctctggtgagtcaggactatgtcaatggcaccgatcaggaagaaattcgaaccggtgttgatcagtgtatccagaagtttctggatattgcaagacagacagaatgttttttcttacaaaaaagattgcagttatctgtccagaaaccagagcaagttatcaaagaggatgtgtcagaactaaggaatgaattacagcggaaagatgcactagtccagaagcacttgacaaagctgaggcattggcagcaggtgctggaggacatcaacgtgcagcacaaaaagcccgccgacatccctcagggctccttggcctacctggagcaggcatctgccaacatccctgcacctctgaagccaacacatcttactgggtgatgaataatcctctaagaaaccctctgagctgctaactttttcagggagaaaatcacaagccatcttctcaagttcccctagaaacctgtggaatgccctctgccaagcactgctctggtactggggagtggagtattatgtcttggaagagactcctgctgtgattgtccaggggtgtttctcctgagaaagaaaaaaaccacctgtccctgacattcagaagctgacaacactgttcggtcatgccattctcctgttggacataaacagtctctgaatgccaaccccaaagttgctctcaggccatgataaaataaaccacttaataattttgtct

SEQ ID NO: 5063 - protein, 182 aa, Homo sapiens [sequence omitted]

SEQ ID NO: 5064 - DNA, 349 bp, Homo sapiens
tccaaacatggcggctccactagggggtatgttttctgggcagccacccggtccccctcaggccccgccgggccttccgggccaagcttcgcttcttcaggcagctccaggcgctcctagaccttccagcagtactttggtggacgagttggagtcatctttcgaggcttgctttgcatctctggtgagtcaggactatgtcaatggcaccgatcaggaagaaattcgaaccggtaagcattccctctgtgtacacaatgttctgggcttcagcagtatttcctagttgctaattttatacttcatgtgtttcagtcctgcttttatcctaagacaacatttcagggac

SEQ ID NO: 5065 - protein, 92 aa, Homo sapiens
MAAPLGGMFSGQPPGPPQAPPGLPGQASLLQAAPGAPRPSSSTLVDELESSFEACFASLVSQDYVNGTDQEEIRTGKHSLCVHNVLGFSSIS

SEQ ID NO: 5066 - DNA, 697 bp, Homo sapiens
ccaaacatggcggctccactagggggtatgttttctgggcagccacccggtccccctcaggccccgccgggccttccgggccaagcttcgcttcttcaggcagctccaggcgctcctagaccttccagcagtactttggtggacgagttggagtcatctttcgaggcttgctttgcatctctggtgagtcaggactatgtcaatggcaccgatcaggaagaaattcgaaccggtgttgatcagtgtatccagaagtttctggatattgcaagacagacagaatgttttttcttacaaaaaagattgcagttatctgtccagaaaccagagcaagttatcaaagaggatgtgtcagaactaaggaatgaattacagcggaaagatgcactagtccagaagcacttgacaaagctgaggcattggcagcaggtgctggaggacatcaacgtgcagcacaaaaagcccgccgacatccctcagggctccttggcctacctggagcaggcatctgccaacatccctgcacctctgaagccaacgtgagcaaagggcagaggcagttggcctatgagtgggctgatgcgtgaggttggccacacattccttcctgtggacttgacattttggaagaactctttgccagataatgagttcattttagttttatgctcccattgaaaaattttccactattttt

SEQ ID NO: 5067 - protein, 178 aa, Homo sapiens; identical to SEQ ID NO: 537

SEQ ID NO: 5068 - DNA, 2192 bp, Homo sapiens
caatcttctctgtttgtagacatcttactgggtgatgaataatcctctaagaaaccctctgagctgctaactttttcagggagaaaatcacaagccatcttctcaagttcccctagaaacctgtggaatgccctctgccaagcactgctctggtactggggagtggagtattatgtcttggaagagactcctgctgtgattgtccaggggtacgttctggtctggcttggtgcttgaccttaggtctgcccacaggcttcaggctttcaactttgaaacaaacatctgtgccacacacattttgtaaatgatcccattcagtcttctagaagccttataacagaatcaatattgtttttcccattttcacagatggataataaatctgtaaaatagggataagactaggacctattccccaggattacttaggcgtgagctgctgtgcctggcagaacagtatgaagtgttaacgccaaaatttgttttagctatcatatataaatcataagcatattatttggttggttggtgttagttcattccttcaatcggatgatttaaaataaatgtttttcaagtatcctctgtgatgtatcccaaaggttagcttagaaagaaaagtacttggtgaaccattcctggtgcggagagccctgtttctgctggacttctttggcttgggccgtttcaccatctggggtcctaaaagcaaaaaaaggtttttttatatggttttgaaaactatgcaagaagcagcttaatacccaccatcttttcagggaaagataactgcttgtttactcttcaaaaacacccaaatgggactggccaacattagtagtgggaaacaaattgtaaaggatggggctggggagggagtacctaatcctcatttggaaaacagaaggttcaccattgtttggttctccattgttcctttgagacttagtggttgtagctctaataatgcaggattaaccaaacctacagatcaagagactttgtttttattttttgtgacagagtctccctctgtcacccaggctggagtgcagtggcatgatctcggctcactgcaacctccagcctcctgcgttcaagcgatcattgtgcctcagcctcccggggagctggaattacaggcgcataccaccacacctggctaatttttgtattttttgtagagatgggtttcaccatgttgcccaggctggtctcgaactcctgaccttaggtgatccacccacctccatctcccaaagtgctgggattacaggcgtgagccaccaagcccggcccgattaagagactttagaattccaaggtgatagagtaaatcttgaggaataatgttagtaataatactgaaactatattgaagatttttgtgccaagtcctgtgctaagcacatcctatggattaattcctttagtctcacgtcagtctgatgagataggtgctgtattatcttaattttaaaggcaaggtatatggagacctggagaggtcaagtgacctgtccaaggccacagagctaagaatgaggaagactgtaatttgaattcagacctccaggccagatggagtccaccttttgtataacccatgctgaagttttcaggtaagtgattcagtgtcccttgtctaatcatccatgaaaaaaggccttctggaatttggtaccaggtgctagaaagaatcctacttcccctcttatctacagggaaatagaataagggcccctgtccccaacatcccccaaaccttgtggcagtttttgcatctgtagactggttgggtttgtaggtccggccacagctggggcttgggtccaagctgggtgatgtagttattggaggggcattaatcctggaactcagatcgccactcagaaagttctttgcataggaggcgaggttcggcacgctgaccacgcggctgggcacgtcctccaccttctttttctgtttgtattaatggacaggttagtgcaatgcaatgcaaaaaacaaaataaagcattattgtaaaagcaaataatgctcacccaatcaaaattgtatcggagaagaagcaacaatttcatttatacacttacatgctattttttaaagcacttttccctccaatcttcattttgtattataaataaatatgtatgttcacaacctcttaaccaaaacttctgg

SEQ ID NO: 5069 - protein, 115 aa, Homo sapiens [sequence omitted]

SEQ ID NO: 5070 - DNA, 806 bp, Homo sapiens
aaaaaggagatgttgaatgggaagtcagcaagggtgctagaatgtagcaagtattcttcaggtgttagtgatttctgttgttcgggaagaggagggttatggaggaagagtatgggatttaggtgggttaagtgatttgcccaaagtcaagaggttagtctttaacctttggcagaagcaggatttgaagtgagttttcacacccctcttccctggtcagtgtgttgataacagcccacccacctgtggttccagggtgttcttaagaagccaaggttgtcttgggtgtggtagctctttgaaaggtagaaagttccaccaagaaggccttttttcttgaatactgcttagcttccttgtcaggctccaagatgcagattgcctgtgggctatctctctccacagataaacctactcacatcttcaggacagccttttttttttgagacaggataagacttcgtctcaaaaaataaaaaataaaaaaatactgagcagtctgcttgggcgcttccatcagcctggccatgacatctttggagctgtcctgccctcttttgccccggtgttccttggcccacctgtcagacctacatcataggctcttcctgtcttctgtttcctctcccctttctctaacataggtgtttctcctgagaaagaaaaaaaccacctgtccctgacattcagaagctgacaacactgttcggtcatgccattctcctgttggacataaacagtctctgaatgccaaccccaaagttgctctcaggccatgataaaataaaccacttaataattttgtc

SEQ ID NO: 5071 - protein, 41 aa, Homo sapiens
MLNGKSARVLECSKYSSGVSDFCCSGRGGLWRKSMGFRWVK

SEQ ID NO: 5072 - DNA, 2546 bp, Homo sapiens
tgaggcttggggactggctcactcactgcccaactggtagcaaaacccatctggagcagcgtgtgaggtatggacactcactcacacgagggggtggcccagttgctgaggattccaccagtggtaccctgggaaaatatccctgtggaggggaatgggaggagtcaaactgtggaagataagaggagtactgcacacaaggacagtagagtgtctgttccctgcagagggatagtgaggaactgatgaggtgactgtgagtgcccggggcctctgtcgttatcttggaggatcactttgaggtcaggagttcatgaccagcctggccaacatggtgaaaccctgtctctactaaaaatacattaattagcatggtggcgggtgcctgtagtcccagctactcgggaggctgaggcaggagaatcgcttgaacccgggaggccgaggttgcagtgagctgagatggcgccactgcaccccagcttgggtgacagagcaagactccgtctcaaaaacaaacacacagtactgcatcctgggggtggaggtgaggtgacggtagagatcagtgctacccttggaaatctgacagatacagtaagatggtccctatcatagttccatttaatttgccagcctcatctgcagaatccagatggatcctggagaaaaattaaccaagtagctttgtagagatggggtttcaccatattggccaggctggtctcaaattcctggactcaagcagtccatctgcctcagcctcccaaagtgatgggattacaggcgtgagctgctgtgcctggcagaacagtatgaagtgttaacgccaaaatttgttttagctatcatatataaatcataagcatattatttggttggttggtgttagttcattccttcaatcggatgatttaaaataaatgtttttcaagtatcctctgtgatgtatcccaaaggttagcttagaaagaaaagtacttggtgaaccattcctggtgcggagagccctgtttctgctggacttctttggcttgggccgtttcaccatctggggtcctaaaagcaaaaaaaggtttttttatatggttttgaaaactatgcaagaagcagcttaatacccaccatcttttcagggaaagataactgcttgtttactcttcaaaaacacccaaatgggactggccaacattagtagtgggaaacaaattgtaaaggatggggctggggagggagtacctaatcctcatttggaaaacagaaggttcaccattgtttggttctccattgttcctttgagacttagtggttgtagctctaataatgcaggattaaccaaacctacagatcaagagactttgtttttattttttgtgacagagtctccctctgtcacccaggctggagtgcagtggcatgatctcggctcactgcaacctccagcctcctgcgttcaagcgatcattgtgcctcagcctcccggggagctggaattacaggcgcataccaccacacctggctaatttttgtattttttgtagagatgggtttcaccatgttgcccaggctggtctcgaactcctgaccttaggtgatccacccacctccatctcccaaagtgctgggattacaggcgtgagccaccaagcccggcccgattaagagactttagaattccaaggtgatagagtaaatcttgaggaataatgttagtaataatactgaaactatattgaagatttttgtgccaagtcctgtgctaagcacatcctatggattaattcctttagtctcacgtcagtctgatgagataggtgctgtattatcttaattttaaaggcaaggtatatggagacctggagaggtcaagtgacctgtccaaggccacagagctaagaatgaggaagactgtaatttgaattcagacctccaggccagatggagtccaccttttgtataacccatgctgaagttttcaggtaagtgattcagtgtcccttgtctaatcatccatgaaaaaaggccttctggaatttggtaccaggtgctagaaagaatcctacttcccctcttatctacagggaaatagaataagggcccctgtccccaacatcccccaaaccttgtggcagtttttgcatctgtagactggttgggtttgtaggtccggccacagctggggcttgggtccaagctgggtgatgtagttattggaggggcattaatcctggaactcagatcgccactcagaaagttctttgcataggaggcgaggttcggcacgctgaccacgcggctgggcacgtcctccaccttctttttctgtttgtattaatggacaggttagtgcaatgcaatgcaaaaaacaaaataaagcattattgtaaaagcaaataatgctcacccaatcaaaattgtatcggagaagaagcaacaatttcatttatacacttacatgctattttttaaagcacttttccctccaatcttcattttgtattataaataaatatgtatgttcacaacctcttaaccaaaacttctgg

SEQ ID NO: 5073 - protein, 115 aa, Homo sapiens [sequence omitted]

SEQ ID NO: 5074 - DNA, 6255 bp, Homo sapiens
atgtcctggctcctctccaagatccaaaaaggaaggctaccatccccagccccgctgtgcactcgcgcaactcaggcgctggcccacacccatctcgtcccccaccgccatctccgctatcagctcggagactcgggagccgccagtcactgtgccctgtccctctccggaggccgccagtcactgtgccctgtccctctccggaggctcttcttcctctttagcctgggatccccacctcgggcagggtccgtcgccaccaagtccagggccgcgcgccacccacgtgtccaagagcgcagtgcccgcccaccgcaaaccccccaaggccggcagctcctagccgcggaagctctccccttgcacacgaaacctgcactggctggggaactgcagactgatcgccagcggcacgtgcggggcgccgacgcctcgccgcagggtgcgggtgcccgcggagccagccagccagagaaccagcaggagaggaaaaaggggagaaaacgagagagtctgagtgctgggcgcgttttagcgatggcttctgctctcaacagcaaaattaacccgcccggcacttgccagggctccaaagccgacggtggcgccggctggagaatggactgtgatccccagatgcacgtgaaaatgtgcaagaagatcgcccagctcaccaaggtgatttatgccctgaacacccgccaggatgaggctgaggccagcatggaggcgctgcgggaagcgcaccaggaggagctccagaatgcggtggcagagaccaaggccaggctcctgcaggaacagggctgcgcagaggaggaagcccttctacagcgcatccaggccctggagagcgccctggagctgcaaaagaggctgacggaggaggcgctggctgagtcggcctcgtgcaggctggagacgaaggagagagagctgagggtggaggcagagcacgccgagcgagtcctcacgctctccagggaaatgctggagctcaaggctgactacgagaggaggctccagcacctgacgagccacgaggctaccccgcagggccggctgccccaggagagccctgaaaccaagtcggagccaggccagggcccggagatgcaggaggtcctgctagaggtgcagcggctgcgagtggagaaccagcagctgagcaaggactacgcccgcaaggccgaggagctgcaggccacctacgagagggaaaacgaggccatccggcaggccatgcagcagtcggtgagccaggccctgtggcagtggcaggagaaggagtcggacctccgcaagaacttccaggtccaggagtcagccctgcaggctcaggtccggaagctggaaggagacctggagcacagaggccgcaagataagtgacctgaagaagtacgcccagaagctgaaggagaggattcaggacctggatgtgcagcttaaggaggctcgacaggagaattcagagttgaaaggcactgcaaaaaaacttggggagaagctggctgttgccaaagacagaatgatgctgcaggagtgtcgtgggacacagcagacagatgccatgaagactgagttagtttcagagaacaaagtcctgcgggaagagaatgacttggaagccggcaatcttcatcctcagcaggatcaaagctgtctcaaggagtgcccttgcatgaaaggaggcacagatatgcagaccaagaaagaggcaagtgctgagacagaatatatgaagcaacaatatgaagaagaccttcgtaaaatcaaacatcagacagaagaggagaagaaacatctcaaagaccagctagtgaagcgactagaagacttggtaaagaagcacaccgtggaaatcaaatccgttcgctcgtccgtggaggctgaaagaaagaaactgcagagggaagtagaagcacagttggaggaagtgaggaagaaatcagaaaaggagataaagcagctggaagaagagaaagcagccctcaatgtgaagcttcagaattctctgcttgaggttttaaggctggaagaatttatccaacaaaataagacacgccccacaggagctgaggaaagtccccaggaattaggccgccagcactgcagcattctggagacccaggatccatgcttgaagctggatgaaacttcgccgagaggagaggagtatcaagataagttagcagctgaagaaggaaccagcagtgatgaagaagaaaggaccaaagtgcttctcaaggagggaagtgacccacaacctccactgggctctttgttgaaggagaaaacatccaaaatccagcgtctagaggaggactggcaaagccagaaggccaaattgcaagcccaggtctcacagatgcagcaggctctggagcagtgcaccagcaactacagggaggacctgcaggcactcaagcagctctcggacctggagagggagaagctgcagcgtgagctccaggagaccactcagcagaaccacgccatgaaagcccagctcgaggcttcccaccagagagccctgcgcatgctggagaaggccagacatcaggaactcaaggccacagaggaacgcttgaagaaggaatccagccacagcctccagatccaacaccagacacaccgactggagctccaggccttggaggaaaaggccaggcaagagctgcaggaggagcgtgagaggatgcaggcacagcaggccctgctgctagagtcgctcagacaggagctgtcggagcagcaagctgcctgttctgggcaccagaaggacttggaggcactgcaggccgagctgagggctctgggcagacagcaagccagcagccagtgtccaggagacagcaaggatcacataatcgccacagaggagcggggcggcccgggccaggccggctccccaccgggcgctgctgggcagggttccggcgagggatgcgggctctgggaggagaacgcgcagctccaggacgcggtgcggcggctgcgcgcggaggtggagcagcatcagcaggaggcgcagaagctccgagaccagcgcaggttcctggaggagactcagcaagcccagcgggccagggaggtggagacactgcgccaggaacaccggaaggagatgcaggccatggtggcagatttcagtagtgcccaggcccagctccaggcccggctggctgccctggaagccgaactgaaagattccggagagaagccagggaagggagcgtccaggcccgaggaccttcagctcattggccgcctgcagacccgcctgaaggagagagaggacatcatcaagcagctcacggaagagagaagatttcactacgcagcattccccagtgccatgtcccaccggaatcggtctttctctttcaatcctcacccgggatatttgaccccttccatgaagaaaaagaaggtggaggacgtgcccagccgcgtggtcagcgtgccgaacctcgcctcctatgcaaagaactttctgagtggcgatctgagttccaggattaatgcccctccaataactacatcacccagcttggacccaagccccagctgtggccggacctacaaacccaaccagtctacagatgcaaaaactgccacaaggaccccagatggtgaaacggcccaagccaaagaagtccagcagaaacagggctctccgcaccaggaatggttcaccaagtacttttctttctaagctaacctttgggatacatcacagaggatacttgaaaaacatttattttaaatcatccgattgaaggaatgaactaacaccaaccaaccaaataatatgcttatgatttatatatgatagctaaaacaaattttggcgttaacacttcatactgttctgccaggcacagcagctcacgcctgtaatcccatcactttgggaggctgaggcagatggactgcttgagtccaggaatttgagaccagcctggccaatatggtgaaaccccatctctacaaaatatacaaaaattagccaggcatggtggcgtgtgcctgtggtcccaggtacttgggggactgaggcgggaggatcacttgaacctaggaggcagaggttgcagtgagccaagttcgaactcctgcattccaaccagcctgggtgacagagggagaccctgtctccaaaaaaaaaaaaaaaaaaaaaaaaaaaaaaaaaaaaaaaaaaaattgacattaaaccagtgttattaaaagtcatctataggaaaatgttattagcgttactaatgacccataccttgtatttctagtgtccataacatcatactccattttgtggaacatcagactttgtgatttccatgatctatttcaaaagtggttgtacttgtccttaggatgctagtcaactccactggaaagctgtttctatgtaaaatgatgcaattccaaaatgcacatctaacctcaataggaagacaaataacagttaaacaggaaagccaactaaaaacaaaccaaacctaccagaaatggatggtagcatgcttggactgaatactttcacttccttggtctaagacaagcagcagattatagatgggataacacccacctctaaaagggctttgcaaggattaagcaagataacataaattaacatgaattggaattaagtaccacaaggtttttctgtaaataaccaatcctagcccagttataggtctcagtgtaatgaccatagtgccaacatgatcacttgtgaaggtctctagattatctgttctttgaagtcaaagatcttctagactgggcacatggctcatgcctgtaatcccaacactttgggaggctgagatgggaggagagcttgaggccaggaatttgagaccagcctgggcaacacagcgagacctccatctctacaaaaaaataattagcccaaagaaaacccagctacttggaagtctgaggtaggacagcatgagcccaagagttcgagaccagcctgggcaagatagtgagatcccatctctacagattaaaaaaatatatatatatatcccctgaacctctggtctttgggtttgagccatttgcctcatggtgtgttgcttcttcactgcatgaattcccagtgggttaaaggaaccgcaatggctgttcacggtgctgaccttgctctcagtccacactgatttgtcttaccttctgacagagcaatgtgatttgacaagactcaataacaacttttagggggcaaaatattttttcagtctttggtgctggcccagaaggtggcccacaaaccaatgttaattctatgcattgtcaaatctttgctctttgaataaaactttgaataactgggcaataaaaatggttgacttgtattgattttccacagaaaggtaaaattagatgaagacagcttagaaatagaaagttcagttcacattaacctcaatcacaccatcttaaaaaaaaaaaagctgattacatataactgtcaaacttacgtattaaaggtaaatttactgcctaatcaaaacgaggctccaatgcatttttaaatgcaaacaaacacttgtcaccatacattaacacaccatactgtttttcactaccaaatattttttgtgagtttcccgcttagagtgtcttagttcgttcaggctgctctaacaaaatatcttacttatactggataatttataaacaatagaaatatgtcactcacagtcctagaggctaagtccaagatcaaggcaccagcagatatggagtctggggagggcccattcttcagaaatgggtgcctgctacgtgtccttacatggtggaagaggcaagagcgcctccctgagcctcttttgtaagggtacttatcctactcatgagggtgaagccctcatgactccattgcttcccaaaagccccacctcttaatactattacattgacattaggttccaacatatgaattttggaagggacatcaacattcaggacatagcagtgaaccctgtaggactgctctttattttgtgctttcaaaaagactacatacaggtggttctatttttgtgtgttgaaacactttcccaggctgcactttgcatttctgtccttaaactcagcatgatccctgggcaaggagaaaattttactagttgagatcgtacataggttttgactcctttcttgctgcaggtgactgaaaagatctttcagtcttaaatttctaaattctaccctgcaatgattatatctt

SEQ ID NO: 5075 - protein, 1239 aa, Homo sapiens
MSWLLSKIQKGRLPSPAPLCTRATQALAHTHLVPHRHLRYQLGDSGAASHCALSLSGGRQSLCPVPLRRLFFLFSLGSPPRAGSVATKSRAARHPRVQERSARPPQTPQGRQLLAAEALPLHTKPALAGELQTDRQRHVRGADASPQGAGARGASQPENQQERKKGRKRESLSAGRVLAMASALNSKINPPGTCQGSKADGGAGWRMDCDPQMHVKMCKKIAQLTKVIYALNTRQDEAEASMEALREAHQEELQNAVAETKARLLQEQGCAEEEALLQRIQALESALELQKRLTEEALAESASCRLETKERELRVEAEHAERVLTLSREMLELKADYERRLQHLTSHEATPQGRLPQESPETKSEPGQGPEMQEVLLEVQRLRVENQQLSKDYARKAEELQATYERENEAIRQAMQQSVSQALWQWQEKESDLRKNFQVQESALQAQVRKLEGDLEHRGRKISDLKKYAQKLKERIQDLDVQLKEARQENSELKGTAKKLGEKLAVAKDRMMLQECRGTQQTDAMKTELVSENKVLREENDLEAGNLHPQQDQSCLKECPCMKGGTDMQTKKEASAETEYMKQQYEEDLRKIKHQTEEEKKHLKDQLVKRLEDLVKKHTVEIKSVRSSVEAERKKLQREVEAQLEEVRKKSEKEIKQLEEEKAALNVKLQNSLLEVLRLEEFIQQNKTRPTGAEESPQELGRQHCSILETQDPCLKLDETSPRGEEYQDKLAAEEGTSSDEEERTKVLLKEGSDPQPPLGSLLKEKTSKIQRLEEDWQSQKAKLQAQVSQMQQALEQCTSNYREDLQALKQLSDLEREKLQRELQETTQQNHAMKAQLEASHQRALRMLEKARHQELKATEERLKKESSHSLQIQHQTHRLELQALEEKARQELQEERERMQAQQALLLESLRQELSEQQAACSGHQKDLEALQAELRALGRQQASSQCPGDSKDHIIATEERGGPGQAGSPPGAAGQGSGEGCGLWEENAQLQDAVRRLRAEVEQHQQEAQKLRDQRRFLEETQQAQRAREVETLRQEHRKEMQAMVADFSSAQAQLQARLAALEAELKDSGEKPGKGASRPEDLQLIGRLQTRLKEREDIIKQLTEERRFHYAAFPSAMSHRNRSFSFNPHPGYLTPSMKKKKVEDVPSRVVSVPNLASYAKNFLSGDLSSRINAPPITTSPSLDPSPSCGRTYKPNQSTDAKTATRTPDGETAQAKEVQQKQGSPHQEWFTKYFSF

SEQ ID NO: 5076 - DNA, 2798 bp, Homo sapiens
ggctcagggaggcgctcttgcctcttccaccatgtaaggacacgtagcaggcacccatttctgaagaatgggccctccccagactccatatctgctggtgccttgatcttggacttagcctctaggactgtgagtgacatatttctattgtttataaattatccagtataagtaagatattttgttagagcagcctgaacgaactaagacactctaagcgggaaactcacaaaaaatatttggtagtgaaaaacagtatggtgtgttaatgtatggtgacaagtgtttgtttgcatttaaaaatgcattggagcctcgttttgattaggcagtaaatttacctttaatacgtaagtttgacagttatatgtaatcagcttttttttttttaagatggtgtgattgaggttaatgtgaactgaactttctatttctaagctgtcttcatctaattttacctttctgtggaaaatcaatacaagtcaaccatttttattgcccagttattcaaagttttattcaaagagcaaagatttgacaatgcatagaattaacattggtttgtgggccaccttctgggccagcaccaaagactgaaaaaatattttgccccctaaaagttgttattgagtcttgtcaaatcacattgctctgtcagaaggtaagacaaatcagtgtggactgagagcaaggtcagcaccgtgaacagccattgcggttcctttaacccactgggaattcatgcagtgaagaagcaacacaccatgaggcaaatggctcaaacccaaagaccagaggttcaggggatatatatatatatttttttaatctgtagagatgggatctcactatcttgcccaggctggtctcgaactcttgggctcatgctgtcctacctcagacttccaagtagctgggttttctttgggctaattatttttgtagagatggggtttcaccatattggccaggctggtctcaaattcctggactcaagcagtccatctgcctcagcctcccaaagtgatgggattacaggcgtgagctgctgtgcctggcagaacagtatgaagtgttaacgccaaaatttgttttagctatcatatataaatcataagcatattatttggttggttggtgttagttcattccttcaatcggatgatttaaaataaatgtttttcaagtatcctctgtgatgtatcccaaaggttagcttagaaagaaaagtacttggtgaaccattcctggtgcggagagccctgtttctgctggacttctttggcttgggccgtttcaccatctggggtcctaaaagcaaaaaaaggtttttttatatggttttgaaaactatgcaagaagcagcttaatacccaccatcttttcagggaaagataactgcttgtttactcttcaaaaacacccaaatgggactggccaacattagtagtgggaaacaaattgtaaaggatggggctggggagggagtacctaatcctcatttggaaaacagaaggttcaccattgtttggttctccattgttcctttgagacttagtggttgtagctctaataatgcaggattaaccaaacctacagatcaagagactttgtttttattttttgtgacagagtctccctctgtcacccaggctggagtgcagtggcatgatctcggctcactgcaacctccagcctcctgcgttcaagcgatcattgtgcctcagcctcccggggagctggaattacaggcgcataccaccacacctggctaatttttgtattttttgtagagatgggtttcaccatgttgcccaggctggtctcgaactcctgaccttaggtgatccacccacctccatctcccaaagtgctgggattacaggcgtgagccaccaagcccggcccgattaagagactttagaattccaaggtgatagagtaaatcttgaggaataatgttagtaataatactgaaactatattgaagatttttgtgccaagtcctgtgctaagcacatcctatggattaattcctttagtctcacgtcagtctgatgagataggtgctgtattatcttaattttaaaggcaaggtatatggagacctggagaggtcaagtgacctgtccaaggccacagagctaagaatgaggaagactgtaatttgaattcagacctccaggccagatggagtccaccttttgtataacccatgctgaagttttcaggtaagtgattcagtgtcccttgtctaatcatccatgaaaaaaggccttctggaatttggtaccaggtgctagaaagaatcctacttcccctcttatctacagggaaatagaataagggcccctgtccccaacatcccccaaaccttgtggcagtttttgcatctgtagactggttgggtttgtaggtccggccacagctggggcttgggtccaagctgggtgatgtagttattggaggggcattaatcctggaactcagatcgccactcagaaagttctttgcataggaggcgaggttcggcacgctgaccacgcggctgggcacgtcctccaccttctttttctgtttgtattaatggacaggttagtgcaatgcaatgcaaaaaacaaaataaagcattattgtaaaagcaaataatgctcacccaatcaaaattgtatcggagaagaagcaacaatttcatttatacacttacatgctattttttaaagcacttttccctccaatcttcattttgtattataaataaatatgtatgttcacaacctcttaaccaaaacttctgg

SEQ ID NO: 5077 - protein, 104 aa, Homo sapiens
MRQMAQTQRPEVQGIYIYIFLICRDGISLSCPGWSRTLGLMLSYLRLPSSWVFFGLIIFVEMGFHHIGQAGLKFLDSSSPSASASQSDGITGVSCCAWQNSMKC

SEQ ID NO: 5078 - DNA, 4845 bp, Homo sapiens
gtctgagtgctgggcgcgttttagcgatggcttctgctctcaacagcaaaattaacccgcccggcacttgccagggctccaaagccgacggtggcgccggctggagaatggactgtgatccccagatgcacgtgaaaatgtgcaagaagatcgcccagctcaccaaggtgatttatgccctgaacacccgccaggatgaggctgaggccagcatggaggcgctgcgggaagcgcaccaggaggagctccagaatgcggtggcagagaccaaggccaggctcctgcaggaacagggctgcgcagaggaggaagcccttctacagcgcatccaggccctggagagcgccctggagctgcaaaagaggctgacggaggaggcgctggctgagtcggcctcgtgcaggctggagacgaaggagagagagctgagggtggaggcagagcacgccgagcgagtcctcacgctctccagggaaatgctggagctcaaggctgactacgagaggaggctccagcacctgacgagccacgaggctaccccgcagggccggctgccccaggagagccctgaaaccaagtcggagccaggccagggcccggagatgcaggaggtcctgctagaggtgcagcggctgcgagtggagaaccagcagctgagcaaggactacgcccgcaaggccgaggagctgcaggccacctacgagagggaaaacgaggccatccggcaggccatgcagcagtcggtgagccaggccctgtggcagtggcaggagaaggagtcggacctccgcaagaacttccaggtccaggagtcagccctgcaggctcaggtccggaagctggaaggagacctggagcacagaggccgcaagataagtgacctgaagaagtacgcccagaagctgaaggagaggattcaggacctggatgtgcagcttaaggaggctcgacaggagaattcagagttgaaaggcactgcaaaaaaacttggggagaagctggctgttgccaaagacagaatgatgctgcaggagtgtcgtgggacacagcagacagatgccatgaagactgagttagtttcagagaacaaagtcctgcgggaagagaatgacttggaagccggcaatcttcatcctcagcaggatcaaagctgtctcaaggagtgcccttgcatgaaaggaggcacagatatgcagaccaagaaagaggcaagtgctgagacagaatatatgaagcaacaatatgaagaagaccttcgtaaaatcaaacatcagacagaagaggagaagaaacatctcaaagaccagctagtgaagcgactagaagacttggtaaagaagcacaccgtggaaatcaaatccgttcgctcgtccgtggaggctgaaagaaagaaactgcagagggaagtagaagcacagttggaggaagtgaggaagaaatcagaaaaggagataaagcagctggaagaagagaaagcagccctcaatgtgaagcttcagaattctctgcttgaggttttaaggctggaagaatttatccaacaaaataagacacgccccacaggagctgaggaaagtccccaggaattaggccgccagcactgcagcattctggagacccaggatccatgcttgaagctggatgaaacttcgccgagaggagaggagtatcaagataagttagcagctgaagaaggaaccagcagtgatgaagaagaaaggaccaaagtgcttctcaaggagggaagtgacccacaacctccactgggctctttgttgaaggagaaaacatccaaaatccagcgtctagaggaggactggcaaagccagaaggccaaattgcaagcccaggtctcacagatgcagcaggctctggagcagtgcaccagcaactacagggaggacctgcaggcactcaagcagctctcggacctggagagggagaagctgcagcgtgagctccaggagaccactcagcagaaccacgccatgaaagcccagctcgaggcttcccaccagagagccctgcgcatgctggagaaggccagacatcaggaactcaaggccacagaggaacgcttgaagaaggaatccagccacagcctccagatccaacaccagacacaccgactggagctccaggccttggaggaaaaggccaggcaagagctgcaggaggagcgtgagaggatgcaggcacagcaggccctgctgctagagtcgctcagacaggagctgtcggagcagcaagctgcctgttctgggcaccagaaggacttggaggcactgcaggccgagctgagggctctgggcagacagcaagccagcagccagtgtccaggagacagcaaggatcacataatcgccacagaggagcggggcggcccgggccaggccggctccccaccgggcgctgctgggcagggttccggcgagggatgcgggctctgggaggagaacgcgcagctccaggacgcggtgcggcggctgcgcgcggaggtggagcagcatcagcaggaggcgcagaagctccgagaccagcgcaggttcctggaggagactcagcaagcccagcgggccagggaggtggagacactgcgccaggaacaccggaaggagatgcaggccatggtggcagatttcagtagtgcccaggcccagctccaggcccggctggctgccctggaagccgaactgaaagattccggagagaagccagggaagggagcgtccaggcccgaggaccttcagctcattggccgcctgcagacccgcctgaaggagagagaggacatcatcaagcagctcacggaagagagaagatttcactacgcagcattccccagtgccatgtcccaccggaatcggtctttctctttcaatcctcacccgggatatttgaccccttccatgaagaaaaagaaggtggaggacgtgcccagccgcgtggtcagcgtgccgaacctcgcctcctatgcaaagaactttctgagtggcgatctgagttccaggattaatgcccctccaataactacatcacccagcttggacccaagccccagctgtggccggacctacaaacccaaccagtctacagatgcaaaaactgccacaaggaccccagatggtgaaacggcccaagccaaagaagtccagcagaaacagggctctccgcaccaggaatggttcaccaagtacttttctttctaagctaacctttgggatacatcacagaggatacttgaaaaacatttattttaaatcatccgattgaaggaatgaactaacaccaaccaaccaaataatatgcttatgatttatatatgatagctaaaacaaattttggcgttaacacttcatactgttctgccaggcacagcagctcacgcctgtaatcccatcactttgggaggctgaggcagatggactgcttgagtccaggaatttgagaccagcctggccaatatggtgaaaccccatctctacaaaatatacaaaaattagccaggcatggtggcgtgtgcctgtggtcccaggtacttgggggactgaggcgggaggatcacttgaacctaggaggcagaggttgcagtgagccaagttcgaactcctgcattccaaccagcctgggtgacagagggagaccctgtctccaaaaaaaaaaaaaaaaaaaaaaaaaaaaaaaaaaaaaaaaaaaattgacattaaaccagtgttattaaaagtcatctataggaaaatgttattagcgttactaatgacccataccttgtatttctagtgtccataacatcatactccattttgtggaacatcagactttgtgatttccatgatctatttcaaaagtggttgtacttgtccttaggatgctagtcaactccactggaaagctgtttctatgtaaaatgatgcaattccaaaatgcacatctaacctcaataggaagacaaataacagttaaacaggaaagccaactaaaaacaaaccaaacctaccagaaatggatggtagcatgcttggactgaatactttcacttccttggtctaagacaagcagcagattatagatgggataacacccacctctaaaagggctttgcaaggattaagcaagataacataaattaacatgaattggaattaagtaccacaaggtttttctgtaaataaccaatcctagcccagttataggtctcagtgtaatgaccatagtgccaacatgatcacttgtgaaggtctctagattatctgttctttgaagtcaaagatcttctagactgggcacatggctcatgcctgtaatcccaacactttgggaggctgagatgggaggagagcttgaggccaggaatttgagaccagcctgggcaacacagcgagacctccatctctacaaaaaaataattagcccaaagaaaacccagctacttggaagtctgaggtaggacagcatgagcccaagagttcgagaccagcctgggcaagatagtgagatcccatctctacagattaaaaaaatatatatatatatcccctgaacctctggtctttgggtttgagccatttgcctcatggtgtgttgcttcttcactgcatgaattcccagtgggttaaaggaaccgcaatggctgttcacggtgctgaccttgctctcagtccacactgatttgtcttaccttctgacagagcaatgtgatttgacaagactcaataacaacttttagggggcaaaatattttttcagtctttggtgctggcccagaaggtggcccacaaaccaatgttaattctatgcattgtcaaatctttgctctttgaataaaactttgaataactgggcaat

SEQ ID NO: 5079 - protein, 1060 aa, Homo sapiens
MASALNSKINPPGTCQGSKADGGAGWRMDCDPQMHVKMCKKIAQLTKVIYALNTRQDEAEASMEALREAHQEELQNAVAETKARLLQEQGCAEEEALLQRIQALESALELQKRLTEEALAESASCRLETKERELRVEAEHAERVLTLSREMLELKADYERRLQHLTSHEATPQGRLPQESPETKSEPGQGPEMQEVLLEVQRLRVENQQLSKDYARKAEELQATYERENEAIRQAMQQSVSQALWQWQEKESDLRKNFQVQESALQAQVRKLEGDLEHRGRKISDLKKYAQKLKERIQDLDVQLKEARQENSELKGTAKKLGEKLAVAKDRMMLQECRGTQQTDAMKTELVSENKVLREENDLEAGNLHPQQDQSCLKECPCMKGGTDMQTKKEASAETEYMKQQYEEDLRKIKHQTEEEKKHLKDQLVKRLEDLVKKHTVEIKSVRSSVEAERKKLQREVEAQLEEVRKKSEKEIKQLEEEKAALNVKLQNSLLEVLRLEEFIQQNKTRPTGAEESPQELGRQHCSILETQDPCLKLDETSPRGEEYQDKLAAEEGTSSDEEERTKVLLKEGSDPQPPLGSLLKEKTSKIQRLEEDWQSQKAKLQAQVSQMQQALEQCTSNYREDLQALKQLSDLEREKLQRELQETTQQNHAMKAQLEASHQRALRMLEKARHQELKATEERLKKESSHSLQIQHQTHRLELQALEEKARQELQEERERMQAQQALLLESLRQELSEQQAACSGHQKDLEALQAELRALGRQQASSQCPGDSKDHIIATEERGGPGQAGSPPGAAGQGSGEGCGLWEENAQLQDAVRRLRAEVEQHQQEAQKLRDQRRFLEETQQAQRAREVETLRQEHRKEMQAMVADFSSAQAQLQARLAALEAELKDSGEKPGKGASRPEDLQLIGRLQTRLKEREDIIKQLTEERRFHYAAFPSAMSHRNRSFSFNPHPGYLTPSMKKKKVEDVPSRVVSVPNLASYAKNFLSGDLSSRINAPPITTSPSLDPSPSCGRTYKPNQSTDAKTATRTPDGETAQAKEVQQKQGSPHQEWFTKYFSF

SEQ ID NO: 5080 - DNA, 521 bp, Homo sapiens
ggataaactaagataatcaaaatgatgcagagaaagaaaacttctctcttttaatatgtacagttttatttgtttgtttgctgaggcaggaggatcacttgagcccaggaggcagagctttcagtgaacggagatcaggaccctgcactccagcttcagcaacagagcaagttcagggcaggaggcggggtgtggtggggggaactagccaggggctcatcagtctcccttcattttatgaggctatgttccccttttctgcagggcagtgggaatttgtgaggatgagcattggtttaaccctcacacttcgaagaaatcagaaggatcagggctgctcaattagaattgttattcccactggtccctcatgcaaacatattgcatttattcattcaacaaataattgttaaggacccattgtatgcccagcactgctttaggctctggagttatagcagggaacaaaacaaagacaatgctctcataggctcacaaattctgctgagaattcggataag

SEQ ID NO: 5081 - protein, 55 aa, Homo sapiens
MFPFSAGQWEFVRMSIGLTLTLRRNQKDQGCSIRIVIPTGPSCKHIAFIHSTNNC

SEQ ID NO: 5082 - DNA, 317 bp, Homo sapiens
ggacaggcggggaggcaagaggctgagattctctatcagtatggcctgaacgctgggactctgagacctgggagaccaggtcttccctaacaactacactgcagtggaaagcctccctgaacttttttttttttttgagacggagtcttgctcttgttgcagtgagccgagatggcaccactgcactccagcctgggcaaaagagcaagactgtctcaaaaaaaaaaaaaagaaaataaatgaacaagcacagtcaaggctcaaagcaattttgggccaacacaacagggttcagtgtacacagctgacaaatatta

SEQ ID NO: 5083 - protein, 83 aa, Homo sapiens
DLGDQVFPNNYTAVESLPELFFFFETESCSCCSEPRWHHCTPAWAKEQDCLKKKKKKINEQAQSRLKAILGQHNRVQCTQLTN

SEQ ID NO: 5084 - DNA, 578 bp, Homo sapiens
cttgccgttttttgaaggcttatacaaaatagtttcctgcaaactcaagtggctgggaagcccagctgaaggttacttctaccccaaggccatgtcagcagaaagtggccaacaggacttgggcctgaaaaagctcagactgaattttaggagtgacatctgaaactgctggtttctcacaaggaataaaagctgtctgggaagctggagaggcagtgtgctgtctggagcagggacttgcaaatgggaacagtgaagagagacagcatctccttcctctgaagattctgttcagaatggataaaggttcagcatcctccctggatggggcagcttagcagacccagaggaaagcactgggaggaatgagaaagtagcgactagacaaaaatgaaaactctttaagaagcattgctgaagttacaggggaaaaagattaagacaactgaggttaagggcctgactccagatcacacagcaagggagatggcaaaatcaagatttcaacccaggaaacctgcctcccatgcctatgttaatcactacacccttcccacaataaataatcaaataagcta

SEQ ID NO: 5085 - protein, 30 aa, Homo sapiens
NCWFLTRNKSCLGSWRGSVLSGAGTCKWEQ

SEQ ID NO: 5086 - DNA, 757 bp, Homo sapiens
aacccgcgcgggtccctttccactctgtggaagctttgttcttttgctttttgcaataaaccttgctactgctcactttttgggttaacactgcttttatgagttgtaacactcaccgcaaaggtctgcagcttcactcctgagccagctctgagaccgtgaacccaccagaaagaagaaactccgaacacatccgaacatcagaaggaataaactccagacgcgccaccttaagagctgtaacactcaccgcgaggatccgcggcttcattcttgaagtcagtgagaccaagaacccaccaattccagagacactactgtgtgggtttctgtggacagcagttctgccaaactgttttccagtgtggctgtaccattttgcattcccgccagcaatgaaacgaagtttctaatgcttcaccttgtcaccagtatttgatattatcagtgtcctggctactcaaataggaaaagcttaagggaaagatttttctgtgagctggtgctgatgttgtatgttccagcagatcttcaaagaaatgtaagataatttattgaaataaggaataaacttttttctgagttctacttgattgcctaaaagttacatttttataaagataaaatttgtacaattcaaatatatttaaataacttttcattgatcaagagctatcatcaaaccctcgattacactgtgtgaatgactgcatggacaagcatcatttttttttcattaataaaccaatatttatgc

SEQ ID NO: 5087 - protein, 51 aa, Homo sapiens
HSPRGSAASFLKSVRPRTHQFQRHYCVGFCGQQFCQTVFQCGCTILHSRQQ

SEQ ID NO: 5088 - DNA, 673 bp, Homo sapiens
aaagttggatctgcataaatagagaaaaattcatgtttatggagaagacaattgaatattgtgaagatgtctttcactaaaatgatctacaaattcaaagccatatctgtcaaaatcccagctgtcatttttatagctgtacacactgatacttaaaggaatgtgaaataacagtgacactttgggaagtattttggcagtttttttaaaaataaaatgtaagaaacagaaaaccaaatactgcacgttctcacttataagtgggaactaaatgatgagaactcacgaatacaaagatgggaacaacgcatatggggcctatcagaggctggaacgtgggagaagggagagaatcaggcaacaagttgacaaatggacatgaatttcacctctgagagtttcataagctggtattgtcctgacattgcaaagtgtttaccacaaagatcctgtacatccatcatccagggccagcgtttgcctgattctaattccactgacattgaaatctacagctctctgtgagtcatttatcacacttattaaaatgttccattgtgaattggaatagcaattcactattatttcagagtgctgcccaaggggcattctatgcagcaaatcttaatgctttattgaaatagtagtttggttttaataaatgattctttgc

SEQ ID NO: 5089 - protein, 36 aa, Homo sapiens
MMRTHEYKDGNNAYGAYQRLERGRRERIRQQVDKWT

SEQ ID NO: 5090 - DNA, 5858 bp, Homo sapiens
gaatgcaggtgagaaaaggcacggactctgcggctgcgaacccaaacttgggcaccgcacggtgcgcactgctcagccttcgcccccgtgggcgaaaggctgctgcggtttcaggcggctgcttcgtgactaatgaccttgcgcagagttgttaagaaaaaagagaaacccgcgctctccggggtgagaagggactgactctgggcgtctctgaagatggctcgggcttctctttggcgcgccggggggaccctgacactgaccgctctgtgacgcgagtagtctcccctgcaccgtgcccgaagcgacgtgccgggggatttttcattctcgatctgttgactggctcccccgctgcatgagcagagtcggagttgagactggcttgttgctggccccagcgcctggtgcaggaagcgactcacgtttgtctgggtggccggagccggagcagagcctgggtttggagtgagtgcctggaacgtgaattggactcaactcgagtagcagcaaagaccagcgggctggcaggcgggggaggctgcaggctcattccccacctcttcccagccccactgcccgtctgccggagcggttctggccccttccgacagagcggggactagagccggggattctccgcccgctgaggggatgactctgggttgggggagcgccgaacccgcggcgcgcagtgtcccgtgaactgtgagtactgcgactgaacggcggcaggcgagcgggcgattagcacccattgcatgaattatgaaacaataactttcggaagaagcaggaggaaaaaaagaagcatctatcgctgccctcccacccccattcccggccaactctccacgccgcttttgccccctccctcccctccctctcgctccttcctttccgggagaggggagaggactcgggggagggcaggcggccggccccggaggaggggggcgccgagggggctgtggttagaaggagcagtagcagcagcagcaggagaagatgctgaggatgcggaccgcgggatgggcgcgcggctggtgcttgggctgctgcctcctcctgccgctctcgctcagcctggcggccgccaagcagctcctccggtaccggctggccgaggagggccccgccgacgtccgcatcggcaacgtggcttcagacctgggcatcgtgaccggatcgggtgaggtgactttcagcctggagtccggttccgagtacctgaagatcgacaacctcactggcgagctgagcacgagcgagcggcgcatcgaccgcgagaagctgccccagtgtcagatgatcttcgacgagaacgagtgcttcctggacttcgaggtgtcggtgatcgggccctcgcagagctgggtggacctgtttgagggtcaggtcatcgtgcttgacatcaacgacaacacgcccaccttcccgtcgcccgtgctcacgctcacggtggaggagaatcggccggtgggcacactttacctgctgcccacagccaccgaccgcgacttcggccgcaacggcatcgagcgctacgagctgctccaggagcccggaggcggcggcagcggcggcgagagccggcgcgccggggcggccgacagcgccccctaccccgggggcggcgggaacggcgcgagcggcggcggctcgggaggctccaagcggcggctggacgcatcagagggcggcggcggcaccaaccccggcggccgcagcagcgtgttcgagctgcaggtggcggacaccccggacggcgagaagcagccgcagctgatcgtgaagagcgtgtacgaggccgacttggctgagaacagcgccccggggacccccatcctgcaactgcgcgcagccgacttggacgtgggggtcaacgggcagatcgaatacgtgttcggggcggccaccgagtcggtgaggcggctgctgcgccttgacgagacgtccggctggctcagcgtcctgcaccggatcgaccgcgaggaggtgaaccagctgcgcttcacggtcatggcccgcgaccgcgggcagccccccaagaccgacaaggccaccgtggtccttaacatcaaagacgagaacgacaacgtgccgtccattgaaatccgcaagattgggcgcatccccctcaaggacggggtggccaacgtggccgaggacgttctggtcgacacccccatcgctctggtgcaggtgtccgaccgagaccaaggcgagaacggggtggtcacctgcaccgtggtgggcgacgtgcccttccagctcaagccagccagcgacaccgagggcgaccagaacaagaaaaagtacttcttgcacacctcgacccctctggactatgaggccacccgggagttcaacgtggtcatcgtggcggtggactcaggcagccccagcctctcgagcaacaactccctgattgtcaaggtgggagacaccaacgacaacccgcccatgttcggccagtcggtggtggaggtttacttccctgagaacaacatcccgggcgagagggtggccacggtgctggcgacagacgcagacagcggtaagaacgccgagatcgcctactcgctggactcctctgtgatggggatctttgccatcgatcccgattctggggacatcctggtcaataccgtgctggaccgcgagcagactgacaggtatgagtttaaagttaacgccaaagacaaaggcatccccgtgctgcagggcagcactacggtgattgtgcaggtggctgataaaaatgacaatgaccctaagtttatgcaggacgtcttcaccttttatgtgaaagaaaacttgcagcccaacagccctgtggggatggtcaccgtgatggatgctgacaaggggcggaatgcagagatgagcctgtacatagaggagaacaataacattttttctattgaaaatgacacggggaccatttactccacaatgtcttttgaccgggaacatcagaccacatacactttcagagtcaaggctgtggatgggggagatcctcccagatctgccacagctacagtctcgctttttgtgatggatgaaaatgacaatgctcccacagttacccttcccaaaaacatttcctacactttactgccaccttcgagtaatgtcaggacagtagtagctacagtgttggcaacagacagtgatgatggcatcaatgcagacctgaactacagcattgtgggaggaaatcccttcaagctgtttgaaattgatcccactagtggtgtggtttccttagtgggaaaactcacccaaaagcattatggcttgcacaggttggtggtgcaagtgaatgacagtgggcagccttcccagtccaccacgactctggtgcacgtgtttgtcaatgaaagtgtttctaatgcaactgcgattgactcccagatagctagaagtttgcacatcccactcacccaggatatagctggtgacccaagctatgaaattagcaaacagagactcagtattgtcattggcgtggttgctggcattatgacggtgattctaatcatcttaattgtagtgatggcaaggtactgcaggtccaaaaataaaaatggctatgaagccggcaaaaaagatcacgaagacttttttacaccccaacagcatgacaaatctaaaaagcctaaaaaggacaagaaaaacaaaaaatctaagcagcctctctacagcagcattgtcactgtggaggcttctaagccaaatggacagaggtatgatagtgtcaatgagaagctgtcagacagcccaagcatggggcgatacaggtccgttaatggtgggcccggcagtcctgacctggcaaggcattacaaatctagttccccattgcctactgttcagcttcatccccagtcaccaactgcaggaaaaaaacaccaggccgtacaagatctaccaccagccaacacatttgtgggagcaggagacaacatttcaattggatcagatcactgctctgagtacagctgtcaaaccaataacaagtacagcaaacagccatttcgtagagtgacgttttctgttgtgagtcagcctcaggacccacatcaggggtcactgcagagttgctatgacagcgggctggaggagtcagaaacaccaagcagtaagagttcatcagggccaagactgggtgcgcttccactcccagaggacaactatgaaaggaccacgccggatggcagtgttgattcaaggcctcttccagatgtagccctgactgggaagtgcactcgtgagtgtgatgagtatggccactcagactcctgctggatgccggtccgcacttctccggagaggaagaagagccagcctaaactgtccactttcatgcctgttgatgaacgaggaagccaggaaaagctggccaatggggaggccgccatcatgggtgaccgcaacagaaacctcctgaacaaaaagttgacctcatcctatgagaccttcagtgcagctagtttcagcaaaaatgaggaagccaaccctgaggatattccccttacaaaaacaggggaatataagccatctcctgtcaatactctcactagaagagaagtttacctgtaggctataaaggagcaacagcaaagttctttacatgtatgaaaaggagaataaggggcaaaaaccttacaaagcaaaacgtttaatcacaaagagggggctaccaaagagacaaagctttgcctgccacttctgcctccagatcaggcctttagtgatactgttagcctgattctactgtacaatgtagaaaccatccttgttacttgcatgtctaaccccttcactgattcccaacactcactttctcttccccacccctctccaaaaaaaaaaaaacaaaaagaaaagaaaaaaaaagggggatagttgcaagtttctttcacagtaactgtacgaagcctgattagcagaacacaacacaccctcattatccctaagctgaagcatgattttagtcactttgattttgttcgagtgtcatctggctggtcaaaaataagcaggacagataaaatgtatttcagacataccatcagaaaatggtttatcaccatcaaaggcaatcctttgaaagtgatagagtccctctaaaggtacagtccttagaaagagggactgtattaaaaagtattttgggaatatcaaagctttaatattccaacaaagactaagagaaaaacaatactcagtgggtgattgcagtcctaaattgtcatatgttgttattttcaggtcaagagcatcaacttcaattccatacattcaccaaatattctcagtatacacacagtcttgattacatgtatcaatttcaccagttatgacttctaaaaattatatatattttttcagaacaagaccactattattaactaacttgaacaattgtatcatccaaaggccaaagatcatatggcagatcagggaagtcatgaagttgatttggtcttgacgtggaaaaccattaaacaacaaaagcaactgaacccatgtatgcacagaaacaatcaaacactagttcattttatagtgcccaggaaaatgttccttcttttaaaatggattttatttgaaagcgcagaaaatgaaaactagtgagatatatttttggtattataataggcaattggttgaggttcaagtttagtttcaggtaatattatcagggaagattccatgttttaaaatagtatttatggatcatgggtaggttaagaaagatgcattggcatatagtcttgatagttaagtccacgattatcattttagaatccaggctatgcttgctgctctttttatccacattt

SEQ ID NO: 5091 - protein, 1200 aa, Homo sapiens
MLRMRTAGWARGWCLGCCLLLPLSLSLAAAKQLLRYRLAEEGPADVRIGNVASDLGIVTGSGEVTFSLESGSEYLKIDNLTGELSTSERRIDREKLPQCQMIFDENECFLDFEVSVIGPSQSWVDLFEGQVIVLDINDNTPTFPSPVLTLTVEENRPVGTLYLLPTATDRDFGRNGIERYELLQEPGGGGSGGESRRAGAADSAPYPGGGGNGASGGGSGGSKRRLDASEGGGGTNPGGRSSVFELQVADTPDGEKQPQLIVKSVYEADLAENSAPGTPILQLRAADLDVGVNGQIEYVFGAATESVRRLLRLDETSGWLSVLHRIDREEVNQLRFTVMARDRGQPPKTDKATVVLNIKDENDNVPSIEIRKIGRIPLKDGVANVAEDVLVDTPIALVQVSDRDQGENGVVTCTVVGDVPFQLKPASDTEGDQNKKKYFLHTSTPLDYEATREFNVVIVAVDSGSPSLSSNNSLIVKVGDTNDNPPMFGQSVVEVYFPENNIPGERVATVLATDADSGKNAEIAYSLDSSVMGIFAIDPDSGDILVNTVLDREQTDRYEFKVNAKDKGIPVLQGSTTVIVQVADKNDNDPKFMQDVFTFYVKENLQPNSPVGMVTVMDADKGRNAEMSLYIEENNNIFSIENDTGTIYSTMSFDREHQTTYTFRVKAVDGGDPPRSATATVSLFVMDENDNAPTVTLPKNISYTLLPPSSNVRTVVATVLATDSDDGINADLNYSIVGGNPFKLFEIDPTSGVVSLVGKLTQKHYGLHRLVVQVNDSGQPSQSTTTLVHVFVNESVSNATAIDSQIARSLHIPLTQDIAGDPSYEISKQRLSIVIGVVAGIMTVILIILIVVMARYCRSKNKNGYEAGKKDHEDFFTPQQHDKSKKPKKDKKNKKSKQPLYSSIVTVEASKPNGQRYDSVNEKLSDSPSMGRYRSVNGGPGSPDLARHYKSSSPLPTVQLHPQSPTAGKKHQAVQDLPPANTFVGAGDNISIGSDHCSEYSCQTNNKYSKQPFRRVTFSVVSQPQDPHQGSLQSCYDSGLEESETPSSKSSSGPRLGALPLPEDNYERTTPDGSVDSRPLPDVALTGKCTRECDEYGHSDSCWMPVRTSPERKKSQPKLSTFMPVDERGSQEKLANGEAAIMGDRNRNLLNKKLTSSYETFSAASFSKNEEANPEDIPLTKTGEYKPSPVNTLTRREVYL

SEQ ID NO: 5092 - DNA, 749 bp, Homo sapiens
agtgaggcattctgaaattttactgaagctctaaaacttaacagctatggaaatgggaaagagccgaggtcagaatgagaaacacatccccacaggatttctgaccatcagtaacatgaattagctggtgtgcactctgctctgtaaccctggaatctcctttctactcggagggaaccagatgtacagcatgaagaagtatgccctttggaaatgtaaatgaatacagttaagaggctacaccgccctttaaaggagttcttctgatctcttaggagctttacattttgaagaacatggatggatgagaaacttgatgtggattagagaaggactccttctgtcacccaggctgaggtgcaatggcctgatcacagttcactgcagccttgaattcttagactcaagctactcatccacctcagcctcccaagtagctgggactacaggctcacaccacctcacctgggtactttctctcttttaaaaattttatttgttatctttttcaattttaatgaaaattttatacatatatatgtaacccatcagttaatatactttgcttgtatatgttatataaaaggtcacttcctcttgaatttgcaaaatagttgtttgcttagcacgaatgccaacaatatttttttaaatttaaagatagcctactctcatatagagcagatttttttaatatataaaaataattccaaattttattttattttctgttgcaaaggcaaataatc

SEQ ID NO: 5093 - protein, 60 aa, Homo sapiens
MRNLMWIREGLLLSPRLRCNGLITVHCSLEFLDSSYSSTSASQVAGTTGSHHLTWVLSLF

SEQ ID NO: 5094 - DNA, 4816 bp, Homo sapiens; identical to SEQ ID NO: 549

SEQ ID NO: 5095 - protein, 876 aa, Homo sapiens; identical to SEQ ID NO: 550

SEQ ID NO: 5096 - DNA, 7762 bp, Homo sapiens
gaaggtgggtaatgcccctgtcgctctgggctccagggcgcgcccccgcagcttccccagcggggtctgacgcctccgggccgaggtgcgccaggtggcgagggtgccaggcgcggccaagtcgcggcggtctgagtcagtcacccaactatgctgcggaaccagggaggccggctgggccgcccccgccgttgagctccggcttcccccgcgcggggcgcctgctccccgcccccgcgggcggagaggaagcggcggccgaggcgaggcgcgggagcacctgagcaaggcgcgggcgccgggctcggcgtttccggagctgagcgcgggtccgcggcccgcgctccccgcctccaggtgcggcggccgcgacacgccggccccactaacagcgccgcccgcgcggccgccgccaggcagcagaggcgactgcggacagccggcggggaccgggaaagaggaggcctggcgcctccggcagaggggcgaggaccgagcgcccaaggctgggagagacgccggcgctgagcttcccagcgccgcctcacctcgcttttcgaactccgcgacccgagcgcaaggcttaagcaggtaaagcagtcactgtgaagaaaataacattttaagaaacttttctgtcacaattgatagaggaaaagccagtagagaagtacatcttcttgtgtgtgtgtctcatcgtgccactttttgtaactcagcttagtaatgaagccaccattatgtcctcagtcagtgaagtaaatgtggatataaaagatttcctaatgagcattaatttggagcagtatctcttacatttccatgagtctggttttactactgtgaaggactgtgcagcaataaatgacagcctgctgcagaaaattggaatatcacctacaggtcaccgtaggaggatacttaaacagttacagataatcttgtcaaaaatgcaagatattccaatatatgcaaatgttcataaaactaagaagaatgatgacccttcaaaggattaccatgttccatcttctgatcagaatatctgcatagaactttccaattctggtagtgttcagacatctagcccaccgcagttggagactgttagaaaaaatcttgaagacagtgatgcaagtgtggaaagaagccagtatcctcaatcagatgataagctgtctcctcctaaacgcgacttccccactgcagaggaaccacacctgaatttgggttctttgaatgattctttatttggtagtgacaatattaaaatagaatcattgattacaaagaagactgtggatcacacagttgaagaacaacaaacagaaaaagttaaattgatcacagaaaatctcagtaagctccctaatgcagactctgaatgcctttcttttgttggctgttcaacatcaggaacaaattctggaaatggaacaaatggtttattagaaggatcaccaccatccccattctttaagtttcaaggagaaatgattgtaaatgacttgtatgttccatcatcaccaatcctagcacctgtgagaagtcgtagcaagttggtttcaagaccatctcgatcttttctgctaagacatcgacctgtaccagagattccagggtcaacaaaaggagtttctgggagctatttccgtgaaagaagaaatgttgctacctcaactgaaaaatctgtggcatggcaaaattcaaatgaggagaattcatcttccatctttccttatggagagacctttctcttccagagactagaaaattccaagaagcgatctataaagaatgaatttttgacccagggagaagcactcaaaggggaagcagctactgcaacaaactcttttatcatcaaatcaagcatatacgataacagaaaggagaaaataagcgaggacaaggtggaagatatttggatacctcgagaggacaaaaacaattttttgatagacactgcttctgaatcagaatactcaacagtagaagaatgctttcagagtttaagaagaaaaaattcaaaggcatctaaatctaggactcaaaaagccttgattttggactccgttaataggcacagttatccgttaagctcaacaagtggaaatgctgattcatcagccgtttcttcacaggcaatatctccctatgcctgcttttatggagcatctgcaaagaaggttaaatcaggatggctggataaactctctcctcaaggaaaacgcatgtttcaaaagagatgggtgaaatttgatggccttagcatttcttactacaataatgagaaggagatgtattcgaaaggaataattcccctttctgctatatcaacagtacgagttcaaggagacaacaaatttgaagttgttacaacacaaagaacttttgtttttagagtagaaaaagaagaggagagaaatgactggatcagcatactattaaatgcactgaaatcacaatcccttacctcgcagtctcaagctgttgttacacctgagaaatgtggatatcttgaattgagaggctataaggcaaaaatttttactgtgttaagtggaaacagtgtgtggctttgcaaaaacgaacaggattttaagagtggacttggtattaccataattcctatgaatgtagcaaatgtaaagcaagtggaccgaactgtgaaacaatcttttgaaataatcactccctacaggagtttcagctttacagccgagactgaaaaggagaaacaagactggattgaagctgtgcagcaatcaatagcagaaactctctctgattatgaagtagctgagaagatttggttcaatgaatccaacaggagctgtgcagattgtaaagccccagatcctgactgggcatccatcaatctctgtgttgtcatctgtaagaagtgtgcaggacagcatagatctttaggaccaaaagattccaaggttagaagtctaaaaatggatgctagcatttggagcaatgaactcatcgagctttttattgtcattggaaacaaaagagcaaatgacttttgggctggtaatcttcaaaaggatgaagaattacatatggactcaccagtagaaaagagaaaaaactttattactcagaaatataaagaaggaaaattcagaaaaactcttttggcatctctcaccaaagaagaattaaataaggctctatgtgctgctgtagtgaaaccggatgttctagaaacaatggctttgctgttcagtggagcagatgtcatgtgtgccaccggagaccccgtgcatagcaccccctatctgctagccaagaaagctgggcaaagtctgcaaatggaatttctctaccataacaaattctcagatttccctcaacatgatattcattccgagggtgtattaagtcaagagtcttcccagtccacattcctctgtgactttttatatcaagctccttctgctgcttctaaactctcttcagagaaaaaactgcttgaagagacaaataaaaaatggtgtgttttggaaggaggcttcttgagttactatgaaaatgataagtctaccacacctaatggcaccattaatatcaatgaagttatctgcctggctatacacaaagaggacttctatttaaatactgggcccatctttatctttgagatctacttaccctccgaacgtgtgtttttatttggagctgaaacatctcaagctcaaagaaaatggacagaggcaatagccaagcattttgttcccttatttgctgaaaacttaacagaagctgactatgatttgattggtcaactcttctacaaagactgccatgccctggatcagtggagaaaaggctggtttgctatggacaaatccagcttgcatttttgccttcaaatgcaagaagttcagggagatagaatgcacttaagaagactgcaagagctaacaatcagcacaatggttcaaaatggggaaaaactggatgttttactcttggtagaaaaagggagaacattatacatccatgggcataccaagttggatttcacagtctggcatactgcaattgaaaaagcagcaggtacagatggtaatgctttacaagatcagcagctcagcaaaaatgacgttcccattatagtgaacagctgtatagcatttgttacacagtatggtttaggatgcaaatatatctatcaaaagaatggtgatcctttgcatataagtgaactcctggagagtttcaaaaaggatgcaagaagctttaaattgagggctggaaaacatcagcttgaagatgtgacggctgtgttgaaaagttttctctctgacattgatgatgcactgcttactaaggagctctacccatattggatctctgctttagatacgcaagatgacaaggaaagaattaaaaaatatggagcatttatacgttctcttccaggggtcaaccgagcaacactagcagctatcattgaacacctgtatagggttcagaaatgctcagaaatcaatcacatgaatgcccataatttggccttggtcttttcatcctgtttgtttcaaacgaagggacaaactagtgaagaagtgaatgtaattgaggacctaattaataattatgtagaaatatttgaggttaaagaagatcaagtcaaacaaatggacatagaaaatagctttattaccaagtggaaagacacccaagtttcccaggctggagatttgttaattgaagtatatgtagaaaggaaggaacccgactgtagtattataattcggatatctcctgtgatggaagcagaagaattaactaatgatatattagcgataaaaaatattattcctacaaaaggtgatatttgggccacatttgaagtcattgaaaatgaagagctagagcgtcctcttcactacaaggaaaatgtactggagcaggtgcttcggtggagttcattagctgaacctggctctgcttacctggtggtgaagagattcttaaccgctgacacaattaaacactgcagtgaccggagtacactgggaagcatcaaagaaggaatcttgaaaatcaaagaagaaccatccaaaatactatctggaaataagtttcaagaccggtattttgttttacgagatgggtttctctttctttacaaggatgtgaagagtagtaaacatgacaagatgttttctctcagttccatgaagttttatcgtggagtgaaaaagaaaatgaagcctccaacaagctggggattgaccgcatattctgagaaacatcactggcacctgtgttgtgatagttcacgaactcagacggagtggatgaccagtatctttattgcccagcatgaatatgatatatggccaccagctggaaaggaacgaaaacgttcaataaccaaaaatcccaaaattggaggtttgcctctgattcctatacagcatgaggggaatgcaaccttggcccggaaaaatattgagagtgcaagagcagaacttgaaaggctgcggctcagtgaaaagtgtgataaagagtccgtggactctagcttaaaggagagagcttccatggtggcccactgcctggagcacaaggacgataaacttcgaaatcgaccccgaaaacatcggagtttcaactgcctggaggacacagagcctgaagccccacttgggcaaccaaaaggccataaaggcctaaagacattgaggaagactgaggacaggaatagcaaagctactttggactctgatcataagttaccatcaagggtaattgaagaacttaatgtggttctacaacggtcaagaacccttccaaaagaattacaggatgagcagattttgaagtaggaaataaaatgaattgctccccagattatttttttaatattgtatgcaatctttatgtgtaactccaaaactgaactataagataattcataagaatttgcctattgataggcaaatttgtctatgcttaggcatttaaggagcatttaaaaatatgtatatatgtgactgaatgtaagattaactttattttggtctgaacaaaccttgtaaagttccattgtattaacgtgtgtaagaagacattgggttacttaggtggtcagtccttttaaagtagttgtctgttaagtggtataatttatgagcagaaatctcaaactgtactgtattgtataaaatgctgtgtttaaatgaagcctaagaaactatctgtaacatattttgcactttgagaaaccttgtatattaaattaccatatgtttttaggtttacagaagttctaccttagggaaaagaaagggaagtaaattgaaaaaggggggagaatttattgtagtggctgcctaaaaaccactggagtttttaaaagaagcaaggagttaaatgtcctgcaaaacaaggaagtgagctaagattcattctagttcactaatgaccagaacttgtcaatgagaaaccacttgttaagaaaaagtccagtgtttatttctcaagagtaatattcggccaacagatgtaaataatagcactagccactcttattaatatttatagtgttagaaaaccagccacattacagattcactacgtttgagctcattgttggtggctgctaagaggaaacttacactgcattggagaggttgtgtacacaggacctggcctggatgctgattgcactgtcattgtatgcaagcattttgtcttttttcagaatttctgactatacttttggtacgaacaaaattcatcaccacagggtcctgttgttttgtttgatttttagatttttttaaattattattaaggttgtaatgtttttctccgagttgtcagaaataactggaagaatacaatatatggccattatggagccaggggctagttggtggtttactatacatttgggggctacctggtcacatttaatctaggtttttttttctttttttaagtaaaggtgtggtctcttccctgtacttatgaataaggacaaagccctatttttgtttccacataaagatcagctactgaattggtgaatttcctgacagacaatgctatctaaccatagttcatgttaggggaagcatttttccatcagtttctttaaaattggattgtctggtgagttttgatattaaacattatgtagctaagttttttttttttagcatttcttttttatttttcaatctatattcacaggcccatacttcagtcagtccaatcatagtacagtgatgtggtggtagatgctatgaatttcttcattgtaaaatacggatcatttgtattttggggtgataaaatagttcaccatgggtatgagatatttattctttaaatcaaagtaaattagaatttttaaaaagcacaaaactgcaggacagtttatgaaataggtggcactattagggaatcttcctttaaagcaagaaatcatgttatttagaaagaaaaactaatcttaaacatactatttctaataaatatttatatttttatgaaataaagaggtatgtggaaattaatatttggtgatgttggacagtggaaaagtatctagagtttttacctgccttatctgaattcttcttgaaacttgagcttaaactctaatagctgtttccctttctattctgaacaactgtctccatttttcaagtgtgagagataagggctaatgatgacatctcatttattttgagtaaacattaaaattgttttacaagtctacttg

SEQ ID NO: 5097 - protein, 1704 aa, Homo sapiens; identical to SEQ ID NO: 548

SEQ ID NO: 5098 - DNA, 209 bp, Homo sapiens
gtgactttttatatcaagctccttctgctgcttctaaactctcttcagagaaaaaactgcttgaaggagcactttggctttggtcaaagcgtgacagccagatgacagtagaatggccgagcatttttatcctttgaattagatgtttttggttctttcgacaattggtttttgtcatcctttactcagcctaaccaataataaatgtc

SEQ ID NO: 5099 - protein, 34 aa, Homo sapiens
VTFYIKLLLLLLNSLQRKNCLKEHFGFGQSVTAR

SEQ ID NO: 5100 - DNA, 3120 bp, Homo sapiens
aggcaccaagttatttactcggtagagatcatgaatttgcccgggtgtctgtgctgccccgcaccctgcttgttaaccacgttaagacgactggcctgttaattaactttaattacgatcatttggcttccacctgcctgaacccgataccttacacgggaacctgtatgatgcttaagcaggtaaagcagtcactgtgaagaaaataacattttaagaaacttttctgtcacaattgatagaggaaaagccagtagagaagtacatcttcttgtgtgtgtgtctcatcgtgccactttttgtaactcagcttagtaatgaagccaccattatgtcctcagtcagtgaagtaaatgtggatataaaagatttcctaatgagcattaatttggagcagtatctcttacatttccatgagtctggttttactactgtgaaggactgtgcagcaataaatgacagcctgctgcagaaaattggaatatcacctacaggtcaccgtaggaggatacttaaacagttacagataatcttgtcaaaaatgcaagatattccaatatatgcaaatgttcataaaactaagaagaatgatgacccttcaaaggattaccatgttccatcttctgatcagaatatctgcatagaactttccaattctggtagtgttcagacatctagcccaccgcagttggagactgttagaaaaaatcttgaagacagtgatgcaagtgtggaaagaagccagtatcctcaatcagatgataagctgtctcctcctaaacgcgacttccccactgcagaggaaccacacctgaatttgggttctttgaatgattctttatttggtagtgacaatattaaaatagaatcattgattacaaagaagactgtggatcacacagttgaagaacaacaaacagaaaaagttaaattgatcacagaaaatctcagtaagctccctaatgcagactctgaatgcctttcttttgttggctgttcaacatcaggaacaaattctggaaatggaacaaatggtttattagaaggatcaccaccatccccattctttaagtttcaaggagaaatgattgtaaatgacttgtatgttccatcatcaccaatcctagcacctgtgagaagtcgtagcaagttggtttcaagaccatctcgatcttttctgctaagacatcgacctgtaccagagattccagggtcaacaaaaggagtttctgggagctatttccgtgaaagaagaaatgttgctacctcaactgaaaaatctgtggcatggcaaaattcaaatgaggagaattcatcttccatctttccttatggagagacctttctcttccagagactagaaaattccaagaagcgatctataaagaatgaatttttgacccagggagaagcactcaaaggggaagcagctactgcaacaaactcttttatcatcaaatcaagcatatacgataacagaaaggagaaaataagcgaggacaaggtggaagatatttggatacctcgagaggacaaaaacaattttttgatagacactgcttctgaatcagaatactcaacagtagaagaatgctttcagagtttaagaagaaaaaattcaaaggcatctaaatctaggactcaaaaagccttgattttggactccgttaataggcacagttatccgttaagctcaacaagtggaaatgctgattcatcagccgtttcttcacaggcaatatctccctatgcctgcttttatggagcatctgcaaagaaggttaaatcaggatggctggataaactctctcctcaaggaaaacgcatgtttcaaaagagatgggtgaaatttgatggccttagcatttcttactacaataatgagaaggagatgtattcgaaaggaataattcccctttctgctatatcaacagtacgagttcaaggagacaacaaatttgaagttgttacaacacaaagaacttttgtttttagagtagaaaaagaagaggagagaaatgactggatcagcatactattaaatgcactgaaatcacaatcccttacctcgcagtctcaagctgttgttacacctgagaaatgtggatatcttgaattgagaggctataaggcaaaaatttttactgtgttaagtggaaacagtgtgtggctttgcaaaaacgaacaggattttaagagtggacttggtattaccataattcctatgaatgtagcaaatgtaaagcaagtggaccgaactgtgaaacaatcttttgaaataatcactccctacaggagtttcagctttacagccgagactgaaaaggagaaacaagactggattgaagctgtgcagcaatcaatagcagaaactctctctgattatgaagtagctgagaagatttggttcaatgaatccaacaggagctgtgcagattgtaaagccccagatcctgactgggcatccatcaatctctgtgttgtcatctgtaagaagtgtgcaggacagcatagatctttaggaccaaaagattccaaggttagaagtctaaaaatggatgctagcatttggagcaatgaactcatcgagctttttattgtcattggaaacaaaagagcaaatgacttttgggctggtaatcttcaaaaggatgaagaattacatatggactcaccagtagaaaagagaaaaaactttattactcagaaatataaagaaggaaaattcagaaaaactcttttggcatctctcaccaaagaagaattaaataaggtattcaattaaacataacagcagacgtggattttaatgtctttttaatgatgtgccaagattcttgagaaaaagtaaaaaattttatactatctgacaaaattattaattttattttatttccttttgtgacattatttcagtggtttcccccttgtttcatttaaggattcattgtcaaaagagcataaattcttcctccataattgaagtttcctgctaactcttgttgccacaatctgaggatttggaagcaaatgggatccagtaaagtgaagtctgaggactgatataatgtgggaagaaaggatgagaagagatgtagaggcagcttattatttcaaggc

SEQ ID NO: 5101 - protein, 817 aa, Homo sapiens
MSSVSEVNVDIKDFLMSINLEQYLLHFHESGFTTVKDCAAINDSLLQKIGISPTGHRRRILKQLQIILSKMQDIPIYANVHKTKKNDDPSKDYHVPSSDQNICIELSNSGSVQTSSPPQLETVRKNLEDSDASVERSQYPQSDDKLSPPKRDFPTAEEPHLNLGSLNDSLFGSDNIKIESLITKKTVDHTVEEQQTEKVKLITENLSKLPNADSECLSFVGCSTSGTNSGNGTNGLLEGSPPSPFFKFQGEMIVNDLYVPSSPILAPVRSRSKLVSRPSRSFLLRHRPVPEIPGSTKGVSGSYFRERRNVATSTEKSVAWQNSNEENSSSIFPYGETFLFQRLENSKKRSIKNEFLTQGEALKGEAATATNSFIIKSSIYDNRKEKISEDKVEDIWIPREDKNNFLIDTASESEYSTVEECFQSLRRKNSKASKSRTQKALILDSVNRHSYPLSSTSGNADSSAVSSQAISPYACFYGASAKKVKSGWLDKLSPQGKRMFQKRWVKFDGLSISYYNNEKEMYSKGIIPLSAISTVRVQGDNKFEVVTTQRTFVFRVEKEEERNDWISILLNALKSQSLTSQSQAVVTPEKCGYLELRGYKAKIFTVLSGNSVWLCKNEQDFKSGLGITIIPMNVANVKQVDRTVKQSFEIITPYRSFSFTAETEKEKQDWIEAVQQSIAETLSDYEVAEKIWFNESNRSCADCKAPDPDWASINLCVVICKKCAGQHRSLGPKDSKVRSLKMDASIWSNELIELFIVIGNKRANDFWAGNLQKDEELHMDSPVEKRKNFITQKYKEGKFRKTLLASLTKEELNKVFN

SEQ ID NO: 5102 - DNA, 1445 bp, Homo sapiens
agggtcctcccacccccgcgtgggccatcccggcccagccttcccgaggccccgggtactcgccttgcgctcgggtcgcggagttcgaaaagcgagacagggtctcactttgtcacccaggctggagtgtagtgaggcaatctcagctcattgcgcctccgcctctgggtccaagctatcctcccacgtcagcctcccaggtagctgggattacaggcgcgcaccatcagccaagacatagtctcatcactctgtcacccaggctggaatgtagtagtgcaatctcggctctctgcaaccttcacctcctggattcaagtgattctcctgcctcagcctcctgagtagctgggattacagtgcgagggatatttctgctgacaattcaacattcaaagggatgagtgtatgacgtctctaagagatgtcatggagtgcatgtagaagggactttttatggagaactacttctcaaatcactattcacatcctggtagaagtcaagcaatgaagatggcacagaaacacatcccaaatactatgataccataaagtatactgtagcaatgcattggcacaccctcatttgaacatttgtctcagaagattttgacagaagataaaattgtctggtttttatttcattggtttcatgaaaatttatttcactggtttcatgtcacaggcccatgactgtataaagagtcataatctttacaaacacaacaatgactcacagcgacatgttgcaaagctgtaatcgaaaacactgatgttgatttcagaggccattaatggtgttaagaaggcgcttttgttaaccaaataattgaatactcgtaattacttttcagttctagttcagttcttgacaccaaaacaagccattttctttacatagtgaatgcagaacttgccagtaagaactttcatactaaacttctatgtaaaacaaaacatgtcaaaatcagtaactactttaatggaatggtaaagaatttacttaaacacaaaggaatgaaaatatctctgcaaatatgtctattgacttttcaaatttggtgacttctttcgaattaattcccttacgtctgttcctcatccacataaaaatgacaaaaatgaaagataattttccagcctataattaaatttctccattgttggtatatgttttttcaaatacatttttcagttttcataattcatatgagaattattaaaagggagttagttgcctttaggaccttatttggagcctaattcttaaaaattgtgtaaaaataattgtgacttttaagagacaattggaaatttgaacctgaccacatttttgtgatattaaggaattttattaattattttctaggtgggggaatgatatgatgatattcttaaaataatgtgtggattgtttattacatttcaacattttcttaatcatc

SEQ ID NO: 5103 - protein, 31 aa, Homo sapiens
MENYFSNHYSHPGRSQAMKMAQKHIPNTMIP

SEQ ID NO: 5104 - DNA, 1043 bp, Homo sapiens
ggtgtggtgagtgaaatggagaaggctaaactttttcttcccacatgctcacttccttgcttgttcgctagctgctgcatctggcccctcaagggtaaagtcaaggggaaaaggagattgagaggaaggacagtctgtgaattgggtctcaccgtgtttcccaggctgaagtacagtgttgtgatatcagttcattgcaacttctgtcttctgagctcaagcaatcctcttgcctcagcctctcaagtagctgggactgactacaggcatgaaccaccacacctggctaattttttttgtatttttgtcgaaaagacagtttcgccatgttgtacagaactacttctcaaatcactattcacatcctggtagaagtcaagcaatgaagatggcacagaaacacatcccaaatactatgataccataaagtatactgtagcaatgcattggcacaccctcatttgaacatttgtctcagaagattttgacagaagataaaattgtctggtttttatttcattggtttcatgaaaatttatttcactggtttcatgtcacaggcccatgactgtataaagagtcataatctttacaaacacaacaatgactcacagcgacatgttgcaaagctgtaatcgaaaacactgatgttgatttcagaggccattaatggtgttaagaaggcgcttttgttaaccaaataattgaatactcgtaattacttttcagttctagttcagttcttgacaccaaaacaagccattttctttacatagtgaatgcagaacttgccagtaagaactttcatactaaacttctatgtaaaacaaaacatgtcaaaatcagtaactactttaatggaatggtaaagaatttacttaaacacaaaggaatgaaaatatctctgcaaatatgtctattgacttttcaaatttggtgacttctttcgaattaattcccttacgtctgttcctcatccacataaaaatgacaaaaatgaaagataattttccagcctataattaaatttctccattgttggt

SEQ ID NO: 5105 - protein, 118 aa, Homo sapiens
MEKAKLFLPTCSLPCLFASCCIWPLKGKVKGKRRLRGRTVCELGLTVFPRLKYSVVISVHCNFCLLSSSNPLASASQVAGTDYRHEPPHLANFFCIFVEKTVSPCCTELLLKSLFTSW

SEQ ID NO: 5106 - DNA, 3175 bp, Homo sapiens
aggctgagaccggtgcgccgcgcgctagtggccgctcttccgcgggctagcgggcggtgggggcgccagcagcgcggaaggcgggcacgcgggccatggctccctgggcggaggccgagcactcggcgctgaacccgctgcgcgcggtgtggctcacgctgaccgccgccttcctgctgaccctactgctgcagctcctgccgcccggcctgctcccgggctgcgcgatcttccaggacctgatccgctatgggaaaaccaagtgtggggagccgtcgcgccccgccgcctgccgagcctttgatgtccccaagagatatttttcccacttttatatcatctcagtgctgtggaatggcttcctgctttggtgccttactcaatctctgttcctgggagcaccttttccaagctggcttcatggtttgctcagaattctcggggcggcacagttccagggaggggagctggcactgtctgcattcttagtgctagtatttctgtggctgcacagcttacgaagactcttcgagtgcctctacgtcagtgtcttctccaatgtcatgattcacgtcgtgcagtactgttttggacttgtctattatgtccttgttggcctaactgtgctgagccaagtgccaatggatggcaggaatgcctacataacagggaaaaatctattgatgcaagcacggtggttccatattcttgggatgatgatgttcatctggtcatctgcccatcagtataagtgccatgttattctcggcaatctcaggaaaaataaagcaggagtggtcattcactgtaaccacaggatcccatttggagactggtttgaatatgtttcttcccctaactacttagcagagctgatgatctacgtttccatggccgtcacctttgggttccacaacttaacttggtggctagtggtgacaaatgtcttctttaatcaggccctgtctgcctttctcagccaccaattctacaaaagcaaatttgtctcttacccgaagcataggaaagctttcctaccatttttgttttaagttaacctcagtcatgaagaatgcaaaccaggtgatggtttcaatgcctaaggacagtgaagtctggagcccaaagtacagtttcagcaaagctgtttgaaactctccattccatttctataccccacaagttttcactgaatgagcatggcagtgccactcaagaaaatgaatctccaaagtatcttcaaagaataaatactaatggcagatctgcgatttctgggtccactttctgagatgctttctaaaaccaaccaactgataaaaagtagatgagacttctccaagctgcttcacaagcaaactaaccgaaaaaccgaaaatatacaaacagcttcacacacacacacacacacacacacacacacacacacacacaaaggaagatcatcaatggctgcggtagcctagtaggaatggactatataataatatagcaggtgctcaataactgtttgttgcatttcagtaaaagcagaataacctttcaaaataataacaggctgggtgcaatggctcacacctgttaatcccagcacttcgggaggccaaggtgggcagttcgcttgggcccaagagttcgagaccagcctgggcaacatggtgaaaccctatctccgtgaaaaaatatgaaaattagccaagagtggtggcacatgcctgtagtcccagatacttgggagtgggctgagatgggagaatcgcttgagcccaggaggtcaagggtacagtgagccgaggtcatgccactgcactccagcctggcctgggcaacagagcaagaccctgtctcaaaataataataatatataattttacaccaaaagtttcaggaaaaaacgagtttgttggagttagtttatactttcacatatcaccacaaagatctccagttaaataactatcaatatccatttccattcatctccccctcaaatcatagcctaacagaacactttgaaagctcttttatttaatatttttttacatcctttgaagggagtgcttcaaaaatgaaagcatcagaagataaaatatttttatatttatgcatagcaagccttcgtgaacggaagtgacacactctggattgaataatactgtagcctcattcatatgtagttattcaaattggattaatgtctgtgtgagtttatttgaactagcagaaagtatctgaagatattcaggaataaagtttatacttaaaatagcttatgttaaagaaaatacctgtgattaattcagagggaaataaatgcatggtataaaagaaaaccaaaaacttaaaaaataatactatagcctgagcaacacattaaaactgcacacttgtgcagcgtaagattctctggcttattggctgaggtgttaagtttattccttttatgaagatgtcctattacagtcagctaagcactaaagctttgcatttatatgtactttgctatgggggaaagaaccttatgattaataagacacatatcaaatgcatagtcaatcattcccacccccatccctggagctgtaacccaaaactgttaaactaagattcctttgttttttttgtttttttgagatggagtctcactctgtcgcccagactggagtgcagtggtgggatcctggctcactgcaacctccgccttctgggttccagcgattctcctctgcctcagcctcccaagtagctgggattacaggcacatgccaccatgcccaggtaattgttgtatttttagtagagatagagtttcaccatgttggccaggctggtctcaaactcctgacctcaggtgatccacctgcttcggcctcccaaagtgctgggattacaggtgtaagtcactgctcccggatgcatgtcaagcacattggaaagttcttacaacaattctgatggaggattttctctcccatcaaccaaacaccacttaagattaacctgtggctcagtctacttaaataaatgccatatttattttacttatcatttagaatttgccattctcaggaacaaaactttttgtacattggaaatggaaaacattgcagtttggtcttaatttccacatgaatatcaagtgtaatttttaataaattatttggagaaaaatgta

SEQ ID NO: 5107 - protein, 318 aa, Homo sapiens
MAPWAEAEHSALNPLRAVWLTLTAAFLLTLLLQLLPPGLLPGCAIFQDLIRYGKTKCGEPSRPAACRAFDVPKRYFSHFYIISVLWNGFLLWCLTQSLFLGAPFPSWLHGLLRILGAAQFQGGELALSAFLVLVFLWLHSLRRLFECLYVSVFSNVMIHVVQYCFGLVYYVLVGLTVLSQVPMDGRNAYITGKNLLMQARWFHILGMMMFIWSSAHQYKCHVILGNLRKNKAGVVIHCNHRIPFGDWFEYVSSPNYLAELMIYVSMAVTFGFHNLTWWLVVTNVFFNQALSAFLSHQFYKSKFVSYPKHRKAFLPFLF

SEQ ID NO: 5108 - DNA, 1617 bp, Homo sapiens
ggtgcaatcctggctcactgcaacctctgcctcccaggttcaagtgattctcctgcctcagcttcccaagtagctgggactacaggcgtgtgccaccacgaccagaggccaggtgcagtgcatgtaatcccagcactttgggagactgagatgggaagatcgcttgaggccaggagtgcaagaccagcctgggcaacacagcaagaccttgattctactaaaaaaaaaaaaggatccttcaacttcaacaataataacacaagggaagtgaagaaaaacactttctaaggaaatctctctctgagctaccatcctgctagggagagcctgaaagcagaatgctgacttgactagctctggtcaatgaaagaaatcaccagtggaaaggctaccagggggctttctcaaaagagagggacagtaaactgcaagatgaacaactcaatgccatccaggtctggatgagaaagaacagtcgagagactgagtttcaggagtggaaacactcaaagcatcatcttccactttcttctccggctgctaggaagaagggaaaaacacagaccttctgaggacctgcggagcaaaccactggcttcagaaaagcaaacagggacttccctctgcgcagcaggaagcagttagcctagtcggaggcttgactgaagaaacaaatgagggaaggcagaagttgagacgcagccagtagaggaaactccgggagaggcaggcagcgtcacttgaagaaaagctctattgtgatgggaacaatcacaggaactaagcggcaacaaaatggctccccaccccctctgcaaatcccaactccatgcaagcactctcccttccctcattttcttttctttttttttgagatggagtctcgctctgttgcccaggctggagtgcagtagcgcgatctcggctcactgcaacctccaccttctggtttcaagcaattctcctgcctcagcctccccagtagctgggactacaggcgtgtgccaccacgcctggctaatttttttttttaatttttagtagagacagagtttcaccatgttggccaggctggtctcgaactcctggcctcaagtgatccacctgcctcagcctcccaaagtggtgggattacaggtgtaagcgaccacgcccggccttttaaaatcgacttgagtctcatctcctgaaatgcaaaatgcattgggcctgtctcttacttctgcatgtctcataatgcttagcacagcacaagccccgagagcgcatcatacaccctggggtggggagctcctggcagggctggatccactcaccattcctgccatccattggcacttggctcagcacagttaggccaacaaggacataatagacaagtccaaaacagtactgcacgacgtgaatcatgacattggagaagacactgacgtagaggcactcgaagagtcttcgtaagctgtgcagccacagaaatactagcactaagaatgcagacagtgccagctcccctcctacaattcagaaggcaacagggtcagcatttctcttctgggattaatccaaagttttgtttttctgtactgttaagcaaagtattaaatcccatctaacatc

SEQ ID NO: 5109 - protein, 45 aa, Homo sapiens
MGRSLEARSARPAWATQQDLDSTKKKKGSFNFNNNNTREVKKNTF

SEQ ID NO: 5110 - DNA, 922 bp, Homo sapiens
ggtctgcagtgaaggtcccaaagtcccagacaacttgaagaagctgagtgagaaggccatgcagatatcttggagaagtgcattccaggcagaggaaaagccagtgcagagacactgaagcagggcatgactgatgtgtataaggagcatcatatacatgatcatctacagtccactgaggagaatagcagacgagaggccaggtgcagtgcatgtaatcccagcactttgggagactgagatgggaagatcgcttgaggccaggagtgcaagaccagcctgggcaacacagcaagaccttgattctactaaaaaaaaaaaaggatccttcaacttcaacaataataacacaagggaagtgaagaaaaacactttctaaggaaatctctctctgagctaccatcctgctagggagagcctgaaagcagaatgctgacttgactagctctggtcaatgaaagaaatcaccagtggaaaggctaccagggggctttctcaaaagagagggacagtaaactgcaagatgaacaactcaatgccatccaggtctggatgagaaagaacagtcgagagactgagtttcaggagtggaaacactcaaagcatcatcttccactttcttctccggctgctaggaagaagggaaaaacacagaccttctgaggacctgcggagcaaaccactggcttcagaaaagcaaacagggacttccctctgcgcagcaggaagcagttagcctagtcggaggcttgactgaagaaacaaatgtatccactgataatgggcaagagcctgaggctctggagccaagggggaaccctaaaaagctgattcaagtaagagaaccaaggatcatgcaattccacatggccacctcgaagcaggaatccgttaatgatagtaaaggactgatgaaaatcca

SEQ ID NO: 5111 - protein, 81 aa, Homo sapiens
MCIRSIIYMIIYSPLRRIADERPGAVHVIPALWETEMGRSLEARSARPAWATQQDLDSTKKKKGSFNFNNNNTREVKKNTF

SEQ ID NO: 5112 - DNA, 454 bp, Homo sapiens
ctgcggtagcctagtaggaatggactatataataatatagcaggtgctcaataactgtttgttgcatttcagtaaaagcagaataacctttcaaaataataacaggctggtctcaaactcctgacctcaggtgatccacctgcttcggcctcccaaagtgctgggattacaggtgtaagtcactgctcccggatgcatgtcaagcacattggaaagttcttacaacaattctgatggaggattttctctcccatcaaccaaacaccacttaagattaacctgtggctcagtctacttaaataaatgccatatttattttacttatcatttagaatttgccattctcaggaacaaaactttttgtacattggaaatggaaaacattgcagtttggtcttaatttccacatgaatatcaagtgtaatttttaataaattatttggagaaaaatgta

SEQ ID NO: 5113 - protein, 67 aa, Homo sapiens
MSSTLESSYNNSDGGFSLPSTKHHLRLTCGSVYLNKCHIYFTYHLEFAILRNKTFCTLEMENIAVWS

SEQ ID NO: 5114 - DNA, 924 bp, Homo sapiens
ggccgatgtgatgatcctcagggaatacaaaaagcctcctagcagccttctgttaaaaactttttggtagggatgagtctttctagctactctaagacacatctgatcaataaaacgcccatcccggagcagcatcttggccctccggagatcaacgtttatagcgggctcctcttggactctccctctccctttccctaaaggagcgggcaagaccaggcctcaccggaaaacagcgcagccgaccgccctccaccccgggagcaggggccgggctcccctcccccagccgaggccggcggagtgcggcgctttcaaaggcctggagcctggtactcggcgcagccggccctgcagcctcgctcgccccatcccggcccgctcacctcgacccgggccggctcggggccctgcacagccacaggctgcggctgcagctgctgggccggcgccggcggttctttgttccggtggctaaggtcttcatctgggccggcccggaccgcagccggggcccacagcagcggaaccagaaagagcagaagcagccggggcgccgatgcgcggccgttccctggagccgcggccgccatcccgcctgccgggccggccgcgcacgggcgccgcaagaggaagtgccggcgacgggaagcctcgaccccgaacagcctccgcggcgcgtcctcacgactcgccgccgccgccgcttagggagcagtcagcaccatccgggaggtgcaagcagcgggagtgaggtgaggggcaggccgaagtccgcagccccggctcggcgcccgtccttccagttttcaccaccttgagggtttagagccatcatccttctagtcctcattggtgactaactcccttaaaaaaagcaattaaaaaactataggagctttcctgatacctttcttgaaggac

SEQ ID NO: 5115 - protein, 64 aa, Homo sapiens
MRGRSLEPRPPSRLPGRPRTGAARGSAGDGKPRPRTASAARPHDSPPPPLREQSAPSGRCKQRE

SEQ ID NO: 5116 - DNA, 1368 bp, Homo sapiens
tttttttttttttctttgaaaaggtcttgtgttagggaggaactggcaagagagcacaaagcctgtcccaaagggctcttgaagcacattcttttttgcagatgagcatatccctttagcatatgagcaagaaagcggtggctaaaaagcctggaggtgagctggagccagatcagaagaaacctgaacatcactctcctaaaaaggctggactgaaattagtggaggcaactcaccgacgacttctgacaagatggcagaattcaatgttcgggaagattagttacgtggagatgggctggatgtggcctgggtgggagtgggggtttgagtgccacactggccgggattcagggagcagatactggaaatgacgacaaagcccacgactgggagaagggagaaatgttaaaacgctgccaagtgactaaggactaattctattaacagattaaaaagttgatttctagtatctattcagggaaggacaaaatacaggattctgttttacttataaatgtagttttggcatcccacatcgctgcagcacgctgtactgccggagactaattcctctgcgttcctaaaggctacttcctgctagccaaagcacatttttaaaaagtgagagtcatggttcataatccatatttggcaaaaagcacaggcagtgccaagttgaatttgggtaagcagtttggcataagctatttcaacaatgaaatggccgatgtgatgatcctcagggaatacaaaaagcctcctagcagccttctgttaaaaactttttggtagggatgagtctttctagctactctaagacacatctgatcaataaaacgcccatcccggagcagcatcttggccctccggagatcaacgtttatagcgggctcctcttggactctccctctccctttccctaaaggagcgggcaagaccaggcctcaccggaaaacagcgcagccgaccgccctccaccccgggagcaggggccgggctcccctcccccagccgaggccggcggagtgcggcgctttcaaaggcctggagcctggtactcggcgcagccggcggttctttgttccggtggctaaggtcttcatctgggccggcccggaccgcagccggggcccacagcagcggaaccagaaagagcagaagcagccggggcgccgatgcgcggccgttccctggagccgcggccgccatcccgcctgccgggccggccgcgcacgggcgccgcaagaggaagtgccggcgacgggaagcctcgaccccgaacagcctccgcggcgcgtcctcacgactcgccgccgccgccgcttagggagcagtcagcaccatccgggaggtgcaagcagcggg

SEQ ID NO: 5117 - protein, 83 aa, Homo sapiens [sequence omitted]

SEQ ID NO: 5118 - DNA, 535 bp, Homo sapiens
tggttccgctgctgtgggccccggctgcggtccgggccggcccagatgaagaccttagccaccggaacaaagaaccgccggcgccggcccagcagctgcagccgcagcctgtggctgtgcagggccccgagccggcccgggtcgagtcgtgggctttgtcgtcatttccagtatctgctccctgaatcccggccagtgtggcactcaaacccccactcccacccaggccacatccagcccatctccacgtaactaatcttcccgaacattgaattctgccatcttgtcagaagtcgtcggtgagttgcctccactaatttcagtccagcctttttaggagagtgatgttcaggtttcttctgatctggctccagctcacctccaggctttttagccaccgctttcttgctcatatgctaaagggatatgctcatctgcaaaaaagaatgtgcttcaagagccctttgggacaggctttgtgctctcttgccagttcctccctaacacaagaccttttcaaagaaaaaaaaaaaaa

SEQ ID NO: 5119 - protein, 68 aa, Homo sapiens
MKTLATGTKNRRRRPSSCSRSLWLCRAPSRPGSSRGLCRHFQYLLPESRPVWHSNPHSHPGHIQPIST

SEQ ID NO: 5120 - DNA, 699 bp, Homo sapiens
atattaaatcttcagaccctggtaggtatttactcaccgcacacctcaactctggattagccacatatcaagtgctcacagccacacatactcatggctcatggttacagtgctgggcagtgcagctcgaaagcatgacaggcttttgctaaccacaagccttcagccacacagtcctttttcccttcccacctccttttcgttatccccctcttcatccagattcctcaaggtccaactcaagtagaacctcttgagaaaggcctatcccagcaactccagctcttaatgatcctgacccactacaataaaactgaatgcaaactgtgggcaatgagtatgggaggcctattacagaaaaaagttcaagacagaaacactcaaggaattgaccttttcggattacaaatatgtataaatgtaatgctatcatttgtaataaagagacaaaataactaaatgtcggctgggctcagtggctcatgcctgtaatcccagcactttgggagatgggtggagcccttgagcccaggagttaagttgcagtgagcagagatgacatcactgcactccagcctgggcaacagagtgagaccctgtctcaaaacaaagagaaagaaaaaaacaactaaatgtccattgatagaaaactagttaaataaatggtagatccacataacggaatattatagagctaaa

SEQ ID NO: 5121 - protein, 56 aa, Homo sapiens
MILTHYNKTECKLWAMSMGGLLQKKVQDRNTQGIDLFGLQICINVMLSFVIKRQNN

SEQ ID NO: 5122 - DNA, 1567 bp, Homo sapiens
ctgagttcagggaatttccccagcatcccaaagcttgagtttcctgccagtcgggagggatgaatgcagataaagggagtgcagaaggcacgaggaaaccaaagtgctctgtatcctccagtctccgcgcctccacccagctcaggaacccgcgaaccctctcttgaccactatgagcctcccgtccagccgcgcggcccgtgtcccgggtccttcgggctccttgtgcgcgctgctcgcgctgctgctcctgctgacgccgccggggcccctcgccagcgctggtcctgtctctgctgtgctgacagagctgcgttgcacttgtttacgcgttacgctgagagtaaaccccaaaacgattggtaaactgcaggtgttccccgcaggcccgcagtgctccaaggtggaagtggtagcctccctgaagaacgggaagcaagtttgtctggacccggaagccccttttctaaagaaagtcatccagaaaattttggacagtggaaacaagaaaaactgagtaacaaaaaagaccatgcatcataaaattgcccagtcttcagcggagcagttttctggagatccctggacccagtaagaataagaaggaagggttggtttttttccattttctacatggattccctactttgaagagtgtgggggaaagcctacgcttctccctgaagtttacagctcagctaatgaagtactaatatagtatttccactatttactgttattttacctgataagttattgaaccctttggcaattgaccatattgtgagcaaagaatcactggttattagtctttcaatgaatattgaattgaagataactattgtatttctatcatacattccttaaagtcttaccgaaaaggctgtggatttcgtatggaaataatgttttattagtgtgctgttgagggaggtatcctgttgttcttactcactcttctcataaaataggaaatattttagttctgtttcttggggaatatgttactctttaccctaggatgctatttaagttgtactgtattagaacactgggtgtgtcataccgttatctgtgcagaatatatttccttattcagaatttctaaaaatttaagttctgtaagggctaatatattctcttcctatggttttagacgtttgatgtcttcttagtatggcataatgtcatgatttactcattaaactttgattttgtatgctattttttcactataggatgactataattctggtcactaaatatacactttagatagatgaagaagcccaaaaacagataaattcctgattgctaatttacatagaaatgtattctcttggttttttaaataaaagcaaaattaacaatgatctgtgctctgaaagttttgaaaatatatttgaacaatttgaatataaattcatcatttagtcctcaaaatatatatagcattgctaagattttcagatatctattgtggatcttttaaaggttttgaccattttgttatgaggaattatacatgtatcacattcactatattaaaattgcacttttatttttt

SEQ ID NO: 5123 - protein, 114 aa, Homo sapiens; identical to SEQ ID NO: 555

SEQ ID NO: 5124 - DNA, 1640 bp, Homo sapiens
ctgagttcagggaatttccccagcatcccaaagcttgagtttcctgccagtcgggagggatgaatgcagataaagggagtgcagaaggcacgaggaaaccaaagtgctctgtatcctccagtctccgcgcctccacccagctcaggaacccgcgaaccctctcttgaccactatgagcctcccgtccagccgcgcggcccgtgtcccgggtccttcgggctccttgtgcgcgctgctcgcgctgctgctcctgctgacgccgccggggcccctcgccagcgctggtcctgtctctgctgtgctgacagagctgcgttgcacttgtttacgcgttacgctgagagtaaaccccaaaacgattggtaaactgcaggtgttccccgcaggcccgcagtgctccaaggtggaagtggtagcctccctgaagaacgggaagcaagtttgtctggacccggaagccccttttctaaagaaagtcatccagaaaattttggacagtggaaacaagaaaaactgagtaacaaaaaagaccatgcatcataaaattgcccagtcttcagcggagcagttttctggagatccctggacccagtaagaataagaaggaagggttggtttttttccattttctacatggattccctactttgaagagtgtgggggaaagcctacgcttctccctgaagtttacagctcagctaatgaagtactaatatagtatttccactatttactgttattttacctgataagttattgaaccctttggcaattgaccatattgtgagcaaagaatcactggttattagtctttcaatgaatattgaattgaagataactattgtatttctatcatacattccttaaagtcttaccgaaaaggctgtggatttcgtatggaaataatgttttattagtgtgctgttgagggaggtatcctgttgttcttactcactcttctcataaaataggaaatattttagttctgtttcttggggaatatgttactctttaccctaggatgctatttaagttgtactgtattagaacactgggtgtgtcataccgttatctgtgcagaatatatttccttattcagaatttctaaaaatttaagttctgtaagggctaatatattctcttcctatggttttagacgtttgatgtcttcttagtatggcataatgtcatgatttactcattaaactttgattttgtatgctattttttcactataggatgactataattctggtcactaaatatacactttagatagatgaagaagcccaaaaacagataaattcctgattgctaatttacatagaaatgtattctcttggttttttaaataaaagcaaaattaacaatgatctgtgctctgaaagttttgaaaatatatttgaacaatttgaatataaattcatcatttagtcctcaaaatatatatagcattgctaagattttcagatatctattgtggatcttttaaaggttttgaccattttgttatgaggaattatacatgtatcacattcactatattaaaattgcacttttattttttcctgtgtgtcatgttggtttttggtacttgtattgtcatttggagaaacaataaaagatttctaaaccactga

SEQ ID NO: 5125 - protein, 114 aa, Homo sapiens; identical to SEQ ID NO: 555

SEQ ID NO: 5126 - DNA, 744 bp, Homo sapiens
actgcctgcagaaccccagcccgactttccctgcgcactgggatcctgctggaacctcagctgcaacatgagctccgcagccaggtcccgcctcacccgcgccacccgccaggagatgctgttcttggcgttgctgctcctgccagttgtggtcgccttcgccagagctgaagctgaagaagatggggacctgcagtgcctgtgtgtgaagaccacctcccaggtccgtcccaggcacatcaccagcctggaggtgatcaaggccggaccccactgccccactgcccaactcatagccacgctgaagaatgggaggaaaatttgcttggatctgcaagccctgctgtacaagaaaatcattaaggaacatttggagagttagctactagctgcctaagtgtgcactttcaatctaactgtgaaagaatcttctgatgtttgtattatccttcttatattatattaacgaaataaatcaagttgtggtatagtcaatctatttcttaataatactgcaaaaataatgctgacacatcacaatttcatattttaaaatttccagaattttaagcaaaaagcattatgaaggaaggcttggtttaataaagactgattttgttcagtgttatatgttagctgatacatatttgttcatttatgtgattgcagtactttatagctacatatttaccttgaatgttacaattagcttgccaataaatattagtagctcttaagcattac

SEQ ID NO: 5127 - protein, 104 aa, Homo sapiens; identical to SEQ ID NO: 559

SEQ ID NO: 5128 - DNA, 1103 bp, Homo sapiens; identical to SEQ ID NO: 560

SEQ ID NO: 5129 - protein, 107 aa, Homo sapiens; identical to SEQ ID NO: 561

SEQ ID NO: 5130 - DNA, 1168 bp, Homo sapiens
cacagagcccgggccgcaggcacctcctcgccagctcttccgctcctctcacagccgccagacccgcctgctgagccccatggcccgcgctgctctctccgccgcccccagcaatccccggctcctgcgagtggcactgctgctcctgctcctggtagccgctggccggcgcgcagcaggagcgtccgtggccactgaactgcgctgccagtgcttgcagaccctgcagggaattcaccccaagaacatccaaagtgtgaacgtgaagtcccccggaccccactgcgcccaaaccgaagtcatagccacactcaagaatgggcggaaagcttgcctcaatcctgcatcccccatagttaagaaaatcatcgaaaagatgctgaacagtgacaaatccaactgaccagaagggaggaggaagctcactggtggctgttcctgaaggaggccctgcccttataggaacagaagaggaaagagagacacagctgcagaggccacctggattgtgcctaatgtgtttgagcatcgcttaggagaagtcttctatttatttatttattcattagttttgaagattctatgttaatattttaggtgtaaaataattaagggtatgattaactctacctgcacactgtcctattatattcattctttttgaaatgtcaaccccaagttagttcaatctggattcatatttaatttgaaggtagaatgttttcaaatgttctccagtcattatgttaatatttctgaggagcctgcaacatgccagccactgtgatagaggctggcggatccaagcaaatggccaatgagatcattgtgaaggcaggggaatgtatgtgcacatctgttttgtaactgtttagatgaatgtcagttgttatttattgaaatgatttcacagtgtgtggtcaacatttctcatgttgaaactttaagaactaaaatgttctaaatatcccttggacattttatgtctttcttgtaaggcatactgccttgtttaatggtagttttacagtgtttctggcttagaacaaaggggcttaattattgatgttttcatagagaatataaaaataaagcacttatagaaaaaactcgtttgatttttggggggaaacaagggctacctttactggaaaatctggtgatttat

SEQ ID NO: 5131 - protein, 107 aa, Homo sapiens; identical to SEQ ID NO: 561

SEQ ID NO: 5132 - DNA, 834 bp, Homo sapiens
atcttagtttccgcaccgcagttcctcggtgtccacttcaggcttccggactggaaggacagccgggaataaaacgtgccggcgaggctcaggagtcattggccacagagacccagcccgagtttcccatcgcactgagcactgagatcctgctggaagctctgccgcagcatgagctccgcagccgggttctgcgcctcacgccccgggctgctgttcctggggttgctgctcctgccacttgtggtcgccttcgccagcgctgaagctgaagaagatggggacctgcagtgcctgtgtgtgaagaccacctcccaggtccgtcccaggcacatcaccagcctggaggtgatcaaggccggaccccactgccccactgcccaactgatagccacgctgaagaatggaaggaaaatttgcttggacctgcaagccccgctgtacaagaaaataattaagaaacttttggagagttagctactagctgcctacgtgtgtgcatttgctatatagcatacttcttttttccagtttcaatctaactgtgaaagaacttctgatatttgtgttatccttatgattttaaataaacaaaataaatcaagttgtagtatagtcaaaatacttcttaataatagtgcaaaaattgtgttgacacataacaatttcatggaagaaaaaaattccggtattttaagcaaaaagtattttgaaggaaggtgtgaatactggttatgcttggtgttacatgttggctgatacatattcatgcatttacatgattgcagtactttatagctacatatttaccttgaccattattattacctttgc

SEQ ID NO: 5133 - protein, 101 aa, Homo sapiens; identical to SEQ ID NO: 564

SEQ ID NO: 5134 - DNA, 602 bp, Homo sapiens
atcttagtttccgcaccgcagttcctcggtgtccacttcaggcttccggactggaaggacagccgggaataaaacgtgccggcgaggctcaggagtcattggccacagagacccagcccgagtttcccatcgcactgagcactgagatcctgctggaagctctgccgcagcatgagctccgcagccgggttctgcgcctcacgccccgggctgctgttcctggggttgctgctcctgccacttgtggtcgccttcgccagcgctgaagctgaagaagatggggacctgcagtgcctgtgtgtgaagaccacctcccaggtccgtcccaggcacatcaccagcctggaggtgatcaaggccggaccccactgccccactgcccaactgatagccacgctgaagaatggaaggaaaatttgcttggacctgcaagccccgctgtacaagaaaataattaagaaacttttggagagttagctactagctgcctacgtgtgtgcatttgctatatagcatacttcttttttccagtttcaatctaactgtgaaagaacttctgatatttgtgttatccttatgattttaaataaacaaaataaatc

SEQ ID NO: 5135 - protein, 101 aa, Homo sapiens; identical to SEQ ID NO: 564

SEQ ID NO: 5136 - DNA, 1740 bp, Homo sapiens
acttatctgcagacttgtaggcagcaactcaccctcactcagaggtcttctggttctggaaacaactctagctcagccttctccaccatgagcctcagacttgataccaccccttcctgtaacagtgcgagaccacttcatgccttgcaggtgctgctgcttctgtcattgctgctgactgctctggcttcctccaccaaaggacaaactaagagaaacttggcgaaaggcaaagaggaaagtctagacagtgacttgtatgctgaactccgctgcatgtgtataaagacaacctctggaattcatcccaaaaacatccaaagtttggaagtgatcgggaaaggaacccattgcaaccaagtcgaagtgatagccacactgaaggatgggaggaaaatctgcctggacccagatgctcccagaatcaagaaaattgtacagaaaaaattggcaggtgatgaatctgctgattaatttgttctgtttctgccaaacttctttaactcccaggaagggtagaattttgaaaccttgattttctagagttctcatttattcaggatacctattcttactgtattaaaatttggatatgtgtttcattctgtctcaaaaatcacattttattctgagaaggttggttaaaagatggcagaaagaagatgaaaataaataagcctggtttcaaccctctaattcttgcctaaacattggactgtactttgcatttttttctttaaaaatttctattctaacacaacttggttgatttttcctggtctactttatggttattagacatactcatgggtattattagatttcataatggtcaatgataataggaattacatggagcccaacagagaatatttgctcaatacatttttgttaatatatttaggaacttaatggagtctctcagtgtcttagtcctaggatgtcttatttaaaatactccctgaaagtttattctgatgtttattttagccatcaaacactaaaataataaattggtgaatatgaatcttataaactgtggttagctggtttaaagtgaatatatttgccactagtagaacaaaaatagatgatgaaaatgaattaacatatctacatagttataattctatcattagaatgagccttataaataagtacaatataggacttcaaccttactagactcctaattctaaattctacttttttcatcaacagaactttcattcattttttaaaccctaaaacttatacccacactattcttacaaaaatattcacatgaaataaaaatttgctattgacttgttgtcatctattattaattttaacaggattgttggggaaaaaaagctttaattttcctctcttttttgtatacttggtatttcacagtttgaacaacaaaagttactaaattgatgatcggtgtcattcttaatgtagtatgataacagttccaatttattaatcattttaatatgccaggaatactaagtgttttccatgcatgaactaaacaattttttaaaagatagatatgatctggttaaaagaacatcctctggagtttgaataatgaggtaacctggctctgccacttgttagctgtgtatatcaggtcatgttgcttaatttctctgtaccttaggttcttcatccctaaaatggggataatattgcctccctcatagagtttatggaaggattaaaaaagttaataaatttaaggtattt

SEQ ID NO: 5137 - protein, 128 aa, Homo sapiens; identical to SEQ ID NO: 566

SEQ ID NO: 5138 - DNA, 705 bp, Homo sapiens
acttatctgcagacttgtaggcagcaactcaccctcactcagaggtcttctggttctggaaacaactctagctcagccttctccaccatgagcctcagacttgataccaccccttcctgtaacagtgcgagaccacttcatgccttgcaggtgctgctgcttctgtcattgctgctgactgctctggcttcctccaccaaaggacaaactaagagaaacttggcgaaaggcaaagaggaaagtctagacagtgacttgtatgctgaactccgctgcatgtgtataaagacaacctctggaattcatcccaaaaacatccaaagtttggaagtgatcgggaaaggaacccattgcaaccaagtcgaagtgatagccacactgaaggatgggaggaaaatctgcctggacccagatgctcccagaatcaagaaaattgtacagaaaaaattggcaggtgatgaatctgctgattaatttgttctgtttctgccaaacttctttaactcccaggaagggtagaattttgaaaccttgattttctagagttctcatttattcaggatacctattcttactgtattaaaatttggatatgtgtttcattctgtctcaaaaatcacattttattctgagaaggttggttaaaagatggcagaaagaagatgaaaataaataagcctggtttcaaccctctaattcttgcct

SEQ ID NO: 5139 - protein, 128 aa, Homo sapiens; identical to SEQ ID NO: 566

SEQ ID NO: 5140 - DNA, 601 bp, Homo sapiens
acttatctgcagacttgtaggcagcaactcaccctcactcagaggtcttctggttctggaaacaactctagctcagccttctccaccatgagcctcagacttgataccaccccttcctgtaacagtgcgagaccacttcatgccttgcaggtgctgctgcttctgtcattgctgctgactgctctggcttcctccaccaaaggacaaactaagagaaacttggcgaaaggcaaagaggaaagtctagacagtgacttgtatgctgaactccgctgcatgtgtataaagacaacctctggaattcatcccaaaaacatccaaagtttggaagtgatcgggaaaggaacccattgcaaccaagtcgaagtgatagccacactgaaggatgggaggaaaatctgcctggacccagatgctcccagaatcaagaaaattgtacagaaaaaattggcaggtgatgaatctgctgattaatttgttctgtttctgccaaacttctttaactcccaggaagggtagaattttgaaaccttgattttctagagttctcatttattcaggatacctattcttactgtattaaaatttggatatgtgtttc

SEQ ID NO: 5141 - protein, 128 aa, Homo sapiens; identical to SEQ ID NO: 566

SEQ ID NO: 5142 - DNA, 2487 bp, Homo sapiens
agtggggagagatgagtgtagataaaaggagtgcagaaggcacgaggaagccacagtgctccggatcctccaatcttcgctcctccaatctccgctcctccacccagttcaggaacccgcgaccgctcgcagcgctctcttgaccactatgagcctcctgtccagccgcgcggcccgtgtccccggtccttcgagctccttgtgcgcgctgttggtgctgctgctgctgctgacgcagccagggcccatcgccagcgctggtcctgccgctgctgtgttgagagagctgcgttgcgtttgtttacagaccacgcaaggagttcatcccaaaatgatcagtaatctgcaagtgttcgccataggcccacagtgctccaaggtggaagtggtagcctccctgaagaacgggaaggaaatttgtcttgatccagaagccccttttctaaagaaagtcatccagaaaattttggacggtggaaacaaggaaaactgattaagagaaatgagcacgcatggaaaagtttcccagtcttcagcagagaagttttctggaggtctctgaacccagggaagacaagaaggaaagattttgttgttgtttgtttatttgtttttccagtagttagctttcttcctggattcctcactttgaagagtgtgaggaaaacctatgtttgccgcttaagctttcagctcagctaatgaagtgtttagcatagtacctctgctatttgctgttattttatctgctatgctattgaagttttggcaattgactatagtgtgagccaggaatcactggctgttaatctttcaaagtgtcttgaattgtaggtgactattatatttccaagaaatattccttaagatattaactgagaaggctgtggatttaatgtggaaatgatgtttcataagaattctgttgatggaaatacactgttatcttcacttttataagaaataggaaatattttaatgtttcttggggaatatgttagagaatttccttactcttgattgtgggatactatttaattatttcactttagaaagctgagtgtttcacaccttatctatgtagaatatatttccttattcagaatttctaaaagtttaagttctatgagggctaatatcttatcttcctataattttagacattctttatctttttagtatggcaaactgccatcatttacttttaaactttgattttatatgctatttattaagtattttattaggagtaccataattctggtagctaaatatatattttagatagatgaagaagctagaaaacaggcaaattcctgactgctagtttatatagaaatgtattcttttagtttttaaagtaaaggcaaacttaacaatgacttgtactctgaaagttttggaaacgtattcaaacaatttgaatataaatttatcatttagttataaaaatatatagcgacatcctcgaggccctagcatttctccttggataggggaccagagagagcttggaatgttaaaaacaaaacaaaacaaaaaaaaacaaggagaagttgtccaagggatgtcaattttttatccctctgtatgggttagattttccaaaatcataatttgaagaaggccagcatttatggtagaatatataattatatataaggtggccacgctggggcaagttccctccccactcacagctttggcccctttcacagagtagaacctgggttagaggattgcagaagacgagcgggagcggggagggcagggaagatgcctgtcgggtttttagcacagttcatttcactgggattttgaagcatttctgtctgaatgtaaagcctgttctagtcctggtgggacacactggggttgggggtgggggaagatgcggtaatgaaaccggttagtcagtgttgtcttaatatccttgataatgctgtaaagtttatttttacaaatatttctgtttaagctatttcacctttgtttggaaatccttcccttttaaagagaaaatgtgacacttgtgaaaaggcttgtaggaaagctcctccctttttttctttaaacctttaaatgacaaacctaggtaattaatggttgtgaatttctatttttgctttgtttttaatgaacatttgtctttcagaataggattctgtgataatatttaaatggcaaaaacaaaacataattttgtgcaattaacaaagctactgcaagaaaaataaaacatttcttggtaaaaacgtatgtatttatatattatatatttatatataatatatattatatatttagcattgctgagctttttagatgcctattgtgtatcttttaaaggttttgaccattttgttatgagtaattacatatatattacattcactatattaaaattgtacttttttactatgtgtctcattggttcatagtctttattttgtcctttgaataaacattaaaagatttctaaacttc

SEQ ID NO: 5143 - protein, 114 aa, Homo sapiens; identical to SEQ ID NO: 568

SEQ ID NO: 5144 - DNA, 2428 bp, Homo sapiens
agtggggagagatgagtgtagataaaaggagtgcagaaggcacgaggaagccacagtgctccggatcctccaatcttcgctcctccaatctccgctcctccacccagttcaggaacccgcgaccgctcgcagcgctctcttgaccactatgagcctcctgtccagccgcgcggcccgtgtccccggtccttcgagctccttgtgcgcgctgttggtgctgctgctgctgctgacgcagccagggcccatcgccagcgctggtcctgccgctgctgtgttgagagagctgcgttgcgtttgtttacagaccacgcaaggagttcatcccaaaatgatcagtaatctgcaagtgttcgccataggcccacagtgctccaaggtggaagtggtagcctccctgaagaacgggaaggaaatttgtcttgatccagaagccccttttctaaagaaagtcatccagaaaattttggacggtggaaacaaggaaaactgattaagagaaatgagcacgcatggaaaagtttcccagtcttcagcagagaagttttctggaggtctctgaacccagggaagacaagaaggaaagattttgttgttgtttgtttatttgtttttccagtagttagctttcttcctggattcctcactttgaagagtgtgaggaaaacctatgtttgccgcttaagctttcagctcagctaatgaagtgtttagcatagtacctctgctatttgctgttattttatctgctatgctattgaagttttggcaattgactatagtgtgagccaggaatcactggctgttaatctttcaaagtgtcttgaattgtaggtgactattatatttccaagaaatattccttaagatattaactgagaaggctgtggatttaatgtggaaatgatgtttcataagaattctgttgatggaaatacactgttatcttcacttttataagaaataggaaatattttaatgtttcttggggaatatgttagagaatttccttactcttgattgtgggatactatttaattatttcactttagaaagctgagtgtttcacaccttatctatgtagaatatatttccttattcagaatttctaaaagtttaagttctatgagggctaatatcttatcttcctataattttagacattctttatctttttagtatggcaaactgccatcatttacttttaaactttgattttatatgctatttattaagtattttattaggagtaccataattctggtagctaaatatatattttagatagatgaagaagctagaaaacaggcaaattcctgactgctagtttatatagaaatgtattcttttagtttttaaagtaaaggcaaacttaacaatgacttgtactctgaaagttttggaaacgtattcaaacaatttgaatataaatttatcatttagttataaaaatatatagcgacatcctcgaggccctagcatttctccttggataggggaccagagagagcttggaatgttaaaaacaaaacaaaacaaaaaaaaacaaggagaagttgtccaagggatgtcaattttttatccctctgtatgggttagattttccaaaatcataatttgaagaaggccagcatttatggtagaatatataattatatataaggtggccacgctggggcaagttccctccccactcacagctttggcccctttcacagagtagaacctgggttagaggattgcagaagacgagcgggagcggggagggcagggaagatgcctgtcgggtttttagcacagttcatttcactgggattttgaagcatttctgtctgaatgtaaagcctgttctagtcctggtgggacacactggggttgggggtgggggaagatgcggtaatgaaaccggttagtcagtgttgtcttaatatccttgataatgctgtaaagtttatttttacaaatatttctgtttaagctatttcacctttgtttggaaatccttcccttttaaagagaaaatgtgacacttgtgaaaaggcttgtaggaaagctcctccctttttttctttaaacctttaaatgacaaacctaggtaattaatggttgtgaatttctatttttgctttgtttttaatgaacatttgtctttcagaataggattctgtgataatatttaaatggcaaaaacaaaacataattttgtgcaattaacaaagctactgcaagaaaaataaaacatttcttggtaaaaacgtatgtatttatatattatatatttatatataatatatattatatatttagcattgctgagctttttagatgcctattgtgtatcttttaaaggttttgaccattttgttatgagtaattacatatatattacattcactatattaaaattgtacttttttactatgtgtct

SEQ ID NO: 5145 - protein, 114 aa, Homo sapiens; identical to SEQ ID NO: 568

SEQ ID NO: 5146 - DNA, 2250 bp, Homo sapiens
agtggggagagatgagtgtagataaaaggagtgcagaaggcacgaggaagccacagtgctccggatcctccaatcttcgctcctccaatctccgctcctccacccagttcaggaacccgcgaccgctcgcagcgctctcttgaccactatgagcctcctgtccagccgcgcggcccgtgtccccggtccttcgagctccttgtgcgcgctgttggtgctgctgctgctgctgacgcagccagggcccatcgccagcgctggtcctgccgctgctgtgttgagagagctgcgttgcgtttgtttacagaccacgcaaggagttcatcccaaaatgatcagtaatctgcaagtgttcgccataggcccacagtgctccaaggtggaagtggtagcctccctgaagaacgggaaggaaatttgtcttgatccagaagccccttttctaaagaaagtcatccagaaaattttggacggtggaaacaaggaaaactgattaagagaaatgagcacgcatggaaaagtttcccagtcttcagcagagaagttttctggaggtctctgaacccagggaagacaagaaggaaagattttgttgttgtttgtttatttgtttttccagtagttagctttcttcctggattcctcactttgaagagtgtgaggaaaacctatgtttgccgcttaagctttcagctcagctaatgaagtgtttagcatagtacctctgctatttgctgttattttatctgctatgctattgaagttttggcaattgactatagtgtgagccaggaatcactggctgttaatctttcaaagtgtcttgaattgtaggtgactattatatttccaagaaatattccttaagatattaactgagaaggctgtggatttaatgtggaaatgatgtttcataagaattctgttgatggaaatacactgttatcttcacttttataagaaataggaaatattttaatgtttcttggggaatatgttagagaatttccttactcttgattgtgggatactatttaattatttcactttagaaagctgagtgtttcacaccttatctatgtagaatatatttccttattcagaatttctaaaagtttaagttctatgagggctaatatcttatcttcctataattttagacattctttatctttttagtatggcaaactgccatcatttacttttaaactttgattttatatgctatttattaagtattttattaggagtaccataattctggtagctaaatatatattttagatagatgaagaagctagaaaacaggcaaattcctgactgctagtttatatagaaatgtattcttttagtttttaaagtaaaggcaaacttaacaatgacttgtactctgaaagttttggaaacgtattcaaacaatttgaatataaatttatcatttagttataaaaatatatagcgacatcctcgaggccctagcatttctccttggataggggaccagagagagcttggaatgttaaaaacaaaacaaaacaaaaaaaaacaaggagaagttgtccaagggatgtcaattttttatccctctgtatgggttagattttccaaaatcataatttgaagaaggccagcatttatggtagaatatataattatatataaggtggccacgctggggcaagttccctccccactcacagctttggcccctttcacagagtagaacctgggttagaggattgcagaagacgagcgggagcggggagggcagggaagatgcctgtcgggtttttagcacagttcatttcactgggattttgaagcatttctgtctgaatgtaaagcctgttctagtcctggtgggacacactggggttgggggtgggggaagatgcggtaatgaaaccggttagtcagtgttgtcttaatatccttgataatgctgtaaagtttatttttacaaatatttctgtttaagctatttcacctttgtttggaaatccttcccttttaaagagaaaatgtgacacttgtgaaaaggcttgtaggaaagctcctccctttttttctttaaacctttaaatgacaaacctaggtaattaatggttgtgaatttctatttttgctttgtttttaatgaacatttgtctttcagaataggattctgtgataatatttaaatggcaaaaacaaaacataattttgtgcaattaacaaagctactgcaagaaaaataaaacatttcttggt

SEQ ID NO: 5147 - protein, 114 aa, Homo sapiens; identical to SEQ ID NO: 568

SEQ ID NO: 5148 - DNA, 1180 bp, Homo sapiens
agtggggagagatgagtgtagataaaaggagtgcagaaggcacgaggaagccacagtgctccggatcctccaatcttcgctcctccaatctccgctcctccacccagttcaggaacccgcgaccgctcgcagcgctctcttgaccactatgagcctcctgtccagccgcgcggcccgtgtccccggtccttcgagctccttgtgcgcgctgttggtgctgctgctgctgctgacgcagccagggcccatcgccagcgctggtcctgccgctgctgtgttgagagagctgcgttgcgtttgtttacagaccacgcaaggagttcatcccaaaatgatcagtaatctgcaagtgttcgccataggcccacagtgctccaaggtggaagtggtagcctccctgaagaacgggaaggaaatttgtcttgatccagaagccccttttctaaagaaagtcatccagaaaattttggacggtggaaacaaggaaaactgattaagagaaatgagcacgcatggaaaagtttcccagtcttcagcagagaagttttctggaggtctctgaacccagggaagacaagaaggaaagattttgttgttgtttgtttatttgtttttccagtagttagctttcttcctggattcctcactttgaagagtgtgaggaaaacctatgtttgccgcttaagctttcagctcagctaatgaagtgtttagcatagtacctctgctatttgctgttattttatctgctatgctattgaagttttggcaattgactatagtgtgagccaggaatcactggctgttaatctttcaaagtgtcttgaattgtaggtgactattatatttccaagaaatattccttaagatattaactgagaaggctgtggatttaatgtggaaatgatgtttcataagaattctgttgatggaaatacactgttatcttcacttttataagaaataggaaatattttaatgtttcttggggaatatgttagagaatttccttactcttgattgtgggatactatttaattatttcactttagaaagctgagtgtttcacaccttatctatgtagaatatatttccttattcagaatttctaaaagtttaagttctatgagggctaatatcttatcttcctataattttagacattctttatctttttagt

SEQ ID NO: 5149 - protein, 114 aa, Homo sapiens; identical to SEQ ID NO: 568

SEQ ID NO: 5150 - DNA, 3024 bp, Homo sapiens
atggaagttttcccctttctcttggttttgtccgtctggtggtctcgaacctgggactcggcgaatgcggattcgatcattcacatcggagcaatttttgatgaatctgccaaaaaggatgatgaggtatttcgcactgcggttggtgaccttaaccagaatgaggagatcttacagactgagaaaatcacattttcagtgacgtttgttgatggcaacaaccctttccaagcagttcaagaagcctgtgaacttatgaatcaaggcatcttggccctggtcagctccattggctgcacgtcagcaggatccctccagtctttggcagacgccatgcatatcccccacctcttcattcagcgctcaacagctgggaccccaaggagtggctgtggactcacccggagcaacaggaatgatgactacactctctcagttcgcccacctgtctacttgcatgatgttatcctaagagtggtcacagagtatgcctggcagaaattcattatattctatgatagtgaatacgatatccgtggaatacaggagttcttggacaaagtctctcagcagggaatggatgttgcacttcagaaggtagaaaacaacatcaataaaatgattaccactctctttgacaccatgagaatagaagaactgaatcgctatcgagacactcttaggcgagcgatccttgttatgaatcctgctacagccaaatccttcattactgaggttgtggagactaatttggttgcttttgactgtcactggatcattataaatgaggaaataaacgatgtggacgtacaggaacttgtaagaaggtcaattggaaggttaacgattattcggcagacatttccagttccccagaacataagtcagcggtgtttccgtggcaaccatcgaatatcttcaacattgtgtgatccaaaggatccatttgctcagaatatggagatttccaacctttacatatatgacacggtgcttctgcttgctaatgcttttcataagaagctggaggaccgaaagtggcacagcatggcaagtctgtcatgtatcagaaagaactcaaagccctggcagggtgggcgctccatgttggagaccatcaagaagggtggagttagtgggttgactggagagctagaatttggagaaaatggaggcaatcccaatgtccactttgaaatccttggaaccaactatggagaagagcttggcagaggtgttcgaaaacttggttgctggaatcctgtcacaggtctgaatgggtcactgactgacaagaaattggagaataacatgcgtggagtggttctacgtgtagtaactgttctggaagaaccttttgtgatggtctctgaaaatgtcttgggtaagccgaagaaataccagggcttctccattgatgttttggatgccttatctaactacctgggttttaactacgaaatttacgtagcaccggatcacaaatacggaagcccacaagaagatgggacatggaatggcttggtaggagaacttgtctttaagagagccgacatagggatttctgctttaaccatcactccagatcgtgaaaatgtggtggactttacgacacgttacatggactactcagtgggggtactacttcgaagggctgaaaagacagtggatatgtttgcctgtcttgcaccatttgatctctctctatgggcttgcattgctggcacagtccttctggtgggtctactggtctacctcttgaactggcttaatcccccacgattacaaatgggatcaatgacgtctactactctctacaactccatgtggtttgtgtatggatcttttgtacaacaaggcggggaagtcccgtacacgactctggctacccgaatgatgatgggggcttggtggctatttgctttgattgttatctcatcttacacggcaaacctcgctgctttcctcactattacacgcattgaaagttccatccagtctctccaggacctttccaagcaaacagaaatcccttatggcacagtcctagactctgcggtatatgagcatgtccgcatgaaaggactgaatccttttgagagggacagcatgtattcccaaatgtggcggatgatcaaccgaagcaatggatcggagaacaatgttctggagtcccaggcaggcattcaaaaggtaaaatatggaaattatgctttcgtatgggatgcagctgtattggaatatgtggctatcaatgacccagattgttccttttacaccattggaaatactgttgctgatcggggatatggaattgcattacaacatggcagtccttaccgagatgttttttcacaaaggatcctggagcttcagcagaatggtgacatggacatcctgaagcacaaatggtggcctaagaatggccagtgtgacctgtactcgtcagtggacacaaagcagaaaggaggcgccctggacataaagagctttgcaggggtcttttgtatcctggctgctggaattgtcctctcctgcttcatagccatgctggagacgtggtggaacaagaggaaaggctcccgggttccatcaaaagaggatgacaaggaaattgacctggagcacctccatagacgtgtaaatagcttgtgcacagatgacgacagcccccataaacagttttccacctcgtcaattgatttgacccctctggacattgacactttgccaacacgacaagcactggagcaaatcagtgatttcaggaacactcatattaccacaacaacctttatcccagagcagatccagactcttagccgcacactgtcagctaaagctgcttctggtttcacttttggcaacgtgcctgagcaccgaactggcccttttaggcacagggcacctaatgggggctttttcaggagtcctataaaaacaatgtcatctattccttatcaaccaactcctaccctggggctcaatctgggtaatgatccagaccgaggcacctccatatga

SEQ ID NO: 5151 - protein, 1007 aa, Homo sapiens
MEVFPFLLVLSVWWSRTWDSANADSIIHIGAIFDESAKKDDEVFRTAVGDLNQNEEILQTEKITFSVTFVDGNNPFQAVQEACELMNQGILALVSSIGCTSAGSLQSLADAMHIPHLFIQRSTAGTPRSGCGLTRSNRNDDYTLSVRPPVYLHDVILRVVTEYAWQKFIIFYDSEYDIRGIQEFLDKVSQQGMDVALQKVENNINKMITTLFDTMRIEELNRYRDTLRRAILVMNPATAKSFITEVVETNLVAFDCHWIIINEEINDVDVQELVRRSIGRLTIIRQTFPVPQNISQRCFRGNHRISSTLCDPKDPFAQNMEISNLYIYDTVLLLANAFHKKLEDRKWHSMASLSCIRKNSKPWQGGRSMLETIKKGGVSGLTGELEFGENGGNPNVHFEILGTNYGEELGRGVRKLGCWNPVTGLNGSLTDKKLENNMRGVVLRVVTVLEEPFVMVSENVLGKPKKYQGFSIDVLDALSNYLGFNYEIYVAPDHKYGSPQEDGTWNGLVGELVFKRADIGISALTITPDRENVVDFTTRYMDYSVGVLLRRAEKTVDMFACLAPFDLSLWACIAGTVLLVGLLVYLLNWLNPPRLQMGSMTSTTLYNSMWFVYGSFVQQGGEVPYTTLATRMMMGAWWLFALIVISSYTANLAAFLTITRIESSIQSLQDLSKQTEIPYGTVLDSAVYEHVRMKGLNPFERDSMYSQMWRMINRSNGSENNVLESQAGIQKVKYGNYAFVWDAAVLEYVAINDPDCSFYTIGNTVADRGYGIALQHGSPYRDVFSQRILELQQNGDMDILKHKWWPKNGQCDLYSSVDTKQKGGALDIKSFAGVFCILAAGIVLSCFIAMLETWWNKRKGSRVPSKEDDKEIDLEHLHRRVNSLCTDDDSPHKQFSTSSIDLTPLDIDTLPTRQALEQISDFRNTHITTTTFIPEQIQTLSRTLSAKAASGFTFGNVPEHRTGPFRHRAPNGGFFRSPIKTMSSIPYQPTPTLGLNLGNDPDRGTSI

SEQ ID NO: 5152 - DNA, 1065 bp, Homo sapiens; identical to SEQ ID NO: 571

SEQ ID NO: 5153 - protein, 354 aa, Homo sapiens; identical to SEQ ID NO: 572

SEQ ID NO: 5154 - DNA, 1363 bp, Homo sapiens
gcgccgctgacgcgccgtgctccggcgcaggcgcacaggggacggttgctggcccaggatattattctcaccgggaaactgtgaacggctcatggtacattcaagatttgtgtgagatgttgggaaaatatggctcctccttagagttcacagaactcctcacactggtgaacaggaaagtttctcagcgccgagtggacttttgcaaagacccaagtgcaattggaaagaagcaggttccctgttttgcctcaatgctaactaaaaagctgcatttctttccaaaatctaattaattaatagaggctatctaattttacactctgtattgaaaatggctttctcagccaggcgtggttactcacacctgtaatcccagcactttgggagtccaaggtgggcggatcacctgaggtcgggagttcgagaccagcctgaccaacatggagaagccccgtctctactaaaaatgcaaaaaaaaatttagctaggcatggcggcgcatgcctgcaatcccagctacttggaaggctgaggcaggagaatcacttgaacccaggaggtggaggctgcggtgagccgagattgcgccattgcactccagcctgggcaacgagtgaaactccgtctcaaaaaaaagaaaatgtctttctcttccttttatataaatatcgttagggtgaagcattatggtctaatgattcaaatgttttaaagtttaatgcctagcagagaactgccttaaaaaaaaaaaaaaaaagttcatgttggccatggtgaaagggtttgatatggagaaacaaaatcctcaggaaattagataaataaaaatttataagcatttgtattattttttaataaactgcagggttacacaaaaatctagctgatttaacttgtattttgtcacttttttataaaagtttattgtttgatgtttttaaaggtttttgaaatccaggaattaaatcatcccttaataaaatattcgaaattcatattttattacatttttctaactcacattcttgttcatttgtgtaattgatagatgttttttactcggtcatttaaatgtttaatatttcatctacatatgaattaccacattttgtgtatgactttaattcctactttaaaaaaaatcagcattccagaattgttgtatggcattctgaggatgaaatagaaaacataattcttagccactataggttgaacacctgcaaaatctgattctgtcagcatcttccatgttaagttcctacaaacagtccaacagtcatcagacccattcacacacaatcacattaatagaataacagatgttactttcaaggttcaattcttattaatatgatat

SEQ ID NO: 5155 - protein, 59 aa, Homo sapiens
MLGKYGSSLEFTELLTLVNRKVSQRRVDFCKDPSAIGKKQVPCFASMLTKKLHFFPKSN

SEQ ID NO: 5156 - DNA, 2446 bp, Homo sapiens
ggttgctggcccaggtgagcgggcgcgctggtccaggatctaagcctttcccacgttatggttataaaccctccccaccgaatggatgtggctctccactgtttggtgttcatcttaacattggtatcccttccctgacaaagtgttgcaaccaacacgacaggtgctatgagacctgtggcaaaagcaagaatgactgtgatgaagaattccagtattgcctctccaagatctgccgagatgtacagaaaacactaggactaactcagcatgttcaggcatgtgaaacaacagtggagctcttgtttgacagtgttatacatttaggttgtaaaccatatctggacagccaacgagccgcatgcaggtgtcattatgaagaaaaaactgatctttaaaggagatgccgacagctagtgacagatgaagatggaagaacatacctttgacaaataactaatgtttttacaacataaaactgtcttatttttgtgaaaggattattttgagaccttaaaataatttatatcttgatgttaaaacctcaaagcaaaaaaagtgagggagatagtgaggggagggcacgcttgtcttctcaggtatcttccccagcattgctcccttacttagtatgccaaatgtcttgaccaatatcaaaaacaagtgcttgtttagcggagaattttgaaaagaggaatatataactcaattttcacaaccacatttaccaaaaaaagagatcaaatataaaattcatcataatgtctgttcaacattatcttatttggaaaatggggaaattatcacttacaagtatttgtttactatgaaattttaaatacacatttatgcctagaaggaacggactttttttttctattttaattacacataatatgtaattaaagtacaacataatatgttgtttctctgtagcccgttgagcatatgagtaagtcacatttctattaggactacttacaaggacaaggtttccatttttccagttgtaaaattggaaccatcagctgataacctcgtagggagcaaccccaggatagctaagtgttatgtaatatgcctagaaggtgatgtgaatgcgattcagaagcatagccactcccattttatgagctactcacatgacaaatgtcatcttttgctataacctttgccaagttagagaaaagatggatttaatgagataaatgaaaagatatttaacctaatatatcaaggcactatttgctgttatgctttgttatttatttcccagcacttgttccttattgtagattttttaaagactgtaaccttttactaactgtggtcttactaaaatttgtgcttgatactgcttttcaaaaagcctttaattagagccaaaaggatggaaaaggcaagatataaatgccttttatagatctcttatttacattgaaaattattaccatatgtttagagcaaatccaagaaaacttcaacagcttctgaagatgtctatgaatgttgaaaacttttcaatctcttggaatgctcagttatgttcctagaccggtctttgctgactactggttgttaacctttccctagcctgggacctcaagccatatatatcctttgggtgacccatggccaaagttattaagatgaactgactttcaaagtcagagaaggacagcatagggagaggcggttatttgtaagtcattacaggtagaacagggcagaaggaaaagtatgttctggagaaagggccatgttcctaactttggagatatgtcattgccgggaacctagtatcttccaacttgaattggtggcagctgttccagtgagacaaggcacatgtatgccttgtggctaagtgagcaaactgggtttccacttaaatgtttgggaccctcaattgattctttatttcaaacctttataaaaggtacagttttgtaagccattattaataattaatgcttatcggctgggcacagtggctcacacctataatcccagcactttgggaggctgaggcggttggatcacttgaggtcaggagtttgagaccagctggccaacatggtgaaacagcgtctctactaaaaatacaaaaatttgccgggcgtggtggcgcatgcttatagtctcagctactcaggaagctgaggtacgagaatcacttgaacccaggaggtggaggttgcagtgagctgagattgtgccactgcactgcagcctgggcaacagagcaagactctaaaaaaaaaatggtttatcaatatttactattgaaatatttgtccaggtaactttacacttacaatgaattcatggattttgttagcagcattggctttctcaaaaggacaaactcaatatcgttataaaatataattcgtgatcacaaattatacaaaaatcagtagaaacagttttttatgttcagatt

SEQ ID NO: 5157 - protein, 56 aa, Homo sapiens [sequence omitted]

SEQ ID NO: 5158 - DNA, 2800 bp, Homo sapiens
acaggggacggttgctggcccaggtgagcgggcgcgctggtccaggtgagcgggcgcgtccccgcgacggcgctgcctgcccgaggcggttcacgtaaagacagcgagatcctgagggccagccgggaaggaggcgtggatatggagctggctgctgccaagtccggggcccgcgccgctgcctagcgcgtcctggggactctgtggggacgcgccccgcgccgcggctcggggacccgtagagcccggcgctgcgcgcatggccctgctctcgcgccccgcgctcaccctcctgctcctcctcatggccgctgttgtcaggtgccaggagcaggcccagaccaccgactggagagccaccctgaagaccatccggaacggcgttcataagatagacacgtacctgaacgccgccttggacctcctgggaggcgaggacggtctctgccagtataaatgcagtgacgcttaacattggtatcccttccctgacaaagtgttgcaaccaacacgacaggtgctatgagacctgtggcaaaagcaagaatgactgtgatgaagaattccagtattgcctctccaagatctgccgagatgtacagaaaacactaggactaactcagcatgttcaggcatgtgaaacaacagtggagctcttgtttgacagtgttatacatttaggttgtaaaccatatctggacagccaacgagccgcatgcaggtgtcattatgaagaaaaaactgatctttaaaggagatgccgacagctagtgacagatgaagatggaagaacatacctttgacaaataactaatgtttttacaacataaaactgtcttatttttgtgaaaggattattttgagaccttaaaataatttatatcttgatgttaaaacctcaaagcaaaaaaagtgagggagatagtgaggggagggcacgcttgtcttctcaggtatcttccccagcattgctcccttacttagtatgccaaatgtcttgaccaatatcaaaaacaagtgcttgtttagcggagaattttgaaaagaggaatatataactcaattttcacaaccacatttaccaaaaaaagagatcaaatataaaattcatcataatgtctgttcaacattatcttatttggaaaatggggaaattatcacttacaagtatttgtttactatgaaattttaaatacacatttatgcctagaaggaacggactttttttttctattttaattacacataatatgtaattaaagtacaacataatatgttgtttctctgtagcccgttgagcatatgagtaagtcacatttctattaggactacttacaaggacaaggtttccatttttccagttgtaaaattggaaccatcagctgataacctcgtagggagcaaccccaggatagctaagtgttatgtaatatgcctagaaggtgatgtgaatgcgattcagaagcatagccactcccattttatgagctactcacatgacaaatgtcatcttttgctataacctttgccaagttagagaaaagatggatttaatgagataaatgaaaagatatttaacctaatatatcaaggcactatttgctgttatgctttgttatttatttcccagcacttgttccttattgtagattttttaaagactgtaaccttttactaactgtggtcttactaaaatttgtgcttgatactgcttttcaaaaagcctttaattagagccaaaaggatggaaaaggcaagatataaatgccttttatagatctcttatttacattgaaaattattaccatatgtttagagcaaatccaagaaaacttcaacagcttctgaagatgtctatgaatgttgaaaacttttcaatctcttggaatgctcagttatgttcctagaccggtctttgctgactactggttgttaacctttccctagcctgggacctcaagccatatatatcctttgggtgacccatggccaaagttattaagatgaactgactttcaaagtcagagaaggacagcatagggagaggcggttatttgtaagtcattacaggtagaacagggcagaaggaaaagtatgttctggagaaagggccatgttcctaactttggagatatgtcattgccgggaacctagtatcttccaacttgaattggtggcagctgttccagtgagacaaggcacatgtatgccttgtggctaagtgagcaaactgggtttccacttaaatgtttgggaccctcaattgattctttatttcaaacctttataaaaggtacagttttgtaagccattattaataattaatgcttatcggctgggcacagtggctcacacctataatcccagcactttgggaggctgaggcggttggatcacttgaggtcaggagtttgagaccagctggccaacatggtgaaacagcgtctctactaaaaatacaaaaatttgccgggcgtggtggcgcatgcttatagtctcagctactcaggaagctgaggtacgagaatcacttgaacccaggaggtggaggttgcagtgagctgagattgtgccactgcactgcagcctgggcaacagagcaagactctaaaaaaaaaatggtttatcaatatttactattgaaatatttgtccaggtaactttacacttacaatgaattcatggattttgttagcagcattggctttctcaaaaggacaaactcaatatcgttataaaatataattcgtgatcacaaattatacaaaaatcagtagaaacagttttttatgttcagatt

SEQ ID NO: 5159 - protein, 70 aa, Homo sapiens
MALLSRPALTLLLLLMAAVVRCQEQAQTTDWRATLKTIRNGVHKIDTYLNAALDLLGGEDGLCQYKCSDA

SEQ ID NO: 5160 - DNA, 2895 bp, Homo sapiens
gtgctccggcgcaggcgcacaggggacggttgctggcccaggtgagcgggcgcgctggtccaggtgagcgggcgcgtccccgcgacggcgctgcctgcccgaggcggttcacgtaaagacagcgagatcctgagggccagccgggaaggaggcgtggatatggagctggctgctgccaagtccggggcccgcgccgctgcctagcgcgtcctggggactctgtggggacgcgccccgcgccgcggctcggggacccgtagagcccggcgctgcgcgcatggccctgctctcgcgccccgcgctcaccctcctgctcctcctcatggccgctgttgtcaggtgccaggagcaggcccagaccaccgactggagagccaccctgaagaccatccggaacggcgttcataagatagacacgtacctgaacgccgccttggacctcctgggaggcgaggacggtctctgccagtataaatgcagtgacggatctaagcctttcccacgttatggttataaaccctccccaccgaatggatgtggctctccactgtttggtgttcatcttaacattggtatcccttccctgacaaagtgttgcaaccaacacgacaggtgctatgagacctgtggcaaaagcaagaatgactgtgatgaagaattccagtattgcctctccaagatctgccgagatgtacagaaaacactaggactaactcagcatgttcaggcatgtgaaacaacagtggagctcttgtttgacagtgttatacatttaggttgtaaaccatatctggacagccaacgagccgcatgcaggtgtcattatgaagaaaaaactgatctttaaaggagatgccgacagctagtgacagatgaagatggaagaacatacctttgacaaataactaatgtttttacaacataaaactgtcttatttttgtgaaaggattattttgagaccttaaaataatttatatcttgatgttaaaacctcaaagcaaaaaaagtgagggagatagtgaggggagggcacgcttgtcttctcaggtatcttccccagcattgctcccttacttagtatgccaaatgtcttgaccaatatcaaaaacaagtgcttgtttagcggagaattttgaaaagaggaatatataactcaattttcacaaccacatttaccaaaaaaagagatcaaatataaaattcatcataatgtctgttcaacattatcttatttggaaaatggggaaattatcacttacaagtatttgtttactatgaaattttaaatacacatttatgcctagaaggaacggactttttttttctattttaattacacataatatgtaattaaagtacaacataatatgttgtttctctgtagcccgttgagcatatgagtaagtcacatttctattaggactacttacaaggacaaggtttccatttttccagttgtaaaattggaaccatcagctgataacctcgtagggagcaaccccaggatagctaagtgttatgtaatatgcctagaaggtgatgtgaatgcgattcagaagcatagccactcccattttatgagctactcacatgacaaatgtcatcttttgctataacctttgccaagttagagaaaagatggatttaatgagataaatgaaaagatatttaacctaatatatcaaggcactatttgctgttatgctttgttatttatttcccagcacttgttccttattgtagattttttaaagactgtaaccttttactaactgtggtcttactaaaatttgtgcttgatactgcttttcaaaaagcctttaattagagccaaaaggatggaaaaggcaagatataaatgccttttatagatctcttatttacattgaaaattattaccatatgtttagagcaaatccaagaaaacttcaacagcttctgaagatgtctatgaatgttgaaaacttttcaatctcttggaatgctcagttatgttcctagaccggtctttgctgactactggttgttaacctttccctagcctgggacctcaagccatatatatcctttgggtgacccatggccaaagttattaagatgaactgactttcaaagtcagagaaggacagcatagggagaggcggttatttgtaagtcattacaggtagaacagggcagaaggaaaagtatgttctggagaaagggccatgttcctaactttggagatatgtcattgccgggaacctagtatcttccaacttgaattggtggcagctgttccagtgagacaaggcacatgtatgccttgtggctaagtgagcaaactgggtttccacttaaatgtttgggaccctcaattgattctttatttcaaacctttataaaaggtacagttttgtaagccattattaataattaatgcttatcggctgggcacagtggctcacacctataatcccagcactttgggaggctgaggcggttggatcacttgaggtcaggagtttgagaccagctggccaacatggtgaaacagcgtctctactaaaaatacaaaaatttgccgggcgtggtggcgcatgcttatagtctcagctactcaggaagctgaggtacgagaatcacttgaacccaggaggtggaggttgcagtgagctgagattgtgccactgcactgcagcctgggcaacagagcaagactctaaaaaaaaaatggtttatcaatatttactattgaaatatttgtccaggtaactttacacttacaatgaattcatggattttgttagcagcattggctttctcaaaaggacaaactcaatatcgttataaaatataattcgtgatcacaaattatacaaaaatcagtagaaacagttttttatgttcagatt

SEQ ID NO: 5161 - protein, 189 aa, Homo sapiens; identical to SEQ ID NO: 574

SEQ ID NO: 5162 - DNA, 1243 bp, Homo sapiens
ggttgctggcccaggtgagcgggcgcgctggtccaggatctaagcctttcccacgttatggttataaaccctccccaccgaatggatgtggctctccactgtttggtgttcatcttaacattggtatcccttccctgacaaagtgttgcaaccaacacgacaggtgctatgagacctgtggcaaaagcaagaatgactgtgatgaagaattccagtattgcctctccaagatctgccgagatgtacagaaaacactaggactaactcagcatgttcaggcatgtgaaacaacagtggagctcttgtttgacagtgttatacatttaggttgtaaaccatatctggacagccaacgagccgcatgcaggtgtcattatgaagaaaaaactgatctttaaaggagatgccgacagctagtgacagatgaagatggaagaacatacctttgacaaataactaatgtttttacaacataaaactgtcttatttttgtgaaaggattattttgagaccttaaaataatttatatcttgatgttaaaacctcaaagcaaaaaaagtgagggagatagtgaggggagggcacgcttgtcttctcaggtatcttccccagcattgctcccttacttagtatgccaaatgtcttgaccaatatcaaaaacaagtgcttgtttagcggagaattttgaaaagaggaatatataactcaattttcacaaccacatttaccaaaaaaagagatcaaatataaaattcatcataatgtctgttcaacattatcttatttggaaaatggggaaattatcacttacaagtatttgtttactatgaaattttaaatacacatttatgcctagaaggaacggactttttttttctattttaattacacataatatgtaattaaagtacaacataatatgttgtttctctgtagcccgttgagcatatgagtaagtcacatttctattaggactacttacaaggacaaggtttccatttttccagttgtaaaattggaaccatcagctgataacctcgtagggagcaaccccaggatagctaagtgttatgtaatatgcctagaaggtgatgtgaatgcgattcagaagcatagccactcccattttatgagctactcacatgacaaatgtcatcttttgctataacctttgccaagttagagaaaagatggatttaatgagataaatgaaaagatatttaacctaatatatcaaggcact

SEQ ID NO: 5163 - protein, 37 aa, Homo sapiens
MLKPQSKKSEGDSEGRARLSSQVSSPALLPYLVCQMS

SEQ ID NO: 5164 - DNA, 1597 bp, Homo sapiens
acaggggacggttgctggcccaggtgagcgggcgcgctggtccaggtgagcgggcgcgtccccgcgacggcgctgcctgcccgaggcggttcacgtaaagacagcgagatcctgagggccagccgggaaggaggcgtggatatggagctggctgctgccaagtccggggcccgcgccgctgcctagcgcgtcctggggactctgtggggacgcgccccgcgccgcggctcggggacccgtagagcccggcgctgcgcgcatggccctgctctcgcgccccgcgctcaccctcctgctcctcctcatggccgctgttgtcaggtgccaggagcaggcccagaccaccgactggagagccaccctgaagaccatccggaacggcgttcataagatagacacgtacctgaacgccgccttggacctcctgggaggcgaggacggtctctgccagtataaatgcagtgacgcttaacattggtatcccttccctgacaaagtgttgcaaccaacacgacaggtgctatgagacctgtggcaaaagcaagaatgactgtgatgaagaattccagtattgcctctccaagatctgccgagatgtacagaaaacactaggactaactcagcatgttcaggcatgtgaaacaacagtggagctcttgtttgacagtgttatacatttaggttgtaaaccatatctggacagccaacgagccgcatgcaggtgtcattatgaagaaaaaactgatctttaaaggagatgccgacagctagtgacagatgaagatggaagaacatacctttgacaaataactaatgtttttacaacataaaactgtcttatttttgtgaaaggattattttgagaccttaaaataatttatatcttgatgttaaaacctcaaagcaaaaaaagtgagggagatagtgaggggagggcacgcttgtcttctcaggtatcttccccagcattgctcccttacttagtatgccaaatgtcttgaccaatatcaaaaacaagtgcttgtttagcggagaattttgaaaagaggaatatataactcaattttcacaaccacatttaccaaaaaaagagatcaaatataaaattcatcataatgtctgttcaacattatcttatttggaaaatggggaaattatcacttacaagtatttgtttactatgaaattttaaatacacatttatgcctagaaggaacggactttttttttctattttaattacacataatatgtaattaaagtacaacataatatgttgtttctctgtagcccgttgagcatatgagtaagtcacatttctattaggactacttacaaggacaaggtttccatttttccagttgtaaaattggaaccatcagctgataacctcgtagggagcaaccccaggatagctaagtgttatgtaatatgcctagaaggtgatgtgaatgcgattcagaagcatagccactcccattttatgagctactcacatgacaaatgtcatcttttgctataacctttgccaagttagagaaaagatggatttaatgagataaatgaaaagatatttaacctaatatatcaaggcact

SEQ ID NO: 5165 - protein, 70 aa, Homo sapiens; identical to SEQ ID NO: 5159

SEQ ID NO: 5166 - DNA, 1692 bp, Homo sapiens
gtgctccggcgcaggcgcacaggggacggttgctggcccaggtgagcgggcgcgctggtccaggtgagcgggcgcgtccccgcgacggcgctgcctgcccgaggcggttcacgtaaagacagcgagatcctgagggccagccgggaaggaggcgtggatatggagctggctgctgccaagtccggggcccgcgccgctgcctagcgcgtcctggggactctgtggggacgcgccccgcgccgcggctcggggacccgtagagcccggcgctgcgcgcatggccctgctctcgcgccccgcgctcaccctcctgctcctcctcatggccgctgttgtcaggtgccaggagcaggcccagaccaccgactggagagccaccctgaagaccatccggaacggcgttcataagatagacacgtacctgaacgccgccttggacctcctgggaggcgaggacggtctctgccagtataaatgcagtgacggatctaagcctttcccacgttatggttataaaccctccccaccgaatggatgtggctctccactgtttggtgttcatcttaacattggtatcccttccctgacaaagtgttgcaaccaacacgacaggtgctatgagacctgtggcaaaagcaagaatgactgtgatgaagaattccagtattgcctctccaagatctgccgagatgtacagaaaacactaggactaactcagcatgttcaggcatgtgaaacaacagtggagctcttgtttgacagtgttatacatttaggttgtaaaccatatctggacagccaacgagccgcatgcaggtgtcattatgaagaaaaaactgatctttaaaggagatgccgacagctagtgacagatgaagatggaagaacatacctttgacaaataactaatgtttttacaacataaaactgtcttatttttgtgaaaggattattttgagaccttaaaataatttatatcttgatgttaaaacctcaaagcaaaaaaagtgagggagatagtgaggggagggcacgcttgtcttctcaggtatcttccccagcattgctcccttacttagtatgccaaatgtcttgaccaatatcaaaaacaagtgcttgtttagcggagaattttgaaaagaggaatatataactcaattttcacaaccacatttaccaaaaaaagagatcaaatataaaattcatcataatgtctgttcaacattatcttatttggaaaatggggaaattatcacttacaagtatttgtttactatgaaattttaaatacacatttatgcctagaaggaacggactttttttttctattttaattacacataatatgtaattaaagtacaacataatatgttgtttctctgtagcccgttgagcatatgagtaagtcacatttctattaggactacttacaaggacaaggtttccatttttccagttgtaaaattggaaccatcagctgataacctcgtagggagcaaccccaggatagctaagtgttatgtaatatgcctagaaggtgatgtgaatgcgattcagaagcatagccactcccattttatgagctactcacatgacaaatgtcatcttttgctataacctttgccaagttagagaaaagatggatttaatgagataaatgaaaagatatttaacctaatatatcaaggcact

SEQ ID NO: 5167 - protein, 189 aa, Homo sapiens; identical to SEQ ID NO: 574

SEQ ID NO: 5168 - DNA, 860 bp, Homo sapiens
ggttgctggcccaggtgagcgggcgcgctggtccaggatctaagcctttcccacgttatggttataaaccctccccaccgaatggatgtggctctccactgtttggtgttcatcttaacattggtatcccttccctgacaaagtgttgcaaccaacacgacaggtgctatgagacctgtggcaaaagcaagaatgactgtgatgaagaattccagtattgcctctccaagatctgccgagatgtacagaaaacactaggactaactcagcatgttcaggcatgtgaaacaacagtggagctcttgtttgacagtgttatacatttaggttgtaaaccatatctggacagccaacgagccgcatgcaggtgtcattatgaagaaaaaactgatctttaaaggagatgccgacagctagtgacagatgaagatggaagaacatacctttgacaaataactaatgtttttacaacataaaactgtcttatttttgtgaaaggattattttgagaccttaaaataatttatatcttgatgttaaaacctcaaagcaaaaaaagtgagggagatagtgaggggagggcacgcttgtcttctcaggtatcttccccagcattgctcccttacttagtatgccaaatgtcttgaccaatatcaaaaacaagtgcttgtttagcggagaattttgaaaagaggaatatataactcaattttcacaaccacatttaccaaaaaaagagatcaaatataaaattcatcataatgtctgttcaacattatcttatttggaaaatggggaaattatcacttacaagtatttgtttactatgaaattttaaatacacatttatgcctagaagg

SEQ ID NO: 5169 - protein, 37 aa, Homo sapiens; identical to SEQ ID NO: 5163

SEQ ID NO: 5170 - DNA, 1214 bp, Homo sapiens
acaggggacggttgctggcccaggtgagcgggcgcgctggtccaggtgagcgggcgcgtccccgcgacggcgctgcctgcccgaggcggttcacgtaaagacagcgagatcctgagggccagccgggaaggaggcgtggatatggagctggctgctgccaagtccggggcccgcgccgctgcctagcgcgtcctggggactctgtggggacgcgccccgcgccgcggctcggggacccgtagagcccggcgctgcgcgcatggccctgctctcgcgccccgcgctcaccctcctgctcctcctcatggccgctgttgtcaggtgccaggagcaggcccagaccaccgactggagagccaccctgaagaccatccggaacggcgttcataagatagacacgtacctgaacgccgccttggacctcctgggaggcgaggacggtctctgccagtataaatgcagtgacgcttaacattggtatcccttccctgacaaagtgttgcaaccaacacgacaggtgctatgagacctgtggcaaaagcaagaatgactgtgatgaagaattccagtattgcctctccaagatctgccgagatgtacagaaaacactaggactaactcagcatgttcaggcatgtgaaacaacagtggagctcttgtttgacagtgttatacatttaggttgtaaaccatatctggacagccaacgagccgcatgcaggtgtcattatgaagaaaaaactgatctttaaaggagatgccgacagctagtgacagatgaagatggaagaacatacctttgacaaataactaatgtttttacaacataaaactgtcttatttttgtgaaaggattattttgagaccttaaaataatttatatcttgatgttaaaacctcaaagcaaaaaaagtgagggagatagtgaggggagggcacgcttgtcttctcaggtatcttccccagcattgctcccttacttagtatgccaaatgtcttgaccaatatcaaaaacaagtgcttgtttagcggagaattttgaaaagaggaatatataactcaattttcacaaccacatttaccaaaaaaagagatcaaatataaaattcatcataatgtctgttcaacattatcttatttggaaaatggggaaattatcacttacaagtatttgtttactatgaaattttaaatacacatttatgcctagaagg

SEQ ID NO: 5171 - protein, 70 aa, Homo sapiens; identical to SEQ ID NO: 5159

SEQ ID NO: 5172 - DNA, 1309 bp, Homo sapiens
gtgctccggcgcaggcgcacaggggacggttgctggcccaggtgagcgggcgcgctggtccaggtgagcgggcgcgtccccgcgacggcgctgcctgcccgaggcggttcacgtaaagacagcgagatcctgagggccagccgggaaggaggcgtggatatggagctggctgctgccaagtccggggcccgcgccgctgcctagcgcgtcctggggactctgtggggacgcgccccgcgccgcggctcggggacccgtagagcccggcgctgcgcgcatggccctgctctcgcgccccgcgctcaccctcctgctcctcctcatggccgctgttgtcaggtgccaggagcaggcccagaccaccgactggagagccaccctgaagaccatccggaacggcgttcataagatagacacgtacctgaacgccgccttggacctcctgggaggcgaggacggtctctgccagtataaatgcagtgacggatctaagcctttcccacgttatggttataaaccctccccaccgaatggatgtggctctccactgtttggtgttcatcttaacattggtatcccttccctgacaaagtgttgcaaccaacacgacaggtgctatgagacctgtggcaaaagcaagaatgactgtgatgaagaattccagtattgcctctccaagatctgccgagatgtacagaaaacactaggactaactcagcatgttcaggcatgtgaaacaacagtggagctcttgtttgacagtgttatacatttaggttgtaaaccatatctggacagccaacgagccgcatgcaggtgtcattatgaagaaaaaactgatctttaaaggagatgccgacagctagtgacagatgaagatggaagaacatacctttgacaaataactaatgtttttacaacataaaactgtcttatttttgtgaaaggattattttgagaccttaaaataatttatatcttgatgttaaaacctcaaagcaaaaaaagtgagggagatagtgaggggagggcacgcttgtcttctcaggtatcttccccagcattgctcccttacttagtatgccaaatgtcttgaccaatatcaaaaacaagtgcttgtttagcggagaattttgaaaagaggaatatataactcaattttcacaaccacatttaccaaaaaaagagatcaaatataaaattcatcataatgtctgttcaacattatcttatttggaaaatggggaaattatcacttacaagtatttgtttactatgaaattttaaatacacatttatgcctagaagg

SEQ ID NO: 5173 - protein, 189 aa, Homo sapiens; identical to SEQ ID NO: 574

SEQ ID NO: 5174 - DNA, 669 bp, Homo sapiens
cgcaggcgcacaggggacggttgctggcccaggtgagcgggcgcgctggtccaggtgagcgggcgcgtccccgcgacggcgctgcctgcccgaggcggttcacgtaaagacagcgagatcctgagggccagccgggaaggaggcgtggatatggagctggctgctgccaagtccggggcccgcgccgctgcctagcgcgtcctggggactctgtggggacgcgccccgcgccgcggctcggggacccgtagagcccggcgctgcgcgcatggccctgctctcgcgccccgcgctcaccctcctgctcctcctcatggccgctgttgtcaggtgccaggagcaggcccagaccaccgactggagagccaccctgaagaccatccggaacggcgttcataagatagacacgtacctgaacgccgccttggacctcctgggaggcgaggacggtctctgccagtataaatgcagtgacggatctaagcctttcccacgttatggttataaaccctccccaccgaatggatgtggctctccactgtttggtgttcatgtgctatgagacctgtggcaaaagcaagaatgactgtgatgaagaattccagtattgcctctccaagatctgccgagatgtacagaaaacactaggactaactcagcatgttcagg

SEQ ID NO: 5175 - protein, 97 aa, Homo sapiens [sequence omitted]

SEQ ID NO: 5176 - DNA, 653 bp, Homo sapiens
gaaatgaaaaagacggaaacaaaaaagattgtgagctgcctcgttccatccctgcctgtgtcccctggtctccttacctattccaacctaatgatacatgcatcgtttctggctggggacgagaaaaagataacgaaagagtcttttcacttcagtggggtgaagttaaactaataagcaactgctctaagttttacggaaatcgtttctatgaaaaagaaatggaatgtgcaggtacatatgatggttccatcgatgcctgtaaaggggactctggaggccccttagtctgtatggatgccaacaatgtgacttatgtctggggtgttgtgagttggggggaaaactgtggaaaaccagagttcccaggtgtttacaccaaagtggccaattattttgactggattagctaccatgtaggaaggccttttatttctcagtacaatgtataaaattgtgatctctctcttcattctattctttttctctcaagagttccatttaatggaaataaaacggtataattaataattctctaggggggaaaaatgaagcaaatctcactggatatttttaaaggtctccacagagtttatgccatattggaattttgttgtataattctcaaataaatattttggtgaagcatacaa

SEQ ID NO: 5177 - protein, 76 aa, Homo sapiens
MECAGTYDGSIDACKGDSGGPLVCMDANNVTYVWGVVSWGENCGKPEFPGVYTKVANYFDWISYHVGRPFISQYNV

SEQ ID NO: 5178 - DNA, 2922 bp, Homo sapiens
gcttactcagatttacttcatgtttaccaacttcttggtttgttctttcttgtatctcaccccttctttctgaattcaattttcttcttcttaaaccacatctgctagtagttcattagtgagagtctcttatattgttaaattaagccataggctatttctgagtttcagcagtttgttacctacaacttatggttcaacctactggtagattctctcagtattttatttctcagtattttgctcttatattttgcataagctcatgaacagacatctctaattttaaccagtgcagatttcccttacttccttaagaactcattgaggaagaagatggcattttatatagtatttttagatatttttaggttggtacgtttttcagattattaacctataagattgcctcaaatggctcttgtttgttctcatggcacagcctcatgatctgaaataattacaaatcttggcttcaccttgttttatttttgctttttatcctagttagtctaatatttatattgtcattactgttctatttttgtttccatttacctgatgcatctttgctcaattttttatttttaacctattttccccatttacttctagagagaagcaaggaacaattgaatgtcctagaagaatagttcactgtaaatcatcatctctaggataatacgtcactgaggaagtctcttctcacaaattctgagcaaattgagaagtccaagcaatggcacacagatgccaaaatatcaccttaatactgtcaaggctgaagtgaagatgtagcttactgtaaaagcaaaattgacctacaggaattaaactaacctaaccttccaagtcttaggcaataattgaaccaaccagctaaagtttacagcatggggcaggcagagagattcccaaaaggaaaagatggaaattttttttttttttttttttagacagagtctcactctgttgcccaggctggagtgcagtggcacgatctcagctcattgcaacctccacctcctgggttcaagtgattctcctgcctcagcctcccgaatagctgagactacaggtgtaggccaccacacccagctaatttttgtatttttggtagagataggattttcaccatattggccaggctggtctcgaactcttgacctcaggtaatccaccctccttggcctcccaaagtgctgggattacaggcgtgagccaccacccccagccaagttttagttaatctttacaaaacccagtgaggtagttatattcccttttatagatgaaggtactgaggctcagagtttcggtatcttgcccaagctgtaactcctatatagagaatgagaggacattactctagtttcttacctgctacagtagggttataaatgcaaagtactaattattctaccataatgtttcctttattctatttgcagaggtgctgatactcaaagaaggtttaagttgtctgatctctctataaattccactgaatgtctacatgtgcattgccgaggattagagaccagtttggctgaatgtacttttactaagagaagaactatgggttaccaggatttcgctgatgtggtttgttatacacagaaagcagattctccaatggatgacttctttcagtgtgtgaatgggaaatacatttctcagatgaaagcctgtgatggtatcaatgattgtggagaccaaagtgatgaactgtgttgtaaagcatgccaaggcaaaggcttccattgcaaatcgggtgtttgcattccaagccagtatcaatgcaatggtgaggtggactgcattacaggggaagatgaagttggctgtgcaggctttgcatctgtgactcaagaagaaacagaaattttgactgctgacatggatgcagaaagaagacggataaaatcattattacctaaactatcttgtggagttaaaaacagaatgcacattcgaaggaaacgaattgtgggaggaaagcgagcacaactgggagacctcccatggcaggtggcaattaaggatgccagtggaatcacctgtgggggaatttatattggtggctgttggattctgactgctgcacattgtctcagagccagtaaaactcatcgttaccaaatatggacaacagtagtagactggatacaccccgaccttaaacgtatagtaattgaatacgtggatagaattattttccatgaaaactacaatgcaggcacttaccaaaatgacatcgctttgattgaaatgaaaaaagacggaaacaaaaaagattgtgagctgcctcgttccatccctgcctgtgtcccctggtctccttacctattccaacctaatgatacatgcatcgtttctggctggggacgagaaaaagataacgaaagagtcttttcacttcagtggggtgaagttaaactaataagcaactgctctaagttttacggaaatcgtttctatgaaaaagaaatggaatgtgcaggtacatatgatggttccatcgatgcctgtaaaggggactctggaggccccttagtctgtatggatgccaacaatgtgacttatgtctggggtgttgtgagttggggggaaaactgtggaaaaccagagttcccaggtgtttacaccaaagtggccaattattttgactggattagctaccatgtaggaaggccttttatttctcagtacaatgtataaaattgtgatctctctcttcattctattctttttctctcaagagttccatttaatggaaataaaacggtataattaataattctctaggggggaaaaatgaagcaaatctcactggatatttttaaaggtctccacagagtttatgccatattggaattttgttgtataattctcaaataaatattttggtgaagcatacaa

SEQ ID NO: 5179 - protein, 380 aa, Homo sapiens
MGYQDFADVVCYTQKADSPMDDFFQCVNGKYISQMKACDGINDCGDQSDELCCKACQGKGFHCKSGVCIPSQYQCNGEVDCITGEDEVGCAGFASVTQEETEILTADMDAERRRIKSLLPKLSCGVKNRMHIRRKRIVGGKRAQLGDLPWQVAIKDASGITCGGIYIGGCWILTAAHCLRASKTHRYQIWTTVVDWIHPDLKRIVIEYVDRIIFHENYNAGTYQNDIALIEMKKDGNKKDCELPRSIPACVPWSPYLFQPNDTCIVSGWGREKDNERVFSLQWGEVKLISNCSKFYGNRFYEKEMECAGTYDGSIDACKGDSGGPLVCMDANNVTYVWGVVSWGENCGKPEFPGVYTKVANYFDWISYHVGRPFISQYNV

SEQ ID NO: 5180 - DNA, 2137 bp, Homo sapiens
ggtttcagttacggtaaatctctctggatttcagccaaattctttcagagttcaaaagtacaaagctctttaggaggtttgttcttttgaaacattttttcagaggttaaaaattaaatttcaaaagaatacctggagtggaaaagagttctcagcagagacaaagaccccgaacacctccaacatgaagcttcttcatgttttcctgttatttctgtgcttccacttaaggttttgcaaggtcacttatacatctcaagaggatctggtggagaaaaagtgcttagcaaaaaaatatactcacctctcctgcgataaagtcttctgccagccatggcagagatgcattgagggcacctgtgtttgtaaactaccgtatcagtgcccaaagaatggcactgcagtgtgtgcaactaacaggagaagcttcccaacatactgtcaacaaaagagtttggaatgtcttcatccagggacaaagtttttaaataacggaacatgcacagccgaaggaaagtttagtgtttccttgaagcatggaaatacagattcagagggaatagttgaagtaaaacttgtggaccaagataagacaatgttcatatgcaaaagcagctggagcatgagggaagccaacgtggcctgccttgaccttgggtttcaacaaggtgctgatactcaaagaaggtttaagttgtctgatctctctataaattccactgaatgtctacatgtgcattgccgaggattagagaccagtttggctgaatgtacttttactaagagaagaactatgggttaccaggatttcgctgatgtggtttgttatacacagaaagcagattctccaatggatgacttctttcagtgtgtgaatgggaaatacatttctcagatgaaagcctgtgatggtatcaatgattgtggagaccaaagtgatgaactgtgttgtaaagcatgccaaggcaaaggcttccattgcaaatcgggtgtttgcattccaagccagtatcaatgcaatggtgaggtggactgcattacaggggaagatgaagttggctgtgcaggctttgcatctgtgactcaagaagaaacagaaattttgactgctgacatggatgcagaaagaagacggataaaatcattattacctaaactatcttgtggagttaaaaacagaatgcacattcgaaggaaacgaattgtgggaggaaagcgagcacaactgggagacctcccatggcaggtggcaattaaggatgccagtggaatcacctgtgggggaatttatattggtggctgttggattctgactgctgcacattgtctcagagccagtaaaactcatcgttaccaaatatggacaacagtagtagactggatacaccccgaccttaaacgtatagtaattgaatacgtggatagaattattttccatgaaaactacaatgcaggcacttaccaaaatgacatcgctttgattgaaatgaaaaaagacggaaacaaaaaagattgtgagctgcctcgttccatccctgcctgtgtcccctggtctccttacctattccaacctaatgatacatgcatcgtttctggctggggacgagaaaaagataacgaaagagtcttttcacttcagtggggtgaagttaaactaataagcaactgctctaagttttacggaaatcgtttctatgaaaaagaaatggaatgtgcaggtacatatgatggttccatcgatgcctgtaaaggggactctggaggccccttagtctgtatggatgccaacaatgtgacttatgtctggggtgttgtgagttggggggaaaactgtggaaaaccagagttcccaggtgtttacaccaaagtggccaattattttgactggattagctaccatgtaggaaggccttttatttctcagtacaatgtataaaattgtgatctctctcttcattctattctttttctctcaagagttccatttaatggaaataaaacggtataattaataattctctaggggggaaaaatgaagcaaatctcactggatatttttaaaggtctccacagagtttatgccatattggaattttgttgtataattctcaaataaatattttggtgaagcatacaa

SEQ ID NO: 5181 - protein, 583 aa, Homo sapiens
MKLLHVFLLFLCFHLRFCKVTYTSQEDLVEKKCLAKKYTHLSCDKVFCQPWQRCIEGTCVCKLPYQCPKNGTAVCATNRRSFPTYCQQKSLECLHPGTKFLNNGTCTAEGKFSVSLKHGNTDSEGIVEVKLVDQDKTMFICKSSWSMREANVACLDLGFQQGADTQRRFKLSDLSINSTECLHVHCRGLETSLAECTFTKRRTMGYQDFADVVCYTQKADSPMDDFFQCVNGKYISQMKACDGINDCGDQSDELCCKACQGKGFHCKSGVCIPSQYQCNGEVDCITGEDEVGCAGFASVTQEETEILTADMDAERRRIKSLLPKLSCGVKNRMHIRRKRIVGGKRAQLGDLPWQVAIKDASGITCGGIYIGGCWILTAAHCLRASKTHRYQIWTTVVDWIHPDLKRIVIEYVDRIIFHENYNAGTYQNDIALIEMKKDGNKKDCELPRSIPACVPWSPYLFQPNDTCIVSGWGREKDNERVFSLQWGEVKLISNCSKFYGNRFYEKEMECAGTYDGSIDACKGDSGGPLVCMDANNVTYVWGVVSWGENCGKPEFPGVYTKVANYFDWISYHVGRPFISQYNV

SEQ ID NO: 5182 - DNA, 1336 bp, Homo sapiens
ggtttcagttacggtaaatctctctggatttcagccaaattctttcagagttcaaaagtacaaagctctttaggaggtttgttcttttgaaacattttttcagaggttaaaaattaaatttcaaaagaatacctggagtggaaaagagttctcagcagagacaaagaccccgaacacctccaacatgaagcttcttcatgttttcctgttatttctgtgcttccacttaaggttttgcaaggtcacttatacatctcaagaggatctggtggagaaaaagtgcttagcaaaaaaatatactcacctctcctgcgataaagtcttctgccagccatggcagagatgcattgagggcacctgtgtttgtaaactaccgtatcagtgcccaaagaatggcactgcagtgtgtgcaactaacaggagaagcttcccaacatactgtcaacaaaagagtttggaatgtcttcatccagggacaaagtttttaaataacggaacatgcacagccgaaggaaagtttagtgtttccttgaagcatggaaatacagattcagagggaatagttgaagtaaaacttgtggaccaagataagacaatgttcatatgcaaaagcagctggagcatgagggaagccaacgtggcctgccttgaccttgggtttcaacaaggtgctgatactcaaagaaggtttaagttgtctgatctctctataaattccactgaatgtctacatgtgcattgccgaggattagagaccagtttggctgaatgtacttttactaagagaagaactatgggttaccaggatttcgctgatgtggtttgttatacacagaaagcagattctccaatggatgacttctttcagtgtgtgaatgggaaatacatttctcagatgaaagcctgtgatggtatcaatgattgtggagaccaaagtgatgaactgtgttgtaaagcatgccaaggcaaaggcttccattgcaaatcgggtgtttgcattccaagccagtatcaatgcaatggtgaggtggactgcattacaggggaagatgaagttggctgtgcaggctttgcatctgtgactcaagaagaaacagaaattttgactgctgacatggatgcagaaagaagacggataaaatcattattacctaaactatcttgtggagttaaaaacagaatgcacattcgaaggaaacgaattgtgggaggaaagcgagcacaactggggggaaaaatgaagcaaatctcactggatatttttaaaggtctccacagagtttatgccatattggaattttgttgtataattctcaaataaatattttggtgaagc

SEQ ID NO: 5183 - protein, 378 aa, Homo sapiens
MKLLHVFLLFLCFHLRFCKVTYTSQEDLVEKKCLAKKYTHLSCDKVFCQPWQRCIEGTCVCKLPYQCPKNGTAVCATNRRSFPTYCQQKSLECLHPGTKFLNNGTCTAEGKFSVSLKHGNTDSEGIVEVKLVDQDKTMFICKSSWSMREANVACLDLGFQQGADTQRRFKLSDLSINSTECLHVHCRGLETSLAECTFTKRRTMGYQDFADVVCYTQKADSPMDDFFQCVNGKYISQMKACDGINDCGDQSDELCCKACQGKGFHCKSGVCIPSQYQCNGEVDCITGEDEVGCAGFASVTQEETEILTADMDAERRRIKSLLPKLSCGVKNRMHIRRKRIVGGKRAQLGGKMKQISLDIFKGLHRVYAILEFCCIILK

SEQ ID NO: 5184 - DNA, 1463 bp, Homo sapiens
ggtttcagttacggtaaatctctctggatttcagccaaattctttcagagttcaaaagtacaaagctctttaggaggtttgttcttttgaaacattttttcagaggttaaaaattaaatttcaaaagaatacctggagtggaaaagagttctcagcagagacaaagaccccgaacacctccaacatgaagcttcttcatgttttcctgttatttctgtgcttccacttaaggttttgcaaggtcacttatacatctcaagaggatctggtggagaaaaagtgcttagcaaaaaaatatactcacctctcctgcgataaagtcttctgccagccatggcagagatgcattgagggcacctgtgtttgtaaactaccgtatcagtgcccaaagaatggcactgcagtgtgtgcaactaacaggagaagcttcccaacatactgtcaacaaaagagtttggaatgtcttcatccagggacaaagtttttaaataacggaacatgcacagccgaaggaaagtttagtgtttccttgaagcatggaaatacagattcagagggaatagttgaagtaaaacttgtggaccaagataagacaatgttcatatgcaaaagcagctggagcatgagggaagccaacgtggcctgccttgaccttgggtttcaacaaggtgctgatactcaaagaaggtttaagttgtctgatctctctataaattccactgaatgtctacatgtgcattgccgaggattagagaccagtttggctgaatgtacttttactaagagaagaactatgggttaccaggatttcgctgatgtggtttgttatacacagaaagcagattctccaatggatgacttctttcagtgtgtgaatgggaaatacatttctcagatgaaagcctgtgatggtatcaatgattgtggagaccaaagtgatgaactgtgttgtaaagcatgccaaggcaaaggcttccattgcaaatcgggtgtttgcattccaagccagtatcaatgcaatggtgaggtggactgcattacaggggaagatgaagttggctgtgcaggctttgcatctgtgactcaagaagaaacagaaattttgactgctgacatggatgcagaaagaagacggataaaatcattattacctaaactatcttgtggagttaaaaacagaatgcacattcgaaggaaacgaattgtgggaggaaagcgagcacaactgggagacctcccatggcaggtggcaattaaggatgccagtggaatcacctgtgggggaatttatattggtggctgttggattctgactgctgcacattgtctcagagccagtaaaactcatcgttaccaaatatggacaacagtagtagactggatacaccccgaccttaaacgtatagtaattgaatacgtggatagaattattttccatgaaaactacaatgcaggcacttacc

SEQ ID NO: 5185 - protein, 425 aa, Homo sapiens
MKLLHVFLLFLCFHLRFCKVTYTSQEDLVEKKCLAKKYTHLSCDKVFCQPWQRCIEGTCVCKLPYQCPKNGTAVCATNRRSFPTYCQQKSLECLHPGTKFLNNGTCTAEGKFSVSLKHGNTDSEGIVEVKLVDQDKTMFICKSSWSMREANVACLDLGFQQGADTQRRFKLSDLSINSTECLHVHCRGLETSLAECTFTKRRTMGYQDFADVVCYTQKADSPMDDFFQCVNGKYISQMKACDGINDCGDQSDELCCKACQGKGFHCKSGVCIPSQYQCNGEVDCITGEDEVGCAGFASVTQEETEILTADMDAERRRIKSLLPKLSCGVKNRMHIRRKRIVGGKRAQLGDLPWQVAIKDASGITCGGIYIGGCWILTAAHCLRASKTHRYQIWTTVVDWIHPDLKRIVIEYVDRIIFHENYNAGT

SEQ ID NO: 5186 - DNA, 1331 bp, Homo sapiens
ggtttcagttacggtaaatctctctggatttcagccaaattctttcagagttcaaaagtacaaagctctttaggaggtttgttcttttgaaacattttttcagaggttaaaaattaaatttcaaaagaatacctggagtggaaaagagttctcagcagagacaaagaccccgaacacctccaacatgaagcttcttcatgttttcctgttatttctgtgcttccacttaaggttttgcaaggtcacttatacatctcaagaggatctggtggagaaaaagtgcttagcaaaaaaatatactcacctctcctgcgataaagtcttctgccagccatggcagagatgcattgagggcacctgtgtttgtaaactaccgtatcagtgcccaaagaatggcactgcagtgtgtgcaactaacaggagaagcttcccaacatactgtcaacaaaagagtttggaatgtcttcatccagggacaaagtttttaaataacggaacatgcacagccgaaggaaagtttagtgtttccttgaagcatggaaatacagattcagagggaatagttgaagtaaaacttgtggaccaagataagacaatgttcatatgcaaaagcagctggagcatgagggaagccaacgtggcctgccttgaccttgggtttcaacagtgagcgcttgtatcagtggattttctcatggctgatttaattgttctgtttgctttttgattacctaacctttctgtgtattaatttccatatgtgtaacctaagaaaattaactatgtgcatcatagcattgttatgaggatgatatgcattcatgtttacccaacacttggaaccctgctgacaacaaagcatggataataagtctgttgaagtatctggatgtgaatcctttagtgattctgagagtcacaaacacattcatttctgtctgtctcctactcgtctacaattatgtacactttttcacacttagtatagtttatatactgtgtgtgagtatagtttatagttatataatatagtttatactataaactatacagtgagtataaactatacagttatagtataaactatatagttaggataaattatagtttatagttttatagtatagtttactataattatagtatataagtatatatactatgagtatagtgtacaaactataatttatatatagcttatatactataattatagtatatatacttatatataagtgatattttatttattgtttggttcagaatatcttctaactttcaatataatttcttctttgccccatatgtaatttagaagttttctttattat

SEQ ID NO: 5187 - protein, 161 aa, Homo sapiens
MKLLHVFLLFLCFHLRFCKVTYTSQEDLVEKKCLAKKYTHLSCDKVFCQPWQRCIEGTCVCKLPYQCPKNGTAVCATNRRSFPTYCQQKSLECLHPGTKFLNNGTCTAEGKFSVSLKHGNTDSEGIVEVKLVDQDKTMFICKSSWSMREANVACLDLGFQQ

SEQ ID NO: 5188 - DNA, 747 bp, Homo sapiens
tggagaaaatcgttttacttcgagtgacaagatttttgggtttaaataaatattgaatctttggaaaagttatattgcaaaaagggatcttgaaatgtttccactgctgcttggactttagaataaggaagtctcaagtcttaccgaaaaccaccgtggggaattgcagaacaaaaccgaacaatattttccttcccctggaacacaactgtataactacgtgaggaaccctttccttgaatcttctcagcctgagcacctggctttatttgtgagagaagctttggagaatgtgggggaagctgatgtcaaatataaagggcttaaagagagaagagggagaggagctttcagcacagtccagttcacagcccgtcggtgctcaaaacatacttgaatacctggtacaaaagataaaaatgatggtttggttttctataagacagcatagtttctttaaaattacacacacacatgcattgcttttcttcctttaattagttgagaccataggacaaaagaagaggcatagttgagcgcgtaatggtgcgaaaatcaaaaggttgggaagaaacaagaaactcagataaacgcttccgtcggctgtgacaggttctgaggcgcccagatctactggacatagcgcggctcagaagcctcagagacctgtccgcacagttcctgaagttagcaacaaattagtgagtgctgttgcgggccattttgcagccagagaagcaaatgcgc

SEQ ID NO: 5189 - protein, 68 aa, Homo sapiens [sequence omitted]

SEQ ID NO: 5190 - DNA, 1026 bp, Homo sapiens
gtgctgcaaaggacgccgctgttatacgtcacttccacggctcagcgtcaggcaagagagagaatgtcttttcgaggcggaggtcgtggaggctttaatcgaggtggtggaggtggcggcttcaaccgaggtggcagcagcaaccacttccgaggtggaggcggcggtggaggcggcggcaatttcagaggcggcggcaggggaggatttggacgagggggtggccgcggaggctttaacaaaggccaagaccaaggacctccagaacgtgtagtcttattaggagagttcctgcatccctgtgaagatgacatagtttgtaaatgtaccacagatgaaaataaggtgccttatttcaatgctcctgtttacttagaaaacaaagaacaaattggaaaagtggatgaaatatttggacaactcagagatttttatttttcagttaagttgtcagaaaacatgaaggcttcatcctttaaaaaactacagaagttttatatagacccatataagctgctgccactgcagaggtttttacctcgacctccaggtgagaaaggacctccaagaggtggtggcaggggaggccgaggaggaggaagaggaggaggtggcagaggtggtggcagaggcggtggttttagaggtggaagaggaggtggaggtgggggcttcagaggaggaagaggtggtggtttcagagggagaggacattaagtgaaacagttgacagacatcaccagttgacttctgcattaacctgcatgatctgtttctactatggattggaaacttgtttcttgaacaagtcttgaagatcttggtcattttatgacaatggatctaaaatgtcagcatcatgcaaagtgcaacggaatagtgaattttgctctaaaagagcatgaacaagtctttctaatgttttgtacagtgcctggcactctgtgggtgctcaataaatggataggagttttcatttgaagcatatttgaatttttaaaataaagtgttttattcccttaagtt

SEQ ID NO: 5191 - protein, 217 aa, Homo sapiens; identical to SEQ ID NO: 578

SEQ ID NO: 5192 - DNA, 1270 bp, Homo sapiens
ccgctgttatacgtcacttccacggctcagcgtcaggcaagttggcctctctgttgtaaattagtggttaaggttatctattattgccacttttccagcgctaaaggctgttttggaaccagtgttgcttgttccgcgggtgattggcttttttttttggcaaaccagttattcaagtttctggtctttaaaaaactctgtggcggtacggtaaccgaggaggttccagcgcggcggaagtaccccgcgggtgggtgtgtgcgcaaggccagggccagaggggcacgtggcgccgggaggagagagaatgtcttttcgaggcggaggtcgtggaggctttaatcgaggtggtggaggtggcggcttcaaccgaggtggcagcagcaaccacttccgaggtggaggcggcggtggaggcggcggcaatttcagaggcggcggcaggggaggatttggacgagggggtggccgcggaggctttaacaaaggccaagaccaaggacctccagaacgtgtagtcttattaggagagttcctgcatccctgtgaagatgacatagtttgtaaatgtaccacagatgaaaataaggtgccttatttcaatgctcctgtttacttagaaaacaaagaacaaattggaaaagtggatgaaatatttggacaactcagagatttttatttttcagttaagttgtcagaaaacatgaaggcttcatcctttaaaaaactacagaagttttatatagacccatataagctgctgccactgcagaggtttttacctcgacctccaggtgagaaaggacctccaagaggtggtggcaggggaggccgaggaggaggaagaggaggaggtggcagaggtggtggcagaggcggtggttttagaggtggaagaggaggtggaggtgggggcttcagaggaggaagaggtggtggtttcagagggagaggacattaagtgaaacagttgacagacatcaccagttgacttctgcattaacctgcatgatctgtttctactatggattggaaacttgtttcttgaacaagtcttgaagatcttggtcattttatgacaatggatctaaaatgtcagcatcatgcaaagtgcaacggaatagtgaattttgctctaaaagagcatgaacaagtctttctaatgttttgtacagtgcctggcactctgtgggtgctcaataaatggataggagttttcatttgaagcatatttgaatttttaaaataaagtgttttattcccttaagtt

SEQ ID NO: 5193 - protein, 217 aa, Homo sapiens; identical to SEQ ID NO: 578

SEQ ID NO: 5194 - DNA, 269 bp, Homo sapiens
acgtggcgccgggaggagagagaatgtcttttcgaggcggaggtcgtggaggctttaatcgaggtggtggaggtggcggcttcaaccgaggtggcagcagcaaccacttccgaggtggaggcggcggtggaggcggcggcaatttcagaggcggcggcaggggaggatttggacgagggggtggccgcggaggctttaacaaaggccaagaccaaggacctccagaacgtgtagtctgtatgcagtcttcagtatttagcttatttgaa

SEQ ID NO: 5195 - protein, 81 aa, Homo sapiens
MSFRGGGRGGFNRGGGGGGFNRGGSSNHFRGGGGGGGGGNFRGGGRGGFGRGGGRGGFNKGQDQGPPERVVCMQSSVFSLF

SEQ ID NO: 5196 - DNA, 496 bp, Homo sapiens
taggcttatcaatataagaggttatacagttaataacttaatgattattatattctattgttatttaaatactttgcgttattatttaataaatgttttttaggtggttttagaggtggaagaggaggtggaggtgggggcttcagaggaggaagaggtggtggtttcagagggagaggacattaagtgaaacagttgacagacatcaccagttgacttctgcattaacctgcatgatctgtttctactatggattggaaacttgtttcttgaacaagtcttgaagatcttggtcattttatgacaatggatctaaaatgtcagcatcatgcaaagtgcaacggaatagtgaattttgctctaaaagagcatgaacaagtctttctaatgttttgtacagtgcctggcactctgtgggtgctcaataaatggataggagttttcatttgaagcatatttgaatttttaaaataaagtgttttattcccttaagtta

SEQ ID NO: 5197 - protein, 49 aa, Homo sapiens
MTMDLKCQHHAKCNGIVNFALKEHEQVFLMFCTVPGTLWVLNKWIGVFI

SEQ ID NO: 5198 - DNA, 1610 bp, Homo sapiens
attatgaagggtgtttcggtatcttccctccaaaatgctaagaaataatttaggcaacagttcagactctaaaaatgaagatggctcggtcttttcacagactgaacacaatattgttgcaacttacttgattatggcaggtatgataagtattatcagcaacataatagttctgggcatcttcattaagtacaaggaacttcggacacccacaaatgcaattattattaacctggctgttactgatataggggtcagtagcattggctatcccatgtctgctgcctcagatctgtatggaagttggaaatttggatacgcaggctgtcaggtttatgctggattgaatattttttttggaatggcaagcattggattactcacggtcgtggctgtggaccgatacctgaccatctgccttcctgacgtagggagaagaatgaccaccaacacttacatcggcttgattctgggagcctggatcaatggcctgttttgggctttgatgcctatcatagggtgggctagttatgccccagatcctactggtgctacgtgtaccataaactggaggaaaaatgatagatcttttgtgtcttacaccatgacagttattgcgataaattttattgtgcccttgacagtgatgttttactgctattaccatgtcacgctatccattaaacatcacactaccagtgactgcactgagtccctcaacagagactggtcagatcagatagatgtaacaaagatgtctgtgatcatgatctgcatgtttctggtggcatggtccccttattccatcgtgtgcttatgggcttcttttggtgacccaaagaagattcctccccccatggccatcatagctccactgtttgcaaaatcttctacattctataacccctgcatttatgtggttgctaataaaaagtttcggagggcaatgcttgccatgttcaaatgtcagactcaccaaacaatgcctgtgacaagtattttacccatggatgtatctcaaaacccattggcttctggaagaatctgaaataagataaaaggacacactatcaaaacactttagttttttgacaatgcttttcttttaaatatgagcccatttagatcaagtgcagacatggatcattgtcctatgagagtgtaagctcctcaagcacagctcgtgcttctgtttgtgcactctggctgctgtagtgtatgcttctctgtgtcctgatatatcaacttattgctcatctcctttgatgaattaggcatcagaggttaaggtcccctttctttctccctattatggcatgcattacactgtactgatgacctttaacttgcctggctcctccattagaataaaagcagtcactaatttaatgttagaataaatgaataattctagataattactgaaatgagttgttggatgttcccagttagaatagaaagcattttttgaatttcaacattttaacatttaaatcaattaacttatgttattaaacaaaaataaatgaacattaaacatgattgtttctaaataaaatgttaagtcaatgcatatatattatatagcattatgacccctgtgcatattt

SEQ ID NO: 5199 - protein, 337 aa, Homo sapiens; identical to SEQ ID NO: 582

SEQ ID NO: 5200 - DNA, 3780 bp, Homo sapiens
cttagaccttggttagatttgaaccaaggccctcctcggcctcccaaagtgctgggattacaggcgtgagccactgcccagctgaaaattgatacatttttcaaatgagaagtatttttttcaaatgggtgttggaaagtgagtttcctcacattgttcatgttgtgacactaggttggtgctatgtaatgacatggatatgaacgagctgcctacgaacctccccgtggacactgtgaagcttcgcatagagaagactgtcatccgcagaatctctgcggaggccttctattacctggtggagctccagtatctctgggtgacttacaattccgtggccagcattgaccccagcagcttttacaacctgaagcaactgcatgagttgcgcttggatgggaattctctggctgctttcccttgggcatctctgctggacatgccccttctgaggaccctggacttgcacaataacaaaataaccagtgtgccaaatgaggcgctcaggtatctgaagaaccttgcctacttggatttatcaagcaacagactcaccacattgccaccagatttcctggagagctggactcatttagtttcaacaccttctggagtcctggacctttccccaagcaggattattcttggctgatagaacgttacggctgtaaaaagctctagcatttatctagtcaactctcccattttgccgatgagaaaacaggctcagcaaggttgcatcacccaggtcacagaattaactaatggttgagcctcatcaggaacccaggcacagtaaagttggtctacaggacaatccttggttctgtgactgtcatatttccaaaatgattgagttgtcaaaggtcgttgaccctgctatagtgcttctggatccactgatgacttgcagtgaacctgagcgcctcacaggaattttgtttcagcgggctgaattggagcattgtctgaaaccatcagtgatgacctcagccaccaaaatcatgtctgctctgggcagtaatgttctactgcggtgtgatgccactggcttccccaccccacagatcacatggaccagatctgacagctcgccagttaattatacagtaatacaagaatctccagaggaaggagtcagatggtccataatgagcttgacaggcatttcttccaaagacgctggggattacaaatgtaaggccaaaaatctggctgggatgtcagaagctgtggttactgtgacagtgcttggcattaccacaactccaataccaccagacacttctgaaagaactggagatcatcctgagtgggatgtccagccgggatctggaagatctacatctgtatctagcgcatcatcatatctttggtcctcttccttctcccccacatcttctttttctgcttctactttgtctcctccctctactgcttccttctctttatctcctttctcctcctccactgtttcttcaaccacaactctgagcacaagcatctcagcaagtaccaccatggccaacaagcgatcattccagctccaccaaggtgggaaaagaaatttaaaggtggcaaagaatggaagtaagcttcctccagccagcacaagtaagaaagaagagctggcattgttggatcaaacaatgcttacggagacaaatgccgcaatagaaaacctcagggtggtcagtgagactaaagagagtgtgacattgacgtggaatatgatcaacaccacacataactctgcagtgactgtgttgtattccaagtatggtgggaaggacctgctgctgttgaatgcagactccagcaagaaccaagtaaccatagatggcttggaacccggtgggcaatacatggcctgtgtctgtccaaaaggagtgcctccccagaaagaccaatgcatcaccttttctactgaaagagttgaaggagatgattctcaatggtctctccttctcgtggtgaccagtactgcctgtgttgttatcttaccattgatttgtttcttgttgtacaaagtttgcaaactgcaatgtaaatcagaacctttttgggaagatgatttggcaaaggagacttatatccaatttgagaccctgtttcccaggtctcaaagtgtaggtgagctctggacacgaagccacagggatgactcagagaaattgctgctttgttctaggtcaagtgtggaatctcaggtgacttttaaaagtgaaggttccagaccagagtattattgctaaggttctgcagctcaggtgcatgtgagctacaaaactagcatctaagggtataattgaccctaggtttggatgacttttggacagactttcacattgtacatgaaaatcacaaatggaatgcttttaagtatgtttaaaaaataccatgagacctctgaactgaaaagacaaataatgttgattttttttcttgtgtggaaaaggtctacagaaataatttttagagtggtgcttaataaattattaatactttttagggtaatgttttagttcttaaaaataagttcatgtgaaagtagcaagtgaactctgtatttaaaaatatagttttttgagtcatgaggaaacattagcaaaaccagctaagccttgatgtttattcatgttcgaagtgcattatagcatttgctgtggatgttttctgacattgcctaatggagagcgtgggatcataaaggattttgtgttcactaaggttaaatctaactcacgggagagagagggctctgtctcttggtaccattatgcattgtgatactatagagttgtgttcatatttcttgtaagaaaaatttttgcttttctttagaaatataggtattagcaaaagtaagtatacaaagaggattatgacaaatagaccatttctttaaaaatggtaactgttgcatttaaacacatcgactgacagattatatggatatttaaaaataactttaaatcaatcttttaatattttgctgtttgctcttatgttctcccttctttcttccttccttgtcttccctccctttccttccttcattctttctttcttctgctctgtcagaagatatacaagtagccaaagcatcacgagccaagctgtttgtcttttgccatattgtcttttgattctcttgataaagagaaagcttttgaaattacttactgccctttgaaagtctgttttacaaccccaaaggatattttaggactttaaaagggaagcttcagtggattcatttggttagattcttttcctaggttaaaaacatcggggaacttaaatacataggaaaggagttcacaaataaaatttagtttttttagaaagagaatattttaataactgtagtatactacaagaaacatctcatggctttaagattaacgatagcgataaggcccactcaagcatctcacagtggtgatattacatgtcacttagcaggatgcaacctggcctagggatttccagaagacaaggccacctcagcacagatgcaactttcataaattttagaacaaagcctaaccttactagattaaacttgctctatgaaagaaacacttggtaattgacccagactgaatacatgtataagaaatgggaaagatctcccaaactctgagaacggtcctcaaatagaagctctcctagtcagttggtcatctgacctctgactatatccggcctatgacaccagccagctcctgctttctgtcttgtaagagcactgctggaataaactacttgagcatt

SEQ ID NO: 5201 - protein, 496 aa, Homo sapiens
MVEPHQEPRHSKVGLQDNPWFCDCHISKMIELSKVVDPAIVLLDPLMTCSEPERLTGILFQRAELEHCLKPSVMTSATKIMSALGSNVLLRCDATGFPTPQITWTRSDSSPVNYTVIQESPEEGVRWSIMSLTGISSKDAGDYKCKAKNLAGMSEAVVTVTVLGITTTPIPPDTSERTGDHPEWDVQPGSGRSTSVSSASSYLWSSSFSPTSSFSASTLSPPSTASFSLSPFSSSTVSSTTTLSTSISASTTMANKRSFQLHQGGKRNLKVAKNGSKLPPASTSKKEELALLDQTMLTETNAAIENLRVVSETKESVTLTWNMINTTHNSAVTVLYSKYGGKDLLLLNADSSKNQVTIDGLEPGGQYMACVCPKGVPPQKDQCITFSTERVEGDDSQWSLLLVVTSTACVVILPLICFLLYKVCKLQCKSEPFWEDDLAKETYIQFETLFPRSQSVGELWTRSHRDDSEKLLLCSRSSVESQVTFKSEGSRPEYYC

SEQ ID NO: 5202 - DNA, 5906 bp, Homo sapiens
tctctgtgcgggtttaaatgggtaactgtgacttctcgcctcattcacccaaacctccagtcttctcccccgcacatcctcctccacccacctggtttctccctagactggtgtgctcgtgtgtgcaaccaaaggagggagtgcgagagatccacgaagggacaggcttggagtcgctagagggaggtgtgggaccagcgaggagggggcttcgccagggagggggtgctggcaggcggagggagcggcgggaggaggcgccggaggaggagacggaggcctggggacggcagaagaggcttcgcctgagccgagcgctctttctctcgccgcgccgtcttgaagccgcgcgggctcgtgagcagcgcgaggccgccaaggtgcctcgcttcgccggagccgctgccgcccgccggagggaagccggcctcgggcgcgcacgctcgtcggagccccggcgcgccccgcgcctgagcctgctgacagcggccgctgggctcaggctgtccgctctgggctccgcggcctcggccccgctgcactccacctccgccccctcggactccctcccctctgcttctactcctcctgctccagtgcggatcgtttcgcaactgcttgccactcgtcccgtgcctggctgtttttccatttcccggccccctcttcttgagtactttaccccctgcatttggggacagggactggaaaaggggcgggtggagcgtccagtggagaagaaggaagcgaggcccgcaggaggaggaggatcggcggactgtggggaggagaccccacgccaccctttctggtcatctcccctcccgccccgcccctgcgcacactccctcgcgggcgagctactttcggaccaggaaagtaagagcggccctgggtgacagcgccgcggggccagtcccggggttagccgcgcgtctgctcgcttctggtccgtcgcgctcccagccagggcacagcccggaccgaggatggcttcgaccacaacctgcaccaggttcacggacgagtatcagcttttcgaggagcttggaaagggggcattctcagtggtgagaagatgtatgaaaattcctactggacaagaatatgctgccaaaattatcaacaccaaaaagctttctgctagggatcatcagaaactagaaagagaagctagaatctgccgtcttttgaagcaccctaatattgtgcgacttcatgatagcatatcagaagagggctttcactacttggtgtttgatttagttactggaggtgaactgtttgaagacatagtggcaagagaatactacagtgaagctgatgccagtcattgtatacagcagattctagaaagtgttaatcattgtcacctaaatggcatagttcacagggacctgaagcctgagaatttgcttttagctagcaaatccaagggagcagctgtgaaattggcagactttggcttagccatagaagttcaaggggaccagcaggcgtggtttggttttgctggcacacctggatatctttctccagaagttttacgtaaagatccttatggaaagccagtggatatgtgggcatgtggtgtcattctctatattctacttgtggggtatccacccttctgggatgaagaccaacacagactctatcagcagatcaaggctggagcttatgattttccatcaccagaatgggacacggtgactcctgaagccaaagacctcatcaataaaatgcttactatcaaccctgccaaacgcatcacagcctcagaggcactgaagcacccatggatctgtcaacgttctactgttgcttccatgatgcacagacaggagactgtagactgcttgaagaaatttaatgctagaagaaaactaaagggtgccatcttgacaactatgctggctacaaggaatttctcagcagccaagagtttgttgaagaaaccagatggagtaaaggagtcaactgagagttcaaatacaacaattgaggatgaagatgtgaaagcacgaaagcaagagattatcaaagtcactgaacaactgatcgaagctatcaacaatggggactttgaagcctacacaaaaatctgtgacccaggccttactgcttttgaacctgaagctttgggtaatttagtggaagggatggattttcaccgattctactttgaaaatgctttgtccaaaagcaataaaccaatccacactattattctaaaccctcatgtacatctggtaggggatgatgccgcctgcatagcatatattaggctcacacagtacatggatggcagtggaatgccaaagacaatgcagtcagaagagactcgtgtgtggcaccgccgggatggaaagtggcagaatgttcattttcatcgctcggggtcaccaacagtacccatcaactaaatttcaacagtgccacttctgcattctctgttctcaaggcacctggatggtgaccctgggccgtcctctcctcctcttcatgcatgtttctgagtgcatgaagttgtgaaggtcctacatgtaatgcatatgtgatgcatcatcttatcatatattccttcctatacattgtttacacttcaactacggggatgttccacacaaacttaaattactgttggcaaaacaatagggggagattagacaaaaaaaaaaatccacaatattccaagtacaactcttcatcaagtttctctgttaatgccaagatttaacagacttaagaactattgttctctgaatgacagttgtaagagaaatgtaaattttttagaactctttgctgttaatctgttttggtttgtttggtttttttttttttttttaaggtaaaaaaaaaatacaccttcagtttcctggtgtgatcctggttaaaatggatgatttttcattgaaagttttgctgattaacaattaaagtgggatgatatgtgggcaaaatcacttatgaaagtagaagcaagaatcagttggtttgctaccacataaagccatgctgtttttggtcaaactgtgtaaactggaaaaattcacatcatttctgagtttaatcactttaggatatattcacattgttttggtgaatttgctgaattgaattgtttttctttctcaaatctgtgatctcttttctttatcctgtttctttgttcctttcgtttgctttcttatttttcttttgttccattcttttcttacttttttcccttttccttttttggggaggctggctagtagtgtgtgagaaaagaatagaagtgaaatttgcataatgaatgtaaaagggaaataaaagtcttttgaaggtagctatactagcacttttgatcatcttcagggcccacaaaaatgttgtcaagattttaaaggtttataattctgcttaagctctagtttggacttaggtatcctaactatgttggaggtatttgcattgtttaaagttaggataaaagcaagttcctcctgtgactgcaacgtcttactgattgggacagttgccaggaggataccaacttgatagcagagggggttttatgcaaacgcactcacctccgccttggggaatgaaagggtcacttctgcatcatcactagctagttttctagtgttagagaggcttacaaatgtttgccattctcataagtgttttgaacttgatctttgtgacttgtgcttttttagcttctctcttgaatcagagtatcattgtcttcctccaaggagttagaatttcccagtttaaaacaaaaagggaaatgtcctaggttttctttgtgcttctcatttttcctttgttgattcaattcctgtgatttttgttctcttccctgaagtgctttacagtgcatggaatctccatcattgttattttaacgatagtaattcacagtcctcagaagcctatttttaaagcagaagcaaaaaagaaaaacaaaataacaaaaacaacccttcctcttttctctcatctcacctctctgtgttgattactaatcatcttagatattattgctagtggatgtatggtagatgggttgaagcttttctgataattattacacaatttaaaacaacatatatatttaaaataaatatatacagtaaatatattgagccatgttaacctgccaatgagatctgtgaaaaaataatggcctcatttttctctttttaatttcttttacccttttgtgaagcagctatacgtggcatacatgtatttaaagaaaaaaaaatagatgtagagtgttttttttacacttttaacttagcatgtggtgttgaagtattactgtagatcaagtttgtcttccgcactaagatgtgaggaaattgtgatttgttctctccaccacaaatgaattacacatttattatcttctatcattttgaaacactgcagtttaccatgggacactgtatatatttcttgccataatggtaaaggactgattgatatatttaagagttaataaatttgtgatttctgctgacagtgcgtccatctttatttcttcagaagaggtactgtatgtatgcctgcatagtgctggccagtgtcaagggcagtgtgtcctactctggtctcatttagtacataacaatttgcacttggtgagaatggcaagttaattgttctctgtgagcaaaacaatggtctcttctgggaaaatgttgctgagaacaatatagttaacaactaagactcctaaaagcttctctaaactgtaccctccaatccagccttcacatggctgctttttttttttttttttaatacgaacctgtccttgtaacactttgatgttatcatttctgggatacaggcaagcaccccagctcctgctactccccagcttgaacttgagcatacatggatgctcagcttcttttgatttgctaaaaacatcacacttgctcacatgcctgtttatgctgttcatgttgtttatgtttcttacctagaataaatagtctcttcccctacttcttttcccgacttcttactttttcctaagattcagtgtacagcatcatgctccacagcaaaccttcctaggccctattctgggcttgccttccctctcaaaacctacataatagattgtatttacctctcctgtcaaccacattgttttgaaaatatatttctatttgtgtctcctctactgcagtataatgtctccatgggcaagaactgtgtattcatcattgcattcctaaacccaaaccaaggccaggaatggagatatcattgataaatagttgttgaattgaggccaagcccttttgataacagaagcctcaaggggtacccagatagtccttgttttaatgatgggttctctcaccactgtcttgatgctctgagcaagttacctcttccctctgaccctcagtttccatatttgtaaaatgagaataaacataccaacttaataaagatattgtgaggattaatgggtacagagtgactagaatgatatttgatagaaattaaatggtagcagtataactattctgatcactgacattaatattcctattgttattattctttgctcacgagggtatacaactcttgttttgctgttgggctgccctctttatgtaggtttactgttaatgctgaggatatactcggactcaaatgtctcagcagaaggctgagagacaccaaatgaagtggtcatctagctgaatgtaggaaaaatgaaatgtagtagcaaatcagtatattctaaggaaattttcaaggaatattaatcttcacccaaattttgaatttttatgtaaaaaattataatttaagggtaaacatagatgacacagctttcgagtgatttcattgaataaaattctactgacttctatgaa

SEQ ID NO: 5203 - protein, 478 aa, Homo sapiens; identical to SEQ ID NO: 592

SEQ ID NO: 5204 - DNA, 6002 bp, Homo sapiens
tctctgtgcgggtttaaatgggtaactgtgacttctcgcctcattcacccaaacctccagtcttctcccccgcacatcctcctccacccacctggtttctccctagactggtgtgctcgtgtgtgcaaccaaaggagggagtgcgagagatccacgaagggacaggcttggagtcgctagagggaggtgtgggaccagcgaggagggggcttcgccagggagggggtgctggcaggcggagggagcggcgggaggaggcgccggaggaggagacggaggcctggggacggcagaagaggcttcgcctgagccgagcgctctttctctcgccgcgccgtcttgaagccgcgcgggctcgtgagcagcgcgaggccgccaaggtgcctcgcttcgccggagccgctgccgcccgccggagggaagccggcctcgggcgcgcacgctcgtcggagccccggcgcgccccgcgcctgagcctgctgacagcggccgctgggctcaggctgtccgctctgggctccgcggcctcggccccgctgcactccacctccgccccctcggactccctcccctctgcttctactcctcctgctccagtgcggatcgtttcgcaactgcttgccactcgtcccgtgcctggctgtttttccatttcccggccccctcttcttgagtactttaccccctgcatttggggacagggactggaaaaggggcgggtggagcgtccagtggagaagaaggaagcgaggcccgcaggaggaggaggatcggcggactgtggggaggagaccccacgccaccctttctggtcatctcccctcccgccccgcccctgcgcacactccctcgcgggcgagctactttcggaccaggaaagtaagagcggccctgggtgacagcgccgcggggccagtcccggggttagccgcgcgtctgctcgcttctggtccgtcgcgctcccagccagggcacagcccggaccgaggatggcttcgaccacaacctgcaccaggttcacggacgagtatcagcttttcgaggagcttggaaagggggcattctcagtggtgagaagatgtatgaaaattcctactggacaagaatatgctgccaaaattatcaacaccaaaaagctttctgctagggatcatcagaaactagaaagagaagctagaatctgccgtcttttgaagcaccctaatattgtgcgacttcatgatagcatatcagaagagggctttcactacttggtgtttgatttagttactggaggtgaactgtttgaagacatagtggcaagagaatactacagtgaagctgatgccagtcattgtatacagcagattctagaaagtgttaatcattgtcacctaaatggcatagttcacagggacctgaagcctgagaatttgcttttagctagcaaatccaagggagcagctgtgaaattggcagactttggcttagccatagaagttcaaggggaccagcaggcgtggtttggttttgctggcacacctggatatctttctccagaagttttacgtaaagatccttatggaaagccagtggatatgtgggcatgtggtgtcattctctatattctacttgtggggtatccacccttctgggatgaagaccaacacagactctatcagcagatcaaggctggagcttatgattttccatcaccagaatgggacacggtgactcctgaagccaaagacctcatcaataaaatgcttactatcaaccctgccaaacgcatcacagcctcagaggcactgaagcacccatggatctgtcaacgttctactgttgcttccatgatgcacagacaggagactgtagactgcttgaagaaatttaatgctagaagaaaactaaagggtgccatcttgacaactatgctggctacaaggaatttctcagcagccaagagtttgttgaagaaaccagatggagtaaaggagtcaactgagagttcaaatacaacaattgaggatgaagatgtgaaagcacgaaagcaagagattatcaaagtcactgaacaactgatcgaagctatcaacaatggggactttgaagcctacacaaaaatctgtgacccaggccttactgcttttgaacctgaagctttgggtaatttagtggaagggatggattttcaccgattctactttgaaaatgctttgtccaaaagcaataaaccaatccacactattattctaaaccctcatgtacatctggtaggggatgatgccgcctgcatagcatatattaggctcacacagtacatggatggcagtggaatgccaaagacaatgcagtcagaagagactcgtgtgtggcaccgccgggatggaaagtggcagaatgttcattttcatcgctcggggtcaccaacagtacccatcaagccaccctgtattccaaatgggaaagaaaacttctcaggaggcacctctttgtggcaaaacatctaaggcctgaaaaccattcacatatgggtcttctaaatttcaacagtgccacttctgcattctctgttctcaaggcacctggatggtgaccctgggccgtcctctcctcctcttcatgcatgtttctgagtgcatgaagttgtgaaggtcctacatgtaatgcatatgtgatgcatcatcttatcatatattccttcctatacattgtttacacttcaactacggggatgttccacacaaacttaaattactgttggcaaaacaatagggggagattagacaaaaaaaaaaatccacaatattccaagtacaactcttcatcaagtttctctgttaatgccaagatttaacagacttaagaactattgttctctgaatgacagttgtaagagaaatgtaaattttttagaactctttgctgttaatctgttttggtttgtttggtttttttttttttttttaaggtaaaaaaaaaatacaccttcagtttcctggtgtgatcctggttaaaatggatgatttttcattgaaagttttgctgattaacaattaaagtgggatgatatgtgggcaaaatcacttatgaaagtagaagcaagaatcagttggtttgctaccacataaagccatgctgtttttggtcaaactgtgtaaactggaaaaattcacatcatttctgagtttaatcactttaggatatattcacattgttttggtgaatttgctgaattgaattgtttttctttctcaaatctgtgatctcttttctttatcctgtttctttgttcctttcgtttgctttcttatttttcttttgttccattcttttcttacttttttcccttttccttttttggggaggctggctagtagtgtgtgagaaaagaatagaagtgaaatttgcataatgaatgtaaaagggaaataaaagtcttttgaaggtagctatactagcacttttgatcatcttcagggcccacaaaaatgttgtcaagattttaaaggtttataattctgcttaagctctagtttggacttaggtatcctaactatgttggaggtatttgcattgtttaaagttaggataaaagcaagttcctcctgtgactgcaacgtcttactgattgggacagttgccaggaggataccaacttgatagcagagggggttttatgcaaacgcactcacctccgccttggggaatgaaagggtcacttctgcatcatcactagctagttttctagtgttagagaggcttacaaatgtttgccattctcataagtgttttgaacttgatctttgtgacttgtgcttttttagcttctctcttgaatcagagtatcattgtcttcctccaaggagttagaatttcccagtttaaaacaaaaagggaaatgtcctaggttttctttgtgcttctcatttttcctttgttgattcaattcctgtgatttttgttctcttccctgaagtgctttacagtgcatggaatctccatcattgttattttaacgatagtaattcacagtcctcagaagcctatttttaaagcagaagcaaaaaagaaaaacaaaataacaaaaacaacccttcctcttttctctcatctcacctctctgtgttgattactaatcatcttagatattattgctagtggatgtatggtagatgggttgaagcttttctgataattattacacaatttaaaacaacatatatatttaaaataaatatatacagtaaatatattgagccatgttaacctgccaatgagatctgtgaaaaaataatggcctcatttttctctttttaatttcttttacccttttgtgaagcagctatacgtggcatacatgtatttaaagaaaaaaaaatagatgtagagtgttttttttacacttttaacttagcatgtggtgttgaagtattactgtagatcaagtttgtcttccgcactaagatgtgaggaaattgtgatttgttctctccaccacaaatgaattacacatttattatcttctatcattttgaaacactgcagtttaccatgggacactgtatatatttcttgccataatggtaaaggactgattgatatatttaagagttaataaatttgtgatttctgctgacagtgcgtccatctttatttcttcagaagaggtactgtatgtatgcctgcatagtgctggccagtgtcaagggcagtgtgtcctactctggtctcatttagtacataacaatttgcacttggtgagaatggcaagttaattgttctctgtgagcaaaacaatggtctcttctgggaaaatgttgctgagaacaatatagttaacaactaagactcctaaaagcttctctaaactgtaccctccaatccagccttcacatggctgctttttttttttttttttaatacgaacctgtccttgtaacactttgatgttatcatttctgggatacaggcaagcaccccagctcctgctactccccagcttgaacttgagcatacatggatgctcagcttcttttgatttgctaaaaacatcacacttgctcacatgcctgtttatgctgttcatgttgtttatgtttcttacctagaataaatagtctcttcccctacttcttttcccgacttcttactttttcctaagattcagtgtacagcatcatgctccacagcaaaccttcctaggccctattctgggcttgccttccctctcaaaacctacataatagattgtatttacctctcctgtcaaccacattgttttgaaaatatatttctatttgtgtctcctctactgcagtataatgtctccatgggcaagaactgtgtattcatcattgcattcctaaacccaaaccaaggccaggaatggagatatcattgataaatagttgttgaattgaggccaagcccttttgataacagaagcctcaaggggtacccagatagtccttgttttaatgatgggttctctcaccactgtcttgatgctctgagcaagttacctcttccctctgaccctcagtttccatatttgtaaaatgagaataaacataccaacttaataaagatattgtgaggattaatgggtacagagtgactagaatgatatttgatagaaattaaatggtagcagtataactattctgatcactgacattaatattcctattgttattattctttgctcacgagggtatacaactcttgttttgctgttgggctgccctctttatgtaggtttactgttaatgctgaggatatactcggactcaaatgtctcagcagaaggctgagagacaccaaatgaagtggtcatctagctgaatgtaggaaaaatgaaatgtagtagcaaatcagtatattctaaggaaattttcaaggaatattaatcttcacccaaattttgaatttttatgtaaaaaattataatttaagggtaaacatagatgacacagctttcgagtgatttcattgaataaaattctactgacttctatgaa

SEQ ID NO: 5205 - protein, 499 aa, Homo sapiens; identical to SEQ ID NO: 586

SEQ ID NO: 5206 - DNA, 4567 bp, Homo sapiens
tctctgtgcgggtttaaatgggtaactgtgacttctcgcctcattcacccaaacctccagtcttctcccccgcacatcctcctccacccacctggtttctccctagactggtgtgctcgtgtgtgcaaccaaaggagggagtgcgagagatccacgaagggacaggcttggagtcgctagagggaggtgtgggaccagcgaggagggggcttcgccagggagggggtgctggcaggcggagggagcggcgggaggaggcgccggaggaggagacggaggcctggggacggcagaagaggcttcgcctgagccgagcgctctttctctcgccgcgccgtcttgaagccgcgcgggctcgtgagcagcgcgaggccgccaaggtgcctcgcttcgccggagccgctgccgcccgccggagggaagccggcctcgggcgcgcacgctcgtcggagccccggcgcgccccgcgcctgagcctgctgacagcggccgctgggctcaggctgtccgctctgggctccgcggcctcggccccgctgcactccacctccgccccctcggactccctcccctctgcttctactcctcctgctccagtgcggatcgtttcgcaactgcttgccactcgtcccgtgcctggctgtttttccatttcccggccccctcttcttgagtactttaccccctgcatttggggacagggactggaaaaggggcgggtggagcgtccagtggagaagaaggaagcgaggcccgcaggaggaggaggatcggcggactgtggggaggagaccccacgccaccctttctggtcatctcccctcccgccccgcccctgcgcacactccctcgcgggcgagctactttcggaccaggaaagtaagagcggccctgggtgacagcgccgcggggccagtcccggggttagccgcgcgtctgctcgcttctggtccgtcgcgctcccagccagggcacagcccggaccgaggatggcttcgaccacaacctgcaccaggttcacggacgagtatcagcttttcgaggagcttggaaagggggcattctcagtggtgagaagatgtatgaaaattcctactggacaagaatatgctgccaaaattatcaacaccaaaaagctttctgctagggatcatcagaaactagaaagagaagctagaatctgccgtcttttgaagcaccctaatattgtgcgacttcatgatagcatatcagaagagggctttcactacttggtgtttgatttagttactggaggtgaactgtttgaagacatagtggcaagagaatactacagtgaagctgatgccagtcattgtatacagcagattctagaaagtgttaatcattgtcacctaaatggcatagttcacagggacctgaagcctgagaatttgcttttagctagcaaatccaagggagcagctgtgaaattggcagactttggcttagccatagaagttcaaggggaccagcaggcgtggtttggttttgctggcacacctggatatctttctccagaagttttacgtaaagatccttatggaaagccagtggatatgtgggcatgtggtgtcattctctatattctacttgtggggtatccacccttctgggatgaagaccaacacagactctatcagcagatcaaggctggagcttatgattttccatcaccagaatgggacacggtgactcctgaagccaaagacctcatcaataaaatgcttactatcaaccctgccaaacgcatcacagcctcagaggcactgaagcacccatggatctgtcaacgttctactgttgcttccatgatgcacagacaggagactgtagactgcttgaagaaatttaatgctagaagaaaactaaagggtgccatcttgacaactatgctggctacaaggaatttctcagcagccaagagtttgttgaagaaaccagatggagtaaaggagtcaactgagagttcaaatacaacaattgaggatgaagatgtgaaagcacgaaagcaagagattatcaaagtcactgaacaactgatcgaagctatcaacaatggggactttgaagcctacacaaaaatctgtgacccaggccttactgcttttgaacctgaagctttgggtaatttagtggaagggatggattttcaccgattctactttgaaaatgctttgtccaaaagcaataaaccaatccacactattattctaaaccctcatgtacatctggtaggggatgatgccgcctgcatagcatatattaggctcacacagtacatggatggcagtggaatgccaaagacaatgcagtcagaagagactcgtgtgtggcaccgccgggatggaaagtggcagaatgttcattttcatcgctcggggtcaccaacagtacccatcaagtaaatatttccaggctgtcagcttctttgttaatacacccatgctaaatttcaacagtgccacttctgcattctctgttctcaaggcacctggatggtgaccctgggccgtcctctcctcctcttcatgcatgtttctgagtgcatgaagttgtgaaggtcctacatgtaatgcatatgtgatgcatcatcttatcatatattccttcctatacattgtttacacttcaactacggggatgttccacacaaacttaaattactgttggcaaaacaatagggggagattagacaaaaaaaaaaatccacaatattccaagtacaactcttcatcaagtttctctgttaatgccaagatttaacagacttaagaactattgttctctgaatgacagttgtaagagaaatgtaaattttttagaactctttgctgttaatctgttttggtttgtttggtttttttttttttttttaaggtaaaaaaaaaatacaccttcagtttcctggtgtgatcctggttaaaatggatgatttttcattgaaagttttgctgattaacaattaaagtgggatgatatgtgggcaaaatcacttatgaaagtagaagcaagaatcagttggtttgctaccacataaagccatgctgtttttggtcaaactgtgtaaactggaaaaattcacatcatttctgagtttaatcactttaggatatattcacattgttttggtgaatttgctgaattgaattgtttttctttctcaaatctgtgatctcttttctttatcctgtttctttgttcctttcgtttgctttcttatttttcttttgttccattcttttcttacttttttcccttttccttttttggggaggctggctagtagtgtgtgagaaaagaatagaagtgaaatttgcataatgaatgtaaaagggaaataaaagtcttttgaaggtagctatactagcacttttgatcatcttcagggcccacaaaaatgttgtcaagattttaaaggtttataattctgcttaagctctagtttggacttaggtatcctaactatgttggaggtatttgcattgtttaaagttaggataaaagcaagttcctcctgtgactgcaacgtcttactgattgggacagttgccaggaggataccaacttgatagcagagggggttttatgcaaacgcactcacctccgccttggggaatgaaagggtcacttctgcatcatcactagctagttttctagtgttagagaggcttacaaatgtttgccattctcataagtgttttgaacttgatctttgtgacttgtgcttttttagcttctctcttgaatcagagtatcattgtcttcctccaaggagttagaatttcccagtttaaaacaaaaagggaaatgtcctaggttttctttgtgcttctcatttttcctttgttgattcaattcctgtgatttttgttctcttccctgaagtgctttacagtgcatggaatctccatcattgttattttaacgatagtaattcacagtcctcagaagcctatttttaaagcagaagcaaaaaagaaaaacaaaataacaaaaacaacccttcctcttttctctcatctcacctctctgtgttgattactaatcatcttagatattattgctagtggatgtatggtagatgggttgaagcttttctgataattattacacaatttaaaacaacatatatatttaaaataaatatatacagtaaatatattgagccatgttaacctgccaatgagatctgtgaaaaaataatggcctcatttttctctttttaatttcttttacccttttgtgaagcagctatacgtggcatacatgtatttaaagaaaaaaaaatagatgtagagtgttttttttacacttttaacttagcatgtggtgttgaagtattactgtagatcaagtttgtcttccgcactaagatgtgaggaaattgtgatttgttctctccaccacaaatgaattacacatttattatcttctatcattttgaaacactgcagtttaccatgggacactgtatatatttcttgccataatggtaaaggactgattgatatatttaagagttaataaatttgtgatttctgctgac

SEQ ID NO: 5207 - protein, 478 aa, Homo sapiens; identical to SEQ ID NO: 588

SEQ ID NO: 5208 - DNA, 4523 bp, Homo sapiens
tctctgtgcgggtttaaatgggtaactgtgacttctcgcctcattcacccaaacctccagtcttctcccccgcacatcctcctccacccacctggtttctccctagactggtgtgctcgtgtgtgcaaccaaaggagggagtgcgagagatccacgaagggacaggcttggagtcgctagagggaggtgtgggaccagcgaggagggggcttcgccagggagggggtgctggcaggcggagggagcggcgggaggaggcgccggaggaggagacggaggcctggggacggcagaagaggcttcgcctgagccgagcgctctttctctcgccgcgccgtcttgaagccgcgcgggctcgtgagcagcgcgaggccgccaaggtgcctcgcttcgccggagccgctgccgcccgccggagggaagccggcctcgggcgcgcacgctcgtcggagccccggcgcgccccgcgcctgagcctgctgacagcggccgctgggctcaggctgtccgctctgggctccgcggcctcggccccgctgcactccacctccgccccctcggactccctcccctctgcttctactcctcctgctccagtgcggatcgtttcgcaactgcttgccactcgtcccgtgcctggctgtttttccatttcccggccccctcttcttgagtactttaccccctgcatttggggacagggactggaaaaggggcgggtggagcgtccagtggagaagaaggaagcgaggcccgcaggaggaggaggatcggcggactgtggggaggagaccccacgccaccctttctggtcatctcccctcccgccccgcccctgcgcacactccctcgcgggcgagctactttcggaccaggaaagtaagagcggccctgggtgacagcgccgcggggccagtcccggggttagccgcgcgtctgctcgcttctggtccgtcgcgctcccagccagggcacagcccggaccgaggatggcttcgaccacaacctgcaccaggttcacggacgagtatcagcttttcgaggagcttggaaagggggcattctcagtggtgagaagatgtatgaaaattcctactggacaagaatatgctgccaaaattatcaacaccaaaaagctttctgctagggatcatcagaaactagaaagagaagctagaatctgccgtcttttgaagcaccctaatattgtgcgacttcatgatagcatatcagaagagggctttcactacttggtgtttgatttagttactggaggtgaactgtttgaagacatagtggcaagagaatactacagtgaagctgatgccagtcattgtatacagcagattctagaaagtgttaatcattgtcacctaaatggcatagttcacagggacctgaagcctgagaatttgcttttagctagcaaatccaagggagcagctgtgaaattggcagactttggcttagccatagaagttcaaggggaccagcaggcgtggtttggttttgctggcacacctggatatctttctccagaagttttacgtaaagatccttatggaaagccagtggatatgtgggcatgtggtgtcattctctatattctacttgtggggtatccacccttctgggatgaagaccaacacagactctatcagcagatcaaggctggagcttatgattttccatcaccagaatgggacacggtgactcctgaagccaaagacctcatcaataaaatgcttactatcaaccctgccaaacgcatcacagcctcagaggcactgaagcacccatggatctgtcaacgttctactgttgcttccatgatgcacagacaggagactgtagactgcttgaagaaatttaatgctagaagaaaactaaagggtgccatcttgacaactatgctggctacaaggaatttctcagcagccaagagtttgttgaagaaaccagatggagtaaaggagtcaactgagagttcaaatacaacaattgaggatgaagatgtgaaagcacgaaagcaagagattatcaaagtcactgaacaactgatcgaagctatcaacaatggggactttgaagcctacacaaaaatctgtgacccaggccttactgcttttgaacctgaagctttgggtaatttagtggaagggatggattttcaccgattctactttgaaaatgctttgtccaaaagcaataaaccaatccacactattattctaaaccctcatgtacatctggtaggggatgatgccgcctgcatagcatatattaggctcacacagtacatggatggcagtggaatgccaaagacaatgcagtcagaagagactcgtgtgtggcaccgccgggatggaaagtggcagaatgttcattttcatcgctcggggtcaccaacagtacccatcaactaaatttcaacagtgccacttctgcattctctgttctcaaggcacctggatggtgaccctgggccgtcctctcctcctcttcatgcatgtttctgagtgcatgaagttgtgaaggtcctacatgtaatgcatatgtgatgcatcatcttatcatatattccttcctatacattgtttacacttcaactacggggatgttccacacaaacttaaattactgttggcaaaacaatagggggagattagacaaaaaaaaaaatccacaatattccaagtacaactcttcatcaagtttctctgttaatgccaagatttaacagacttaagaactattgttctctgaatgacagttgtaagagaaatgtaaattttttagaactctttgctgttaatctgttttggtttgtttggtttttttttttttttttaaggtaaaaaaaaaatacaccttcagtttcctggtgtgatcctggttaaaatggatgatttttcattgaaagttttgctgattaacaattaaagtgggatgatatgtgggcaaaatcacttatgaaagtagaagcaagaatcagttggtttgctaccacataaagccatgctgtttttggtcaaactgtgtaaactggaaaaattcacatcatttctgagtttaatcactttaggatatattcacattgttttggtgaatttgctgaattgaattgtttttctttctcaaatctgtgatctcttttctttatcctgtttctttgttcctttcgtttgctttcttatttttcttttgttccattcttttcttacttttttcccttttccttttttggggaggctggctagtagtgtgtgagaaaagaatagaagtgaaatttgcataatgaatgtaaaagggaaataaaagtcttttgaaggtagctatactagcacttttgatcatcttcagggcccacaaaaatgttgtcaagattttaaaggtttataattctgcttaagctctagtttggacttaggtatcctaactatgttggaggtatttgcattgtttaaagttaggataaaagcaagttcctcctgtgactgcaacgtcttactgattgggacagttgccaggaggataccaacttgatagcagagggggttttatgcaaacgcactcacctccgccttggggaatgaaagggtcacttctgcatcatcactagctagttttctagtgttagagaggcttacaaatgtttgccattctcataagtgttttgaacttgatctttgtgacttgtgcttttttagcttctctcttgaatcagagtatcattgtcttcctccaaggagttagaatttcccagtttaaaacaaaaagggaaatgtcctaggttttctttgtgcttctcatttttcctttgttgattcaattcctgtgatttttgttctcttccctgaagtgctttacagtgcatggaatctccatcattgttattttaacgatagtaattcacagtcctcagaagcctatttttaaagcagaagcaaaaaagaaaaacaaaataacaaaaacaacccttcctcttttctctcatctcacctctctgtgttgattactaatcatcttagatattattgctagtggatgtatggtagatgggttgaagcttttctgataattattacacaatttaaaacaacatatatatttaaaataaatatatacagtaaatatattgagccatgttaacctgccaatgagatctgtgaaaaaataatggcctcatttttctctttttaatttcttttacccttttgtgaagcagctatacgtggcatacatgtatttaaagaaaaaaaaatagatgtagagtgttttttttacacttttaacttagcatgtggtgttgaagtattactgtagatcaagtttgtcttccgcactaagatgtgaggaaattgtgatttgttctctccaccacaaatgaattacacatttattatcttctatcattttgaaacactgcagtttaccatgggacactgtatatatttcttgccataatggtaaaggactgattgatatatttaagagttaataaatttgtgatttctgctgac

SEQ ID NO: 5209 - protein, 478 aa, Homo sapiens; identical to SEQ ID NO: 592

SEQ ID NO: 5210 - DNA, 4619 bp, Homo sapiens
tctctgtgcgggtttaaatgggtaactgtgacttctcgcctcattcacccaaacctccagtcttctcccccgcacatcctcctccacccacctggtttctccctagactggtgtgctcgtgtgtgcaaccaaaggagggagtgcgagagatccacgaagggacaggcttggagtcgctagagggaggtgtgggaccagcgaggagggggcttcgccagggagggggtgctggcaggcggagggagcggcgggaggaggcgccggaggaggagacggaggcctggggacggcagaagaggcttcgcctgagccgagcgctctttctctcgccgcgccgtcttgaagccgcgcgggctcgtgagcagcgcgaggccgccaaggtgcctcgcttcgccggagccgctgccgcccgccggagggaagccggcctcgggcgcgcacgctcgtcggagccccggcgcgccccgcgcctgagcctgctgacagcggccgctgggctcaggctgtccgctctgggctccgcggcctcggccccgctgcactccacctccgccccctcggactccctcccctctgcttctactcctcctgctccagtgcggatcgtttcgcaactgcttgccactcgtcccgtgcctggctgtttttccatttcccggccccctcttcttgagtactttaccccctgcatttggggacagggactggaaaaggggcgggtggagcgtccagtggagaagaaggaagcgaggcccgcaggaggaggaggatcggcggactgtggggaggagaccccacgccaccctttctggtcatctcccctcccgccccgcccctgcgcacactccctcgcgggcgagctactttcggaccaggaaagtaagagcggccctgggtgacagcgccgcggggccagtcccggggttagccgcgcgtctgctcgcttctggtccgtcgcgctcccagccagggcacagcccggaccgaggatggcttcgaccacaacctgcaccaggttcacggacgagtatcagcttttcgaggagcttggaaagggggcattctcagtggtgagaagatgtatgaaaattcctactggacaagaatatgctgccaaaattatcaacaccaaaaagctttctgctagggatcatcagaaactagaaagagaagctagaatctgccgtcttttgaagcaccctaatattgtgcgacttcatgatagcatatcagaagagggctttcactacttggtgtttgatttagttactggaggtgaactgtttgaagacatagtggcaagagaatactacagtgaagctgatgccagtcattgtatacagcagattctagaaagtgttaatcattgtcacctaaatggcatagttcacagggacctgaagcctgagaatttgcttttagctagcaaatccaagggagcagctgtgaaattggcagactttggcttagccatagaagttcaaggggaccagcaggcgtggtttggttttgctggcacacctggatatctttctccagaagttttacgtaaagatccttatggaaagccagtggatatgtgggcatgtggtgtcattctctatattctacttgtggggtatccacccttctgggatgaagaccaacacagactctatcagcagatcaaggctggagcttatgattttccatcaccagaatgggacacggtgactcctgaagccaaagacctcatcaataaaatgcttactatcaaccctgccaaacgcatcacagcctcagaggcactgaagcacccatggatctgtcaacgttctactgttgcttccatgatgcacagacaggagactgtagactgcttgaagaaatttaatgctagaagaaaactaaagggtgccatcttgacaactatgctggctacaaggaatttctcagcagccaagagtttgttgaagaaaccagatggagtaaaggagtcaactgagagttcaaatacaacaattgaggatgaagatgtgaaagcacgaaagcaagagattatcaaagtcactgaacaactgatcgaagctatcaacaatggggactttgaagcctacacaaaaatctgtgacccaggccttactgcttttgaacctgaagctttgggtaatttagtggaagggatggattttcaccgattctactttgaaaatgctttgtccaaaagcaataaaccaatccacactattattctaaaccctcatgtacatctggtaggggatgatgccgcctgcatagcatatattaggctcacacagtacatggatggcagtggaatgccaaagacaatgcagtcagaagagactcgtgtgtggcaccgccgggatggaaagtggcagaatgttcattttcatcgctcggggtcaccaacagtacccatcaagccaccctgtattccaaatgggaaagaaaacttctcaggaggcacctctttgtggcaaaacatctaaggcctgaaaaccattcacatatgggtcttctaaatttcaacagtgccacttctgcattctctgttctcaaggcacctggatggtgaccctgggccgtcctctcctcctcttcatgcatgtttctgagtgcatgaagttgtgaaggtcctacatgtaatgcatatgtgatgcatcatcttatcatatattccttcctatacattgtttacacttcaactacggggatgttccacacaaacttaaattactgttggcaaaacaatagggggagattagacaaaaaaaaaaatccacaatattccaagtacaactcttcatcaagtttctctgttaatgccaagatttaacagacttaagaactattgttctctgaatgacagttgtaagagaaatgtaaattttttagaactctttgctgttaatctgttttggtttgtttggtttttttttttttttttaaggtaaaaaaaaaatacaccttcagtttcctggtgtgatcctggttaaaatggatgatttttcattgaaagttttgctgattaacaattaaagtgggatgatatgtgggcaaaatcacttatgaaagtagaagcaagaatcagttggtttgctaccacataaagccatgctgtttttggtcaaactgtgtaaactggaaaaattcacatcatttctgagtttaatcactttaggatatattcacattgttttggtgaatttgctgaattgaattgtttttctttctcaaatctgtgatctcttttctttatcctgtttctttgttcctttcgtttgctttcttatttttcttttgttccattcttttcttacttttttcccttttccttttttggggaggctggctagtagtgtgtgagaaaagaatagaagtgaaatttgcataatgaatgtaaaagggaaataaaagtcttttgaaggtagctatactagcacttttgatcatcttcagggcccacaaaaatgttgtcaagattttaaaggtttataattctgcttaagctctagtttggacttaggtatcctaactatgttggaggtatttgcattgtttaaagttaggataaaagcaagttcctcctgtgactgcaacgtcttactgattgggacagttgccaggaggataccaacttgatagcagagggggttttatgcaaacgcactcacctccgccttggggaatgaaagggtcacttctgcatcatcactagctagttttctagtgttagagaggcttacaaatgtttgccattctcataagtgttttgaacttgatctttgtgacttgtgcttttttagcttctctcttgaatcagagtatcattgtcttcctccaaggagttagaatttcccagtttaaaacaaaaagggaaatgtcctaggttttctttgtgcttctcatttttcctttgttgattcaattcctgtgatttttgttctcttccctgaagtgctttacagtgcatggaatctccatcattgttattttaacgatagtaattcacagtcctcagaagcctatttttaaagcagaagcaaaaaagaaaaacaaaataacaaaaacaacccttcctcttttctctcatctcacctctctgtgttgattactaatcatcttagatattattgctagtggatgtatggtagatgggttgaagcttttctgataattattacacaatttaaaacaacatatatatttaaaataaatatatacagtaaatatattgagccatgttaacctgccaatgagatctgtgaaaaaataatggcctcatttttctctttttaatttcttttacccttttgtgaagcagctatacgtggcatacatgtatttaaagaaaaaaaaatagatgtagagtgttttttttacacttttaacttagcatgtggtgttgaagtattactgtagatcaagtttgtcttccgcactaagatgtgaggaaattgtgatttgttctctccaccacaaatgaattacacatttattatcttctatcattttgaaacactgcagtttaccatgggacactgtatatatttcttgccataatggtaaaggactgattgatatatttaagagttaataaatttgtgatttctgctgac

SEQ ID NO: 5211 - protein, 499 aa, Homo sapiens; identical to SEQ ID NO: 586

SEQ ID NO: 5212 - DNA, 2569 bp, Homo sapiens
tctctgtgcgggtttaaatgggtaactgtgacttctcgcctcattcacccaaacctccagtcttctcccccgcacatcctcctccacccacctggtttctccctagactggtgtgctcgtgtgtgcaaccaaaggagggagtgcgagagatccacgaagggacaggcttggagtcgctagagggaggtgtgggaccagcgaggagggggcttcgccagggagggggtgctggcaggcggagggagcggcgggaggaggcgccggaggaggagacggaggcctggggacggcagaagaggcttcgcctgagccgagcgctctttctctcgccgcgccgtcttgaagccgcgcgggctcgtgagcagcgcgaggccgccaaggtgcctcgcttcgccggagccgctgccgcccgccggagggaagccggcctcgggcgcgcacgctcgtcggagccccggcgcgccccgcgcctgagcctgctgacagcggccgctgggctcaggctgtccgctctgggctccgcggcctcggccccgctgcactccacctccgccccctcggactccctcccctctgcttctactcctcctgctccagtgcggatcgtttcgcaactgcttgccactcgtcccgtgcctggctgtttttccatttcccggccccctcttcttgagtactttaccccctgcatttggggacagggactggaaaaggggcgggtggagcgtccagtggagaagaaggaagcgaggcccgcaggaggaggaggatcggcggactgtggggaggagaccccacgccaccctttctggtcatctcccctcccgccccgcccctgcgcacactccctcgcgggcgagctactttcggaccaggaaagtaagagcggccctgggtgacagcgccgcggggccagtcccggggttagccgcgcgtctgctcgcttctggtccgtcgcgctcccagccagggcacagcccggaccgaggatggcttcgaccacaacctgcaccaggttcacggacgagtatcagcttttcgaggagcttggaaagggggcattctcagtggtgagaagatgtatgaaaattcctactggacaagaatatgctgccaaaattatcaacaccaaaaagctttctgctagggatcatcagaaactagaaagagaagctagaatctgccgtcttttgaagcaccctaatattgtgcgacttcatgatagcatatcagaagagggctttcactacttggtgtttgatttagttactggaggtgaactgtttgaagacatagtggcaagagaatactacagtgaagctgatgccagtcattgtatacagcagattctagaaagtgttaatcattgtcacctaaatggcatagttcacagggacctgaagcctgagaatttgcttttagctagcaaatccaagggagcagctgtgaaattggcagactttggcttagccatagaagttcaaggggaccagcaggcgtggtttggttttgctggcacacctggatatctttctccagaagttttacgtaaagatccttatggaaagccagtggatatgtgggcatgtggtgtcattctctatattctacttgtggggtatccacccttctgggatgaagaccaacacagactctatcagcagatcaaggctggagcttatgattttccatcaccagaatgggacacggtgactcctgaagccaaagacctcatcaataaaatgcttactatcaaccctgccaaacgcatcacagcctcagaggcactgaagcacccatggatctgtcaacgttctactgttgcttccatgatgcacagacaggagactgtagactgcttgaagaaatttaatgctagaagaaaactaaagggtgccatcttgacaactatgctggctacaaggaatttctcagcagccaagagtttgttgaagaaaccagatggagtaaaggagtcaactgagagttcaaatacaacaattgaggatgaagatgtgaaagcacgaaagcaagagattatcaaagtcactgaacaactgatcgaagctatcaacaatggggactttgaagcctacacaaaaatctgtgacccaggccttactgcttttgaacctgaagctttgggtaatttagtggaagggatggattttcaccgattctactttgaaaatgctttgtccaaaagcaataaaccaatccacactattattctaaaccctcatgtacatctggtaggggatgatgccgcctgcatagcatatattaggctcacacagtacatggatggcagtggaatgccaaagacaatgcagtcagaagagactcgtgtgtggcaccgccgggatggaaagtggcagaatgttcattttcatcgctcggggtcaccaacagtacccatcaagtaaatatttccaggctgtcagcttctttgttaatacacccatggtcagctccttctacttattccattgttaatagcatggtatatgttatttaacgctagtagttggttacactgatgaaaataaatgccttcacgggaaaggtt

SEQ ID NO: 5213 - protein, 478 aa, Homo sapiens; identical to SEQ ID NO: 588

SEQ ID NO: 5214 - DNA, 2006 bp, Homo sapiens
tctctgtgcgggtttaaatgggtaactgtgacttctcgcctcattcacccaaacctccagtcttctcccccgcacatcctcctccacccacctggtttctccctagactggtgtgctcgtgtgtgcaaccaaaggagggagtgcgagagatccacgaagggacaggcttggagtcgctagagggaggtgtgggaccagcgaggagggggcttcgccagggagggggtgctggcaggcggagggagcggcgggaggaggcgccggaggaggagacggaggcctggggacggcagaagaggcttcgcctgagccgagcgctctttctctcgccgcgccgtcttgaagccgcgcgggctcgtgagcagcgcgaggccgccaaggtgcctcgcttcgccggagccgctgccgcccgccggagggaagccggcctcgggcgcgcacgctcgtcggagccccggcgcgccccgcgcctgagcctgctgacagcggccgctgggctcaggctgtccgctctgggctccgcggcctcggccccgctgcactccacctccgccccctcggactccctcccctctgcttctactcctcctgctccagtgcggatcgtttcgcaactgcttgccactcgtcccgtgcctggctgtttttccatttcccggccccctcttcttgagtactttaccccctgcatttggggacagggactggaaaaggggcgggtggagcgtccagtggagaagaaggaagcgaggcccgcaggaggaggaggatcggcggactgtggggaggagaccccacgccaccctttctggtcatctcccctcccgccccgcccctgcgcacactccctcgcgggcgagctactttcggaccaggaaagtaagagcggccctgggtgacagcgccgcggggccagtcccggggttagccgcgcgtctgctcgcttctggtccgtcgcgctcccagccagggcacagcccggaccgaggatggcttcgaccacaacctgcaccaggttcacggacgagtatcagcttttcgaggagcttggaaagggggcattctcagtggtgagaagatgtatgaaaattcctactggacaagaatatgctgccaaaattatcaacaccaaaaagctttctgctagggatcatcagaaactagaaagagaagctagaatctgccgtcttttgaagcaccctaatattgtgcgacttcatgatagcatatcagaagagggctttcactacttggtgtttgatttagttactggaggtgaactgtttgaagacatagtggcaagagaatactacagtgaagctgatgccagtcattgcattcagcagatcctggaggctgtgctacactgccatcagatgggcgtggtccatcgggacctgaagcctgagaatttgcttttagctagcaaatccaagggagcagctgtgaaattggcagactttggcttagccatagaagttcaaggggaccagcaggcgtggtttggttttgctggcacacctggatatctttctccagaagttttacgtaaagatccttatggaaagccagtggatatgtgggcatgtggtgtcattctctatattctacttgtggggtatccacccttctgggatgaagaccaacacagactctatcagcagatcaaggctggagcttatgattttccatcaccagaatgggacacggtgactcctgaagccaaagacctcatcaataaaatgcttactatcaaccctgccaaacgcatcacagcctcagaggcactgaagcacccatggatctgtcaacgttctactgttgcttccatgatgcacagacaggagactgtagactgcttgaagaaatttaatgctagaagaaaactaaagggtgccatcttgacaactatgctggctacaaggaatttctcagcagccaagagtttgttgaagaaaccagatggagtaaagataaacaacaaagccaacgtggtaaccagcccc

SEQ ID NO: 5215 - protein, 338 aa, Homo sapiens
MASTTTCTRFTDEYQLFEELGKGAFSVVRRCMKIPTGQEYAAKIINTKKLSARDHQKLEREARICRLLKHPNIVRLHDSISEEGFHYLVFDLVTGGELFEDIVAREYYSEADASHCIQQILEAVLHCHQMGVVHRDLKPENLLLASKSKGAAVKLADFGLAIEVQGDQQAWFGFAGTPGYLSPEVLRKDPYGKPVDMWACGVILYILLVGYPPFWDEDQHRLYQQIKAGAYDFPSPEWDTVTPEAKDLINKMLTINPAKRITASEALKHPWICQRSTVASMMHRQETVDCLKKFNARRKLKGAILTTMLATRNFSAAKSLLKKPDGVKINNKANVVTS

SEQ ID NO: 5216 - DNA, 1344 bp, Homo sapiens
tctctgtgcgggtttaaatgggtaactgtgacttctcgcctcattcacccaaacctccagtcttctcccccgcacatcctcctccacccacctggtttctccctagactggtgtgctcgtgtgtgcaaccaaaggagggagtgcgagagatccacgaagggacaggcttggagtcgctagagggaggtgtgggaccagcgaggagggggcttcgccagggagggggtgctggcaggcggagggagcggcgggaggaggcgccggaggaggagacggaggcctggggacggcagaagaggcttcgcctgagccgagcgctctttctctcgccgcgccgtcttgaagccgcgcgggctcgtgagcagcgcgaggccgccaaggtgcctcgcttcgccggagccgctgccgcccgccggagggaagccggcctcgggcgcgcacgctcgtcggagccccggcgcgccccgcgcctgagcctgctgacagcggccgctgggctcaggctgtccgctctgggctccgcggcctcggccccgctgcactccacctccgccccctcggactccctcccctctgcttctactcctcctgctccagtgcggatcgtttcgcaactgcttgccactcgtcccgtgcctggctgtttttccatttcccggccccctcttcttgagtactttaccccctgcatttggggacagggactggaaaaggggcgggtggagcgtccagtggagaagaaggaagcgaggcccgcaggaggaggaggatcggcggactgtggggaggagaccccacgccaccctttctggtcatctcccctcccgccccgcccctgcgcacactccctcgcgggcgagctactttcggaccaggaaagtaagagcggccctgggtgacagcgccgcggggccagtcccggggttagccgcgcgtctgctcgcttctggtccgtcgcgctcccagccagggcacagcccggaccgaggatggcttcgaccacaacctgcaccaggttcacggacgagtatcagcttttcgaggagcttggaaagggggcattctcagtggtgagaagatgtatgaaaattcctactggacaagaatatgctgccaaaattatcaacaccaaaaagctttctgctaggggacagaaaaagcagagactggagaatatgtggctggaatatatgatggacatctagggaagaattaagaaagaaaagaaaatggctggggagagatggtattgcatcgcttgactcttagagaaggctctggatgattgacagattatcctcatgtctgacggaagtaagacgagcaagttccttcaagaaggaa

SEQ ID NO: 5217 - protein, 71 aa, Homo sapiens
MASTTTCTRFTDEYQLFEELGKGAFSVVRRCMKIPTGQEYAAKIINTKKLSARGQKKQRLENMWLEYMMDI

SEQ ID NO: 5218 - DNA, 1763 bp, Homo sapiens
tctctgtgcgggtttaaatgggtaactgtgacttctcgcctcattcacccaaacctccagtcttctcccccgcacatcctcctccacccacctggtttctccctagactggtgtgctcgtgtgtgcaaccaaaggagggagtgcgagagatccacgaagggacaggcttggagtcgctagagggaggtgtgggaccagcgaggagggggcttcgccagggagggggtgctggcaggcggagggagcggcgggaggaggcgccggaggaggagacggaggcctggggacggcagaagaggcttcgcctgagccgagcgctctttctctcgccgcgccgtcttgaagccgcgcgggctcgtgagcagcgcgaggccgccaaggtgcctcgcttcgccggagccgctgccgcccgccggagggaagccggcctcgggcgcgcacgctcgtcggagccccggcgcgccccgcgcctgagcctgctgacagcggccgctgggctcaggctgtccgctctgggctccgcggcctcggccccgctgcactccacctccgccccctcggactccctcccctctgcttctactcctcctgctccagtgcggatcgtttcgcaactgcttgccactcgtcccgtgcctggctgtttttccatttcccggccccctcttcttgagtactttaccccctgcatttggggacagggactggaaaaggggcgggtggagcgtccagtggagaagaaggaagcgaggcccgcaggaggaggaggatcggcggactgtggggaggagaccccacgccaccctttctggtcatctcccctcccgccccgcccctgcgcacactccctcgcgggcgagctactttcggaccaggaaagtaagagcggccctgggtgacagcgccgcggggccagtcccggggttagccgcgcgtctgctcgcttctggtccgtcgcgctcccagccagggcacagcccggaccgaggatggcttcgaccacaacctgcaccaggttcacggacgagtatcagcttttcgaggagcttggaaagggggcattctcagtggtgagaagatgtatgaaaattcctactggacaagaatatgctgccaaaattatcaacaccaaaaagctttctgctaggggcagtcaagaaagtactgtaatttctcaacttcatggttacttgtcttgaattggaagtagaactgagactatgtagatggattaagttctgattatacattattgatttggcaaattggaacaatttggacaaattaaaatttgaaggtttcttggcaagaacaacattttaagaaaaaaattagtaaatcatttttatatttgtacatagaatctccacaactcttcagttatggacccagaagtggcatgtgtcatccttattattttgtatcctttacttacgtttagttgtatttacattcttctataggtcttgatattaaacattcattttcttctttcattgaatgaaagcattactgctcttcagaactagttaggagacacaaataataaaaaaaaaaagtatatccacacttccaggaaataatagaattcttttctgtatttcattaaatgaagaaaataaagaaagtggttgtcaggtgccatactgtgatattaataactagtgtaaacctctacctgattgtgtgagaactttgtttagacaattagattaatacttctcatttccattgaaatgttgaataaactgaatataaaaatt

SEQ ID NO: 5219 - protein, 69 aa, Homo sapiens
MASTTTCTRFTDEYQLFEELGKGAFSVVRRCMKIPTGQEYAAKIINTKKLSARGSQESTVISQLHGYLS

SEQ ID NO: 5220 - DNA, 1095 bp, Homo sapiens
gccggaggaggagacggaggcctggggacggcagaagaggcttcgcctgagccgagcgctctttctctcgccgcgccgtcttgaagccgcgcgggctcgtgagcagcgcgaggccgccaaggtgcctcgcttcgccggagccgctgccgcccgccggagggaagccggcctcgggcgcgcacgctcgtcggagccccggcgcgccccgcgcctgagcctgctgacagcggccgctgggctcaggctgtccgctctgggctccgcggcctcggccccgctgcactccacctccgccccctcggactccctcccctctgcttctactcctcctgctccagtgcggatcgtttcgcaactgcttgccactcgtcccgtgcctggctgtttttccatttcccggccccctcttcttgagtactttaccccctgcatttggggacagggactggaaaaggggcgggtggagcgtccagtggagaagaaggaagcgaggcccgcaggaggaggaggatcggcggactgtggggaggagaccccacgccaccctttctggtcatctcccctcccgccccgcccctgcgcacactccctcgcgggcgagctactttcggaccaggaaagtaagagcggccctgggtgacagcgccgcggggccagtcccggggttagccgcgcgtctgctcgcttctggtccgtcgcgctcccagccagggcacagcccggaccgaggatggcttcgaccacaacctgcaccaggttcacggacgagtatcagcttttcgaggagcttggaaagggggcattctcagtggtgagaagatgtatgaaaattcctactggacaagaatatgctgccaaaattatcaacaccaaaaagctttctgctaggggtgggtattttcaaccacatatattggttaattttgtatttgtcatgttgattataggttctgttgtatgtaaatatatcatgtagttataactgaactttagacttaggtatcatattatatattaagattattttcttcctgaatgcttcttggtctgtacagcttaaaaatacatggaaagatataattattatttgataca

SEQ ID NO: 5221 - protein, 81 aa, Homo sapiens
MASTTTCTRFTDEYQLFEELGKGAFSVVRRCMKIPTGQEYAAKIINTKKLSARGGYFQPHILVNFVFVMLIIGSVVCKYIM

SEQ ID NO: 5222 - DNA, 738 bp, Homo sapiens
tcaggcaagagtggagcacagaggaaaggggtgtctttctcaagagagaagcaaactgcgggtcaaagtgcaccaccagccaccaacagctagcttccggatcaagtaggatggaaatggtttattcctccaaagactcttaaaagagcagcccctgctgcagaatagaaagaggctccagaggagcagtgagctcgaggaacccccctgaagatccccagtttctgtatgcagctgcatcaggcccagacaaattcttccatctggagcgtgtccccgcagatcttcccagccgcggctgtggtccgcgttatctcaggctgtcaggtctcagaaattagaaaccatctcatttcatcagggtcatcccacaccgtctgccaccatagatggagaggatttcaagtgatgttttctgaagatggttctgttgtcccgggagagcccttggcggacatggtagtgccagtcagagcccttgacgctgtgcagccaggtggcttattgtcccagtgactttccaaccagatactctcagtcagagtgaagggctccacttagaaactccctttcccattaactcgtcagagttatgccattcctctttattctttttaaaatatttatactcaaagaaattgtatggggagtgagcacacaccaatcatataactgtcaaatgaaagcctttccttaaatgttcaagggcgccggaggaataaatttggagtcatgcag

SEQ ID NO: 5223 - protein, 95 aa, Homo sapiens
MQLHQAQTNSSIWSVSPQIFPAAAVVRVISGCQVSEIRNHLISSGSSHTVCHHRWRGFQVMFSEDGSVVPGEPLADMVVPVRALDAVQPGGLLSQ

SEQ ID NO: 5224 - DNA, 6790 bp, Homo sapiens
agcattttgagtgagcttgcagaaaatgaggggctttcagctggtcgcctgcttgtcacctctcgctgcctgaaaggcagctctcagagccctttcctgtccttctaattacagcggcgggggcagtgcgcgcttcgggacgcaattggaaaccagcgtgcagggtcaaagacagccggccccccatgtcagtggtctaggatggccagtgaaggcaccaacatcccaagtcctgtggtgcgccagattgacaagcagtttctgatttgcagtatatgcctggaacggtacaagaatcccaaggttctcccctgtctgcacactttctgcgagaggtgcctgcagaactacattcctgcccacagtttaaccctctcctgcccagtgtgccgccagacctccatcctgcccgagaaaggggtggccgcgctccagaacaatttcttcatcacaaacctgatggacgtgctgcagcgaactccaggcagcaacgctgaggagtcttccatcctggagacagtcactgctgtggctgcgggaaagcctctctcttgcccaaaccacgatgggaatgtgatggaattttactgccagtcctgtgagactgccatgtgtcgggagtgcacggagggggagcacgcagagcaccccacagttccactcaaggatgtggtggaacagcacaaggcctcgctccaggtccagctggatgctgtcaacaaaaggctcccagaaatagattctgctcttcagttcatctctgaaatcattcatcagttaaccaaccaaaaggccagcatcgtggatgacattcattccacctttgatgagctccagaagactttaaatgtgcgcaagagtgtgctgcttatggaattggaggtcaactatggcctcaaacacaaagtcctccagtcgcagctggatactctgctccaggggcaggagagcattaagagctgcagcaacttcacagcgcaggccctcaaccatggcacggagaccgaggtcctactggtgaagaagcagatgagcgagaagctgaacgagctggccgaccaggacttccccttgcacccgcgggagaacgaccagctggatttcatcgtggaaaccgaggggctgaagaagtccatccacaacctcgggacgatcttaaccaccaacgccgttgcctcagagacagtggccacgggcgaggggctgcggcagaccatcatcgggcagcccatgtccgtcaccatcaccaccaaggacaaagacggtgagctgtgcaaaaccggcaacgcctacctcaccgccgaactgagcacccccgacgggagcgtggcagacggggagatcctggacaacaagaacggcacctatgagtttttgtacactgtccagaaggaaggggactttaccctgtctctgagactctatgaccagcacatccgaggcagcccgtttaagctgaaagtgatccgatccgctgatgtgtctcccaccacagaaggcgtgaagaggcgcgttaagtccccggggagcggccacgtcaagcagaaagctgtgaaaagacccgcaagcatgtacagcactggaaaacgaaaagagaatcccatcgaagacgatttgatctttcgagtgggtaccaaaggaagaaataaaggagagtttacaaatcttcagggggtagctgcatctacaaatggaaagatattaattgcagacagtaacaaccaatgtgtgcagatattttccaatgatggccagttcaaaagtcgttttggcatacggggacgctctccggggcagctgcagcggcccacaggagtggctgtacatcccagtggggacataatcattgccgattatgataataaatgggtcagcattttctcctccgatgggaaatttaagacaaaaattggatcaggaaagctgatgggacccaaaggagtttctgtggaccgcaatgggcacattattgttgtggacaacaaggcgtgctgcgtgtttatcttccagccaaacgggaaaatagtcaccaggtttggtagccgaggaaatggggacaggcagtttgcaggtccccattttgcagctgtaaatagcaataatgagattattattacagatttccataatcattctgtcaaggtgtttaatcaggaaggagaattcatgttgaagtttggctcaaatggagaaggaaatgggcagtttaatgctccaacaggtgtagcagtggattcaaatggaaacatcattgtggccgactggggaaacagcaggatccaggtttttgatgggagtggatcatttttgtcctacattaacacatctgctgacccactctatggcccccaaggcctggccctaacttcagatggtcatgttgtggttgcagactctggaaatcactgtttcaaagtctatcgatacttacagtaatggtgggcaggtggatacccgcttccatggtcttgcactataaactggaatggatttctcaatgcgggaccagattatgactagagtttttatgccagaaggaatcattggtgaactttccaaggttatttctgaatgtaacaatttccttaaaaatgacttatccaatttctgtatttcacctttagggttaaaaaaaactcttctactgaatctataaaaactgcagttttacatctgtgaactatggcttaagggacaggatttatgtagctaaactaattttgcaaatcaaacagacacttaaaaaactagcatatgtaaaggtattcgttaatcctgtgaatggtagcttttgcacagaacttccaaaagcaaaacaaaaacaaaatctattgtagttatatacttcatttaacctaggtcacaagacccagggaatcttctaacctcacttttacagtaggtattactcttgtgacatttttttggttatcaacaactaaatataaattactttggaaaaagtaaggctgtcttgcaaaatgatcccagctctgattagcagccctctggagttcagaacttaagtatcagtgcaaatttctcaacctttctgggttagacaaagatccttttttgtgtgttcttttcaccacccctttggctcaccttgtatcagcaaacaaagtacttcttcagggaaacctgaaatttctaatgccttgaaaagcatattacaaaagtaatgctaccttttgggaaacaaactgccccgttaactccagatcattgcactggaatgtaatcaagaaagttagtcatgttttatgtaccatgttttcacacgtgtctcttctcttcgacttcctgaaagcgaaagctttacctcctgcaaatgtcagcacatgtagtaggacaccagtatcctaggacagagagccataagtagccctttggaggactgatggtgtcaaccaaaggcatgtgattgattaatgattcccccttagaaagcaagtgttaccaaagttgtgttatcttgaaagcattacaggtaagggcatgttatggttatttatcattgtttaatgaatagtagaggtgtcaagggactatgtatacatgattagggtaagatagaatgtattatatatatatatatatacacacacacatatatatagctgaatctttggtgtattgaaataggcagcactctgaaagacagaagcttcgtccagccactcttcagcacattcctttactaagcagtttaaagccgtcctagtggagcaagccctaaagcagatttaatttttgccattttccaagaatgacggtggtggcttttagtcagaaaatggccttctgtgctttcaaaaaaaaaaacaaaaaaaaaaccacacacacacataaaaaacccaacaggtcaaaataaaagttgaacttgagttacatttaatttaaatataaatgcattttgagaaatgttaagaacaatttagtcaatcgttcatctgtcattggtactgtaaaataagctgtggtctatttccactgtttaattttctactcagttctaccaaataggatgtcatgtttgacatttttgatagtgactttggggtcttcttcactgaaagcaccttagaactgtactataagaaaacatttcccctatgtataattatatgaatgtgatgtttattgcttattaatttataattcagtcattctctatataggacttcttaaaatttagaagggaaatctagctacttcaaattgtctgttaaatttattatgcccaaatcaacctctgaaaaaaggtttttccaggaagatttacatttaggtttaatatttttttagttaggtagagttttaaaaaatacttgagcctgtccgtgataaagctataaaattcaataactttttagaatgttaaatgaagacactgtttcctaacatcagtgagatacatctttgaatttaaacattcatatttactgagtacctactaggtaccaagtactcttttaggcactggaaatacagtgatggacaaaacaggtaaaaaatcgctgccccctcagagctgacattctggggtgggaatttcattttgccacgtactaacgttctgcacaaaagacaggctagactcttgtctagattgtttaaaagaaacttttcaaattggttacattaattttagtttattttcacaagtaaaaatggctttttatttagattctttctgtcccaggctgttgatcttaaaactagttgatttaaagagtttttttgcacaacatttcaattatatttgtgaacttagaaattaacttacaatctaaccagccatcatatcatatcctatcaggctagatatctcaatagtagactgaatacaaagctaattttttttacatgtcaatattggcacaaactggaatgaaagaatagtttgattcagacctgctccactatgtgttgctaaaacacatgctatgagcactccaggaaacactatattttttccaaaaaatatgtgattatatatgttaaagtatagataacatttcacacttggatacatatgtgcatttactgtatttcttggtaagcatatttttgggggaaagtgctgctgatatgatacaagtagacaaaatttaaatgaaattttgtcacattctatggaaaatggtttctggtaaactgagaaggatattaaaataagtggcttttttctgggctaccattattgtttgatttctctttgtcaagtgtatagaacctgtcatacattcatgataagtagcactgaaaaattactcattcaaatttcccctgggcacgtaaggcaaaatattgccggttgggatttcaaggtcagtgacgacgcatttcctcccagtacagaccccccagccccccttgctggacatggggaggcagagagtcacttgaccatccagaaatacatgactacaagtcctttatgactgtttgccattttttttaatggtacttagtattttgatcaaactttagtctccagaactaaacaagtccctaagtttccttattttaatttactgtgactagatttgaagcaaataaatactccagatccatgcagctagaacacacttgcttccactactaaatatacagggtatgtcctaacatggagttaactggaatagcagtacactagcaagtatctgtgaatccttagcactgacgggttaacagaaatgctttggtaatacctacttagttaattggaggaagtagtaaataaacattaggtaatctgcagattacttcaaatgggaaaaatctttttgtagactctatagtaccctctctattcactagcttctgaaaagggaggagtatttttagtttgacaatttaataatttaaaaacaagacatctccaggtaggaaaaaatgaaagctatttcatgcaaacattatctaatttagcttaaaagtgaaagtggtaatactgttggtttctgtaaatgttgcagggttttaaactttataattactttaatatttttgataactagaaatctagtattgccataaaggaaactaagtgcccatcaaagatttgtttggtataaataaagaattatttgttttgttttcaatgacagtaagctacaaatcatgatgcttaaaaactttctaaagatgaattgtgtggcagtgattggtctgtttgtggagaatgtatgaaagctattaatattctagaatagattaataaattggctatgttgttccaatgaatgtacagcacttccattaacttttgaaagcaacacagccttaaactcaatgcttttgctttatgacatgggaatgttctgtcatcaatggagtgtattcttgtaatagaattctttatatcgttctcaattctatagactttcaagcctatgtatgaatatgaaggggttttttttttttgctttgttttctttttagattttgtacattccatctttataggtctgtttcatatgttttatgtatagaacactaagtcttgcactctctgacattgatactgatatattctcgtcatttgttcttttatgaatcaaaatgttgactgcctatttaaagaaaagaatgaacgctgtgcatcaaagtgtttgtatgttcgtagctacatacgtaccacagtattttggatgctttagtctacaatgaaactttcaattaattctgtcttgaaacataggagaaacaggattcatgtgtatctctttaccatgcacaaaatctcaaatcattataataaagcttgttttctccattt

SEQ ID NO: 5225 - protein, 744 aa, Homo sapiens; identical to SEQ ID NO: 594

SEQ ID NO: 5226 - DNA, 816 bp, Homo sapiens
aactcggcagcttgatgactataatgggcccagttgtctgcgggctgcggggagctaagtccccagattggaggaggctggctctggtcttcgatgcacaggagtggccgttatggaacgcagcagcagcgtgcagggtcaaagacagccggccccccatgtcagtggtctaggatggccagtgaaggcaccaacatcccaagtcctgtggtgcgccagattgacaagcagtttctgatttgcagtatatgcctggaacggtacaagaatcccaaggttctcccctgtctgcacactttctgcgagaggtgcctgcagaactacattcctgcccacagtttaaccctctcctgcccagtgtgccgccagacctccatcctgcccgagaaaggggtggccgcgctccagaacaatttcttcatcacaaacctgatggacgtgctgcagcgaactccaggcagcaacgctgaggagtcttccatcctggagacagtcactgctgtggctgcgggaaagcctctctcttgcccaaaccacgatgggaatgtcctccagtcgcagctggatactctgctccaggggcaggagagcattaagagctgcagcaacttcacagcgcaggccctcaaccatggcacggagaccgaggtcctactggtgaagaagcagatgagcgagaagctgaacgagctggccgaccaggacttccccttgcacccgcgggagaacgaccagctggatttcatcgtggaaaccgaggggctgaagaagtccatccacaacctcgggacgatcttaaccaccaacgccgttgcc

SEQ ID NO: 5227 - protein, 240 aa, Homo sapiens
MHRSGRYGTQQQRAGSKTAGPPCQWSRMASEGTNIPSPVVRQIDKQFLICSICLERYKNPKVLPCLHTFCERCLQNYIPAHSLTLSCPVCRQTSILPEKGVAALQNNFFITNLMDVLQRTPGSNAEESSILETVTAVAAGKPLSCPNHDGNVLQSQLDTLLQGQESIKSCSNFTAQALNHGTETEVLLVKKQMSEKLNELADQDFPLHPRENDQLDFIVETEGLKKSIHNLGTILTTNAV

SEQ ID NO: 5228 - DNA, 6765 bp, Homo sapiens
aactcggcagcttgatgactataatgggcccagttgtctgcgggctgcggggagctaagtccccagattggaggaggctggctctggtcttcgatgcacaggagtggccgttatggaacgcagcagcagcgtgcagggtcaaagacagccggccccccatgtcagtggtctaggatggccagtgaaggcaccaacatcccaagtcctgtggtgcgccagattgacaagcagtttctgatttgcagtatatgcctggaacggtacaagaatcccaaggttctcccctgtctgcacactttctgcgagaggtgcctgcagaactacattcctgcccacagtttaaccctctcctgcccagtgtgccgccagacctccatcctgcccgagaaaggggtggccgcgctccagaacaatttcttcatcacaaacctgatggacgtgctgcagcgaactccaggcagcaacgctgaggagtcttccatcctggagacagtcactgctgtggctgcgggaaagcctctctcttgcccaaaccacgatgggaatgtgatggaattttactgccagtcctgtgagactgccatgtgtcgggagtgcacggagggggagcacgcagagcaccccacagttccactcaaggatgtggtggaacagcacaaggcctcgctccaggtccagctggatgctgtcaacaaaaggctcccagaaatagattctgctcttcagttcatctctgaaatcattcatcagttaaccaaccaaaaggccagcatcgtggatgacattcattccacctttgatgagctccagaagactttaaatgtgcgcaagagtgtgctgcttatggaattggaggtcaactatggcctcaaacacaaagtcctccagtcgcagctggatactctgctccaggggcaggagagcattaagagctgcagcaacttcacagcgcaggccctcaaccatggcacggagaccgaggtcctactggtgaagaagcagatgagcgagaagctgaacgagctggccgaccaggacttccccttgcacccgcgggagaacgaccagctggatttcatcgtggaaaccgaggggctgaagaagtccatccacaacctcgggacgatcttaaccaccaacgccgttgcctcagagacagtggccacgggcgaggggctgcggcagaccatcatcgggcagcccatgtccgtcaccatcaccaccaaggacaaagacggtgagctgtgcaaaaccggcaacgcctacctcaccgccgaactgagcacccccgacgggagcgtggcagacggggagatcctggacaacaagaacggcacctatgagtttttgtacactgtccagaaggaaggggactttaccctgtctctgagactctatgaccagcacatccgaggcagcccgtttaagctgaaagtgatccgatccgctgatgtgtctcccaccacagaaggcgtgaagaggcgcgttaagtccccggggagcggccacgtcaagcagaaagctgtgaaaagacccgcaagcatgtacagcactggaaaacgaaaagagaatcccatcgaagacgatttgatctttcgagtgggtaccaaaggaagaaataaaggagagtttacaaatcttcagggggtagctgcatctacaaatggaaagatattaattgcagacagtaacaaccaatgtgtgcagatattttccaatgatggccagttcaaaagtcgttttggcatacggggacgctctccggggcagctgcagcggcccacaggagtggctgtacatcccagtggggacataatcattgccgattatgataataaatgggtcagcattttctcctccgatgggaaatttaagacaaaaattggatcaggaaagctgatgggacccaaaggagtttctgtggaccgcaatgggcacattattgttgtggacaacaaggcgtgctgcgtgtttatcttccagccaaacgggaaaatagtcaccaggtttggtagccgaggaaatggggacaggcagtttgcaggtccccattttgcagctgtaaatagcaataatgagattattattacagatttccataatcattctgtcaaggtgtttaatcaggaaggagaattcatgttgaagtttggctcaaatggagaaggaaatgggcagtttaatgctccaacaggtgtagcagtggattcaaatggaaacatcattgtggccgactggggaaacagcaggatccaggtttttgatgggagtggatcatttttgtcctacattaacacatctgctgacccactctatggcccccaaggcctggccctaacttcagatggtcatgttgtggttgcagactctggaaatcactgtttcaaagtctatcgatacttacagtaatggtgggcaggtggatacccgcttccatggtcttgcactataaactggaatggatttctcaatgcgggaccagattatgactagagtttttatgccagaaggaatcattggtgaactttccaaggttatttctgaatgtaacaatttccttaaaaatgacttatccaatttctgtatttcacctttagggttaaaaaaaactcttctactgaatctataaaaactgcagttttacatctgtgaactatggcttaagggacaggatttatgtagctaaactaattttgcaaatcaaacagacacttaaaaaactagcatatgtaaaggtattcgttaatcctgtgaatggtagcttttgcacagaacttccaaaagcaaaacaaaaacaaaatctattgtagttatatacttcatttaacctaggtcacaagacccagggaatcttctaacctcacttttacagtaggtattactcttgtgacatttttttggttatcaacaactaaatataaattactttggaaaaagtaaggctgtcttgcaaaatgatcccagctctgattagcagccctctggagttcagaacttaagtatcagtgcaaatttctcaacctttctgggttagacaaagatccttttttgtgtgttcttttcaccacccctttggctcaccttgtatcagcaaacaaagtacttcttcagggaaacctgaaatttctaatgccttgaaaagcatattacaaaagtaatgctaccttttgggaaacaaactgccccgttaactccagatcattgcactggaatgtaatcaagaaagttagtcatgttttatgtaccatgttttcacacgtgtctcttctcttcgacttcctgaaagcgaaagctttacctcctgcaaatgtcagcacatgtagtaggacaccagtatcctaggacagagagccataagtagccctttggaggactgatggtgtcaaccaaaggcatgtgattgattaatgattcccccttagaaagcaagtgttaccaaagttgtgttatcttgaaagcattacaggtaagggcatgttatggttatttatcattgtttaatgaatagtagaggtgtcaagggactatgtatacatgattagggtaagatagaatgtattatatatatatatatatacacacacacatatatatagctgaatctttggtgtattgaaataggcagcactctgaaagacagaagcttcgtccagccactcttcagcacattcctttactaagcagtttaaagccgtcctagtggagcaagccctaaagcagatttaatttttgccattttccaagaatgacggtggtggcttttagtcagaaaatggccttctgtgctttcaaaaaaaaaaacaaaaaaaaaaccacacacacacataaaaaacccaacaggtcaaaataaaagttgaacttgagttacatttaatttaaatataaatgcattttgagaaatgttaagaacaatttagtcaatcgttcatctgtcattggtactgtaaaataagctgtggtctatttccactgtttaattttctactcagttctaccaaataggatgtcatgtttgacatttttgatagtgactttggggtcttcttcactgaaagcaccttagaactgtactataagaaaacatttcccctatgtataattatatgaatgtgatgtttattgcttattaatttataattcagtcattctctatataggacttcttaaaatttagaagggaaatctagctacttcaaattgtctgttaaatttattatgcccaaatcaacctctgaaaaaaggtttttccaggaagatttacatttaggtttaatatttttttagttaggtagagttttaaaaaatacttgagcctgtccgtgataaagctataaaattcaataactttttagaatgttaaatgaagacactgtttcctaacatcagtgagatacatctttgaatttaaacattcatatttactgagtacctactaggtaccaagtactcttttaggcactggaaatacagtgatggacaaaacaggtaaaaaatcgctgccccctcagagctgacattctggggtgggaatttcattttgccacgtactaacgttctgcacaaaagacaggctagactcttgtctagattgtttaaaagaaacttttcaaattggttacattaattttagtttattttcacaagtaaaaatggctttttatttagattctttctgtcccaggctgttgatcttaaaactagttgatttaaagagtttttttgcacaacatttcaattatatttgtgaacttagaaattaacttacaatctaaccagccatcatatcatatcctatcaggctagatatctcaatagtagactgaatacaaagctaattttttttacatgtcaatattggcacaaactggaatgaaagaatagtttgattcagacctgctccactatgtgttgctaaaacacatgctatgagcactccaggaaacactatattttttccaaaaaatatgtgattatatatgttaaagtatagataacatttcacacttggatacatatgtgcatttactgtatttcttggtaagcatatttttgggggaaagtgctgctgatatgatacaagtagacaaaatttaaatgaaattttgtcacattctatggaaaatggtttctggtaaactgagaaggatattaaaataagtggcttttttctgggctaccattattgtttgatttctctttgtcaagtgtatagaacctgtcatacattcatgataagtagcactgaaaaattactcattcaaatttcccctgggcacgtaaggcaaaatattgccggttgggatttcaaggtcagtgacgacgcatttcctcccagtacagaccccccagccccccttgctggacatggggaggcagagagtcacttgaccatccagaaatacatgactacaagtcctttatgactgtttgccattttttttaatggtacttagtattttgatcaaactttagtctccagaactaaacaagtccctaagtttccttattttaatttactgtgactagatttgaagcaaataaatactccagatccatgcagctagaacacacttgcttccactactaaatatacagggtatgtcctaacatggagttaactggaatagcagtacactagcaagtatctgtgaatccttagcactgacgggttaacagaaatgctttggtaatacctacttagttaattggaggaagtagtaaataaacattaggtaatctgcagattacttcaaatgggaaaaatctttttgtagactctatagtaccctctctattcactagcttctgaaaagggaggagtatttttagtttgacaatttaataatttaaaaacaagacatctccaggtaggaaaaaatgaaagctatttcatgcaaacattatctaatttagcttaaaagtgaaagtggtaatactgttggtttctgtaaatgttgcagggttttaaactttataattactttaatatttttgataactagaaatctagtattgccataaaggaaactaagtgcccatcaaagatttgtttggtataaataaagaattatttgttttgttttcaatgacagtaagctacaaatcatgatgcttaaaaactttctaaagatgaattgtgtggcagtgattggtctgtttgtggagaatgtatgaaagctattaatattctagaatagattaataaattggctatgttgttccaatgaatgtacagcacttccattaacttttgaaagcaacacagccttaaactcaatgcttttgctttatgacatgggaatgttctgtcatcaatggagtgtattcttgtaatagaattctttatatcgttctcaattctatagactttcaagcctatgtatgaatatgaaggggttttttttttttgctttgttttctttttagattttgtacattccatctttataggtctgtttcatatgttttatgtatagaacactaagtcttgcactctctgacattgatactgatatattctcgtcatttgttcttttatgaatcaaaatgttgactgcctatttaaagaaaagaatgaacgctgtgcatcaaagtgtttgtatgttcgtagctacatacgtaccacagtattttggatgctttagtctacaatgaaactttcaattaattctgtcttgaaacataggagaaacaggattcatgtgtatctctttaccatgcacaaaatctcaaatcattataataaagcttgttttctccatttgc

SEQ ID NO: 5229 - protein, 771 aa, Homo sapiens
MHRSGRYGTQQQRAGSKTAGPPCQWSRMASEGTNIPSPVVRQIDKQFLICSICLERYKNPKVLPCLHTFCERCLQNYIPAHSLTLSCPVCRQTSILPEKGVAALQNNFFITNLMDVLQRTPGSNAEESSILETVTAVAAGKPLSCPNHDGNVMEFYCQSCETAMCRECTEGEHAEHPTVPLKDVVEQHKASLQVQLDAVNKRLPEIDSALQFISEIIHQLTNQKASIVDDIHSTFDELQKTLNVRKSVLLMELEVNYGLKHKVLQSQLDTLLQGQESIKSCSNFTAQALNHGTETEVLLVKKQMSEKLNELADQDFPLHPRENDQLDFIVETEGLKKSIHNLGTILTTNAVASETVATGEGLRQTIIGQPMSVTITTKDKDGELCKTGNAYLTAELSTPDGSVADGEILDNKNGTYEFLYTVQKEGDFTLSLRLYDQHIRGSPFKLKVIRSADVSPTTEGVKRRVKSPGSGHVKQKAVKRPASMYSTGKRKENPIEDDLIFRVGTKGRNKGEFTNLQGVAASTNGKILIADSNNQCVQIFSNDGQFKSRFGIRGRSPGQLQRPTGVAVHPSGDIIIADYDNKWVSIFSSDGKFKTKIGSGKLMGPKGVSVDRNGHIIVVDNKACCVFIFQPNGKIVTRFGSRGNGDRQFAGPHFAAVNSNNEIIITDFHNHSVKVFNQEGEFMLKFGSNGEGNGQFNAPTGVAVDSNGNIIVADWGNSRIQVFDGSGSFLSYINTSADPLYGPQGLALTSDGHVVVADSGNHCFKVYRYLQ

SEQ ID NO: 5230 - DNA, 669 bp, Homo sapiens
aatgggcccagttgtctgcgggctgcggggagctaagtccccagattggaggaggctggctctggtcttcgatgcacaggagtggccgttatggaacgcagcagcagcgtgcagggtcaaagacagccggccccccatgtcagtggtctaggatggccagtgaaggcaccaacatcccaagtcctgtggtgcgccagattgacaagcagtttctgatttgcagtatatgcctggaacggtacaagaatcccaaggttctcccctgtctgcacactttctgcgagaggtgcctgcagaactacattcctgcccacagtttaaccctctcctgcccagtgtgccgccagacctccatcctgcccgagaaaggggtggccgcgctccagaacaatttcttcatcacaaacctgatggacgtgctgcagcgaactccaggcagcaacgctgaggagtcttccatcctggagacagtcactgctgtggctgcgggaaagcctctctcttgcccaaaccacgatgggaatgtaagtggctgggatggcagatactgcccgggagcatgactactgtggccttggggaggctttgggtacatcagagattacagattgaaacagaactccatgtggaaaaatcagtaattaaaaaagatttttaccagccctcaga

SEQ ID NO: 5231 - protein, 163 aa, Homo sapiens
MHRSGRYGTQQQRAGSKTAGPPCQWSRMASEGTNIPSPVVRQIDKQFLICSICLERYKNPKVLPCLHTFCERCLQNYIPAHSLTLSCPVCRQTSILPEKGVAALQNNFFITNLMDVLQRTPGSNAEESSILETVTAVAAGKPLSCPNHDGNVSGWDGRYCPGA

SEQ ID NO: 5232 - DNA, 2375 bp, Homo sapiens
gtccttgactacccaagtgagaagtcagcagagcctggggacgccatgtgcctgcagaactacattcctgcccacagtttaaccctctcctgcccagtgtgccgccagacctccatcctgcccgagaaaggggtggccgcgctccagaacaatttcttcatcacaaacctgatggacgtgctgcagcgaactccaggcagcaacgctgaggagtcttccatcctggagacagtcactgctgtggctgcgggaaagcctctctcttgcccaaaccacgatgggaatgtaagtggctgggatggcagatactgcccgggagcatgactactgtggccttggggaggctttgggtacatcagagattacagattgaaacagaactccatgtggaaaaatcagtaattaaaaaagatttttaccagccctcagactacctgctcactttctttgaccagaactatttaaataacgaaatcaatctccactgtgtctccttcacacatattgttggtatccccaggacagcaaaccagtagctatttgcaagctgacctacataaacatctgtgtaataaatttatggatacggatttaacaatggataagttctgtaagttgagaatgattattaaaatgttaattagagttctttatttttcttgggagggaaattttctcatgctacattagaccttattccttattaatagatagaatttgaagctatgtgaatccctgatagtagattatagattatgaattccaaacatatttcttgctactagtgagtacaataactgttagaagctcaggaggacctgtgggtaccatcaagtaactgattcacaatagctatgtaacctgaagaggcagcattgtgtagcgtctaaggacattggctttggagtcaggctgcctgattcaaatcctgctcttaaacttattccctgtgccagctttggtaagtttattaaactctctgcgtctcatttctttatcagttaaaaaaaagtaataatagtatttaccatatagaatattggaagaattaaatgttcaagtcatgtaaatcatatagtaggatcttgataaatgtcagctttaacattttttcattaattactttatattcatctcatttgtatattggtcacttcaaaagtatttgaaactgcttaaaacaaaaggcccaggtataacaaaaccactaagacaagcaagcaatcattagagcaaagcaattcttattagccacactactgtttgtttacctcatctcccagcattctctctgcacactgtgctggagcctcaccagcctcctagaacctgccaaatggtttccctcctcggggcctggctgttctgttccttctgcctgggttgctctttgtttcctctttatgtggcgagcttattctcttccttgaagtctcactgcaaatttctcctgcacacagcagtcttctccacctgtaccgtctaacacaggttgcctcttacagctggttaccctccatcatgtccctgctttctttcctccctggtgctcactgtggtctgcttgccatcagctgtgtatttgtgtacttattagtcctggctttccctctagaatgtgagctctgggagggcaaggacctgtcattagacccctagcactgagggcagtgtcttatacatagaagtcaataaatatttgttgaacaaatttgccagacaccgtatttggctccttaaacccccctctgcaaagtagttgttggttactttcactttataagatgaagaaactgaggctgaaacagtttaagtcacaaagcttgctgggcacattgtaaaagctagccctggaagaaatagcatcctgagctttctggtagccaaaacaagagaaggacaccatggcttacacatctgtaataatttaattgaaagcacaccaggctattaatagctatcagttttccatgcattttatgccaagggaaattgatcatctaaattttgtaaaaagaacttttaaatgctgcttttgaaagcaggttgagtattttcctcatgaccacttctcacactggtgcttagtgaatgctgaggctgtctatgcctggagcttgcactctaaatactagttatgggaaggtatttctatcaggtgtaagagtgccccttaaaatgaggctctctggagacgtgacttgatagaggagtaaagtcttagaaacattaggttgttttattttttatgggttttttagtttttgtttttgtttctgagacagagtctcaatctgtcatccaggctggagcttcagtgagccatgattgcgcctctgcgctccaacccaggtgacagagcaagactctatctc

SEQ ID NO: 5233 - protein, 92 aa, Homo sapiens
MCLQNYIPAHSLTLSCPVCRQTSILPEKGVAALQNNFFITNLMDVLQRTPGSNAEESSILETVTAVAAGKPLSCPNHDGNVSGWDGRYCPGA

SEQ ID NO: 5234 - DNA, 1134 bp, Homo sapiens
gtcatcgcacagggaaatctttctggaaccgggcaccaacttgcgtgtttgttttcatgctctttgtgcggggattagctgtcgtgccgggcctgaaaatgctgcgagcgccgggcgacatctaatccaggatttgcctctgcctcgcggttgatggaaaacagatgtcttactgctctgggcctgagcacagaatggaaatgaccgaccagagagccatttggagccgaggacacccggtgaaagccattcagagtccagccaggaggccgactttcctcctctggtctgtttttactacttgagccgctcgctcagaaaacggccttagataaagcagtttcaccttcagatcgcctgaggctgcagaagggcggctgcgggggaggaaggaggaggcggagaggagcgggtgcgaagtcctgggtcgcctgcccgctgcctgatgtcgtgagctagggcacctcggccctggctgggcgcgcagcgaggcccaggcccgaggggtgaggcccaggccactccggagcgcgcgctgttcccgcgaagcgagtcgccgtctcgtacagcagcgtgcagggtcaaagacagccggccccccatgtcagtggtctaggatggccagtgaaggcaccaacatcccaagtcctgtggtgcgccagattgacaagcagtttctgatttgcagtatatgcctggaacggtacaagaatcccaaggttctcccctgtctgcacactttctgcgagaggtgcctgcagaactacattcctgcccacagtttaaccctctcctgcccagtgtgccgccagacctccatcctgcccgagaaaggggtggccgcgctccagaacaatttcttcatcacaaacctgatggacgtgctgcagcgaactccaggcagcaacgctgaggagtcttccatcctggagacagtcactgctgtggctgcgggaaagcctctctcttgcccaaaccacgatgggaatgtaagtggctgggatggcagatactgcccgggagcatgactactgtggccttggggaggctttgggtacatcagagattacagattgaaacagaactccatgtggaaaaatcagtaattaaaaaagatttttaccagccctcaga

SEQ ID NO: 5235 - protein, 136 aa, Homo sapiens
MASEGTNIPSPVVRQIDKQFLICSICLERYKNPKVLPCLHTFCERCLQNYIPAHSLTLSCPVCRQTSILPEKGVAALQNNFFITNLMDVLQRTPGSNAEESSILETVTAVAAGKPLSCPNHDGNVSGWDGRYCPGA

SEQ ID NO: 5236 - DNA, 795 bp, Homo sapiens
catgctctttgtgcggggattagctgtcgtgccgggcctgaaaatgctgcgagcgccgggcgacatctaatccaggatttgcctctgcctcgcggttgatggaaaacagatgtcttactgctctgggcctgagcacagaatggaaatgaccgaccagagagccatttggagccgaggacacccggtgaaagccattcagagtccagccaggaggccgactttcctcctctgcagcgtgcagggtcaaagacagccggccccccatgtcagtggtctaggatggccagtgaaggcaccaacatcccaagtcctgtggtgcgccagattgacaagcagtttctgatttgcagtatatgcctggaacggtacaagaatcccaaggttctcccctgtctgcacactttctgcgagaggtgcctgcagaactacattcctgcccacagtttaaccctctcctgcccagtgtgccgccagacctccatcctgcccgagaaaggggtggccgcgctccagaacaatttcttcatcacaaacctgatggacgtgctgcagcgaactccaggcagcaacgctgaggagtcttccatcctggagacagtcactgctgtggctgcgggaaagcctctctcttgcccaaaccacgatgggaatgtaagtggctgggatggcagatactgcccgggagcatgactactgtggccttggggaggctttgggtacatcagagattacagattgaaacagaactccatgtggaaaaatcagtaattaaaaaagatttttaccagccctcag

SEQ ID NO: 5237 - protein, 136 aa, Homo sapiens; identical to SEQ ID NO: 5235

SEQ ID NO: 5238 - DNA, 569 bp, Homo sapiens
ttccagctccagtcgcatgcactagacctgctgtgcttaaatgtcctgtgattgggtcatggaattgcagcatgtccagcacttgaagaggtttggatgctttaagtcactgcaagaggccaggagatggggtcacagagacagaagagacagactgtcttgtacagaaacctaagggctctctattatggactgaatgttcatgaatccccccaaaatcatatgttgaaggcttaaccccactgtgacggtatttggagacggagcctttggaaggtgattagggttagataagatcatgagaggtggctgaggccttgttgacaggattagtgctcagtctccttagttagaaaataagcctggccagcatcctaactttctgcagcagtaagtaggatccctaataaaggctgaatatcatactcatacccacaattccttacttggtttaaatacaaaagattatcgctgccaaactgtgcataagaattggtagactatgtttgaaaatgttttcctttaataatattgcaaatacctgaagccaggcaataaaagtaagacac

SEQ ID NO: 5239 - protein, 44 aa, Homo sapiens
MSCDWVMELQHVQHLKRFGCFKSLQEARRWGHRDRRDRLSCTET

SEQ ID NO: 5240 - DNA, 1039 bp, Homo sapiens
cccaattttattgtagtgttagagcagccattaacagtaggtaaaggggctgggtgtggtgcctcatgcctgtaatcccagcactttcagaggctgaggcaggcagattgcttgagctcagaaaattgagaccagcctgggcaacatggcaaaaccctgtctctacaaaaaatacaaagaaactagccgtgcatggtggtgcacacctgtagtcccaaatacttgggaggctgaggtgggaggatcgcttgaacccgggaggagaggttgcagtgagctgtgattgcaccatgcactgccatcctaagcaacaaattatttaaacacataaaaaccatcattagctcactggttgtacaaaaacaggccgtgggccagatttggctcacaggccatagtttgcccgcccctgctcaagcctaacaaaatggctgacacacctttagtagattttgcttcagaggaaaatccagttggtgggtctgtaataccctaactcactgtctggacattaattccttagacgcatgatcaccctgtgttttgtaggtggaggcaagctgctcctgactggtgcaagaactgactgtgtgtgtactttgcttctcagtgctgtgcacagacacgtgcagcaagaaccatctcagagggtcacaagccccctagattttacccacagaagatggtagaaaaaagaacctgtgatgaatgaagaaagctggggaaaatgagggaaggcaggaggaacctgccagaaacaggccaagtcccaccaacatggaaatcagatcacaaatgatttagctgtaaaacaggtatcccaagttatgccatgtaattcccaattccattctttcctttccttctccctttccctcttaagtatctgtggatagaaacaggatgttatgttttactttctcctgcaatgtaggaagatatttattctctagttcatatccaattatttgcaggccagaaattctttctctaataatattaaaatatgtacctgttccaaagacactgcaattaataa

SEQ ID NO: 5241 - protein, 53 aa, Homo sapiens
MITLCFVGGGKLLLTGARTDCVCTLLLSAVHRHVQQEPSQRVTSPLDFTHRRW

SEQ ID NO: 5242 - DNA, 357 bp, Homo sapiens
gcctggtttgctgcagtcttttcaacagacgctcagtgagaaaaagatgtcctgtaagatcaagaccgattggtgtgaatactgaagggggtcttccacttgttaatgacccagaaacattcctgccgacttccagccttctctcatttcctccatttttctcttcctctgttctgtgcatgaactggcacatcactacttagagcagaagatatgctgggcttctgatgatggctgcactgcatgcagcagcgtgcagggtcaaagacagccggccccccatgtcagtggtctaggatggccagtgaaggcaccaacatcccaagtcctgtggtgcgccagattgacaagcagttt

SEQ ID NO: 5243 - protein, 37 aa, Homo sapiens
MQQRAGSKTAGPPCQWSRMASEGTNIPSPVVRQIDKQ

SEQ ID NO: 5244 - DNA, 773 bp, Homo sapiens
aaaagatgtcctgtaagatcaagaccgattggtgtgaatactgaagggggtcttccacttgttaatgacccagaaacattcctgccgacttccagccttctctcatttcctccatttttctcttcctctgttctgtgcatgaactggcacatcactacttagagcagaagatatgctgggcttctgatgatggctgcactgcatgcagcagcgtgcagggtcaaagacagccggccccccatgtcagtggtctaggatggccagtgaaggcaccaacatcccaagtcctgtggtgcgccagattgacaagcagtttctgatttgcagtatatgcctggaacggtacaagaatcccaaggttctcccctgtctgcacactttctgcgagaggtgcctgcagaactacattcctgcccacagtttaaccctctcctgcccagtgtgccgccagacctccatcctgcccgagaaaggggtggccgcgctccagaacaatttcttcatcacaaacctgatggacgtgctgcagcgaactccaggcagcaacgctgaggagtcttccatcctggagacagtcactgctgtggctgcgggaaagcctctctcttgcccaaaccacgatgggaatgtaagtggctgggatggcagatactgcccgggagcatgactactgtggccttggggaggctttgggtacatcagagattacagattgaaacagaactccatgtggaaaaatcagtaattaaaaaagatttttaccagccctcaga

SEQ ID NO: 5245 - protein, 154 aa, Homo sapiens
MQQRAGSKTAGPPCQWSRMASEGTNIPSPVVRQIDKQFLICSICLERYKNPKVLPCLHTFCERCLQNYIPAHSLTLSCPVCRQTSILPEKGVAALQNNFFITNLMDVLQRTPGSNAEESSILETVTAVAAGKPLSCPNHDGNVSGWDGRYCPGA

SEQ ID NO: 5246 - DNA, 207 bp, Homo sapiens
cagcgtgcagggtcaaagacagccggccccccatgtcagtggtctaggatggccagtgaaggcaccaacatcccaagtcctgtggtgcgccagattgacaagcagtttctgatttgcagtatatgcctggaacggtacatcagagattacagattgaaacagaactccatgtggaaaaatcagtaattaaaaaagatttttaccagc

SEQ ID NO: 5247 - protein, 45 aa, Homo sapiens
MASEGTNIPSPVVRQIDKQFLICSICLERYIRDYRLKQNSMWKNQ

SEQ ID NO: 5248 - DNA, 406 bp, Homo sapiens
cagtttctgatttgcagtatatgcctggaacggtacaagaatcccaaggttctcccctgtctgcacactttctgcgagagtgtgccgccagacctccatcctgcccgagaaaggggtggccgcgctccagaacaatttcttcatcacaaacctgatggacgtgctgcagcgaactccaggcagcaacgctgaggagtcttccatcctggagacagtcactgctgtggctgcgggaaagcctctctcttgcccaaaccacgatgggaatgtaagtggctgggatggcagatactgcccgggagcatgactactgtggccttggggaggctttgggtacatcagagattacagattgaaacagaactccatgtggaaaaatcagtaattaaaaaagatttttaccagc

SEQ ID NO: 5249 - protein, 44 aa, Homo sapiens
MPGTVQESQGSPLSAHFLRECAARPPSCPRKGWPRSRTISSSQT

SEQ ID NO: 5250 - DNA, 1341 bp, Homo sapiens
ggggacgctctcaggtcttggtgcccagcccagcttccttcaaaatatctgctgttcatgaaatcctgtgcaagctcagcttggagggtgaacactctacactcccaagtgcatttgggtcagtcaaagcctacaccaaatttgatgctgagcaggatgctttgaacattgaaatggccatcaagaccaaaggtgtggatgagatcaccactgtcaacattttgactaaccacagcaatgcacagagacaggatattgccttcacctaccagagaaggaccaaaaaggaacttgtatcagcacttaagtcagccttatctggccacctagatagtggctttgggcctattaaagacacctgctcagtatgatgcttctgagctaaaatcttccatgaaggggctgggaaccaacaaggactccctcattgagatcatctgctcaagaaccaaccaagagctgcaggaaattaacagagtctacaaggaaatgtacaagactgatctggagaaggacattatttcggacacatctggtgacttctgcaagctgatggttgccctggcaaagggtagaagagcagaggatggctctgtcattgattatgaactgattgaccaagatgcccgggatctctatgacgctggggtgaagaggaaaggaactgaagttcccaagtggatcagcgtcatgaccgagcggagcatgtcccacttccagaaagtatttgataggtacaagagctacagtccttatgacatgttggagagcatcaagaaagaggttaaaggagacctggaaaattctttcctgaacctggtccagtgtattcagaacaagcccctgtatttcgctgaccggctgtacgactccataatgggcatggggactcaagataaggtcctgatcagaatcatggtctcccacaatgaagtggacatgttgaaaattaggtctgaattcaagagaaagtatagcaagtccctgtactattacatccagcaagacactaagggtgctgtacctgtgtggtggagatggctgaagtccgacacagcacgagcgtccagaaatggtgctccccatgcttccagctaacaggtctagaaaacccgcttgtgactagcagtccctgtggctgttcctgtgaggatgacgttagcattgcccccaacctcattttagttgcctaagcattgcctggctttcctgtctagtctctcctgtaagccaaagaaatgaacattccaaggaattggaagtgaagtctatgatgtgaaacactttgcctcctgtgtactgtgtcataaacggattaataaactgaatttgtactttaga

SEQ ID NO: 5251 - protein, 234 aa, Homo sapiens [sequence omitted]

SEQ ID NO: 5252 - DNA, 1643 bp, Homo sapiens
taaagtatagataacatttcacacttggatacatatgtgcatttactgtatttcttggtaagcatatttttgggggaaagtgctgctgatatgatacaagtagacaaaatttaaatgaaattttgtcacattctatggaaaatggtttctggtaaactgagaaggatattaaaataagtggcttttttctgggctaccattattgtttgatttctctttgtcaagtgtatagaacctgtcatacattcatgataagtagcactgaaaaattactcattcaaatttcccctgggcacgtaaggcaaaatattgccggttgggatttcaaggtcagtgacgacgcatttcctcccagtacagaccccccagccccccttgctggacatggggaggcagagagtcacttgaccatccagaaatacatgactacaagtcctttatgactgtttgccattttttttaatggtacttagtattttgatcaaactttagtctccagaactaaacaagtccctaagtttccttattttaatttactgtgactagatttgaagcaaataaatactccagatccatgcagctagaacacacttgcttccactactaaatatacagggtatgtcctaacatggagttaactggaatagcagtacactagcaagtatctgtgaatccttagcactgacgggttaacagaaatgctttggtaatacctacttagttaattggaggaagtagtaaataaacattaggtaatctgcagattacttcaaatgggaaaaatctttttgtagactctatagtaccctctctattcactagcttctgaaaagggaggagtatttttagtttgacaatttaataatttaaaaacaagacatctccaggtaggaaaaaatgaaagctatttcatgcaaacattatctaatttagcttaaaagtgaaagtggtaatactgttggtttctgtaaatgttgcagggttttaaactttataattatttctaaagatgaattgtgtggcagtgattggtctgtttgtggagaatgtatgaaagctattaatattctagaatagattaataaattggctatgttgttccaatgaatgtacagcacttccattaacttttgaaagcaacacagccttaaactcaatgcttttgctttatgacatgggaatgttctgtcatcaatggagtgtattcttgtaatagaattctttatatcgttctcaattctatagactttcaagcctatgtatgaatatgaaggggttttttttttttgctttgttttctttttagattttgtacattccatctttataggtctgtttcatatgttttatgtatagaacactaagtcttgcactctctgacattgatactgatatattctcgtcatttgttcttttatgaatcaaaatgttgactgcctatttaaagaaaagaatgaacgctgtgcatcaaagtgtttgtatgttcgtagctacatacgtaccacagtattttggatgctttagtctacaatgaaactttcaattaattctgtcttgaaacataggagaaacaggattcatgtgtatctctttaccatgcacaaaatctcaaatcattataataaagcttgttttctccattt

SEQ ID NO: 5253 - protein, 64 aa, Homo sapiens [sequence omitted]

SEQ ID NO: 5254 - DNA, 1008 bp, Homo sapiens
agtcggcgccaaaatcaaacgcgtcctggcctgtcccgcccctctccccaagcgcgggcccggccagcggaagcccctgcgcccgcgccatgtcaaagaaaaaaggactgagtgcagaagaaaagagaactcgcatgatggaaatattttctgaaacaaaagatgtatttcaattaaaagacttggagaagattgctcccaaagagaaaggcattactgctatgtcagtaaaagaagtccttcaaagcttagttgatgatggtatggttgactgtgagaggatcggaacttctaattattattgggcttttccaagtaaagctcttcatgcaaggaaacataagttggaggttctggaatctcaggaccctggctgctgcttccatgaaataattaaagtctcctattatagaaaattctggctgggcgcagtggctcacgcctgtaatcccagcactttgggaggctgaggcgggcagatcacgaggtgactttcccccacccccacatgaagtgcaagatggagttgtctgagggaagtcaaaagcatgcaagcctacagaaaagcattgagaaagctaaaattggccgatgtgaaacggaagagcgaaccaggctagcaaaagagctttcttcacttcgagaccaaagggaacagctaaaggcagaagtagaaaaatacaaagactgtgatccgcaagttgtggaagaaatacgccaagcaaataaagtagccaaagaagctgctaacagatggactgataacatattcgcaataaaatcttgggccaaaagaaaatttgggtttgaagaaaataaaattgatagaacttttggaattccagaagactttgactacatagactaaaatattccatggtggtgaaggatgtacaagcttgtgaatatgtaaattttaaactattatctaactaagtgtactgaattgtcgtttgcctgtaactgtgtttatcattttattaatgttaaataaagtgtaaaatgcag

SEQ ID NO: 5255 - protein, 126 aa, Homo sapiens
MSKKKGLSAEEKRTRMMEIFSETKDVFQLKDLEKIAPKEKGITAMSVKEVLQSLVDDGMVDCERIGTSNYYWAFPSKALHARKHKLEVLESQDPGCCFHEIIKVSYYRKFWLGAVAHACNPSTLGG

SEQ ID NO: 5256 - DNA, 732 bp, Homo sapiens
agtcggcgccaaaatcaaacgcgtcctggcctgtcccgcccctctccccaagcgcgggcccggccagcggaagcccctgcgcccgcgccatgtcaaagaaaaaaggactgagtgcagaagaaaagagaactcgcatgatggaaatattttctgaaacaaaagatgtatttcaattaaaagacttggagaagattgctcccaaagagaaaggcattactgctatgtcagtaaaagaagtccttcaaagcttagttgatgatggtatggttgactgtgagaggatcggaacttctaattattattgggcttttccaagtaaagctcttcatgcaaggaaacataagttggaggttctggaatctcagttgtctgagggaagtcaaaagcatgcaagcctacagaaaagcattgagaaagctaaaattggccgatgtgaaacggccaagcaaataaagtagccaaagaagctgctaacagatggactgataacatattcgcaataaaatcttgggccaaaagaaaatttgggtttgaagaaaataaaattgatagaacttttggaattccagaagactttgactacatagactaaaatattccatggtggtgaaggatgtacaagcttgtgaatatgtaaattttaaactattatctaactaagtgtactgaattgtcgtttgcctgtaactgtgtttatcattttattaatgttaaataaagtgtaaaatgcag

SEQ ID NO: 5257 - protein, 122 aa, Homo sapiens
MSKKKGLSAEEKRTRMMEIFSETKDVFQLKDLEKIAPKEKGITAMSVKEVLQSLVDDGMVDCERIGTSNYYWAFPSKALHARKHKLEVLESQLSEGSQKHASLQKSIEKAKIGRCETAKQIK

SEQ ID NO: 5258 - DNA, 847 bp, Homo sapiens
agtcggcgccaaaatcaaacgcgtcctggcctgtcccgcccctctccccaagcgcgggcccggccagcggaagcccctgcgcccgcgccatgtcaaagaaaaaaggactgagtgcagaagaaaagagaactcgcatgatggaaatattttctgaaacaaaagatgtatttcaattaaaagacttggagaagattgctcccaaagagaaaggcattactgctatgtcagtaaaagaagtccttcaaagcttagttgatgatggtatggttgactgtgagaggatcggaacttctaattattattgggcttttccaagtaaagctcttcatgcaaggaaacataagttggaggttctggaatctcagttgtctgagggaagtcaaaagcatgcaagcctacagaaaagcattgagaaagctaaaattggccgatgtgaaacggaagagcgaaccaggctagcaaaagagctttcttcacttcgagaccaaagggaacagctaaaggcagaagtagaaaaatacaaagactgtgatccgcaagttgtggaagaaatacgccaagcaaataaagtagccaaagaagctgctaacagatggactgataacatattcgcaataaaatcttgggccaaaagaaaatttgggtttgaagaaaataaaattgatagaacttttggaattccagaagactttgactacatagactaaaatattccatggtggtgaaggatgtacaagcttgtgaatatgtaaattttaaactattatctaactaagtgtactgaattgtcgtttgcctgtaactgtgtttatcattttattaatgttaaataaagtgtaaaatgcag

SEQ ID NO: 5259 - protein, 205 aa, Homo sapiens; identical to SEQ ID NO: 597

SEQ ID NO: 5260 - DNA, 830 bp, Homo sapiens
agtcggcgccaaaatcaaacgcgtcctggcctgtcccgcccctctccccaagcgcgggcccggccagcggaagcccctgcgcccgcgccatgtcaaagaaaaaaggactgagtgcagaagaaaagagaactcgcatgatggaaatattttctgaaacaaaagatgtatttcaattaaaagacttggagaagattgctcccaaagagaaaggcattactgctatgtcagtaaaagaagtccttcaaagcttagttgatgatggtatggttgactgtgagaggatcggaacttctaattattattgggcttttccaagtaaagctcttcatgcaaggaaacataagttggaggttctggaatctcagttgtctgagggaagtcaaaagcatgcaagcctacagaaaagcattgagaaagctaaaattggccgatgtgaaacggccaagcaaataaagtagccaaagaagctgctaacagatggactgataacatattcgcaataaaatcttgggccaaaagaaaatttgggtttgaagaaaataaaattgatagaacttttggaattccagaagactttgactacatagactaaaatattccatggtggtgaaggatgtacaagcttgtgaatatgtaaattttaaactattatctaactaagtgtactgaattgtcgtttgcctgtaactgtgtttatcattttattaatgttaaataaagtgtaaaatgcagatgttcttcaccccttttggtagaacaaaagcaggatgataaccatatccccccagtgctcatcaaagtaggacaataaaaatccatccatctcagtc

SEQ ID NO: 5261 - protein, 122 aa, Homo sapiens; identical to SEQ ID NO: 5257

SEQ ID NO: 5262 - DNA, 945 bp, Homo sapiens
agtcggcgccaaaatcaaacgcgtcctggcctgtcccgcccctctccccaagcgcgggcccggccagcggaagcccctgcgcccgcgccatgtcaaagaaaaaaggactgagtgcagaagaaaagagaactcgcatgatggaaatattttctgaaacaaaagatgtatttcaattaaaagacttggagaagattgctcccaaagagaaaggcattactgctatgtcagtaaaagaagtccttcaaagcttagttgatgatggtatggttgactgtgagaggatcggaacttctaattattattgggcttttccaagtaaagctcttcatgcaaggaaacataagttggaggttctggaatctcagttgtctgagggaagtcaaaagcatgcaagcctacagaaaagcattgagaaagctaaaattggccgatgtgaaacggaagagcgaaccaggctagcaaaagagctttcttcacttcgagaccaaagggaacagctaaaggcagaagtagaaaaatacaaagactgtgatccgcaagttgtggaagaaatacgccaagcaaataaagtagccaaagaagctgctaacagatggactgataacatattcgcaataaaatcttgggccaaaagaaaatttgggtttgaagaaaataaaattgatagaacttttggaattccagaagactttgactacatagactaaaatattccatggtggtgaaggatgtacaagcttgtgaatatgtaaattttaaactattatctaactaagtgtactgaattgtcgtttgcctgtaactgtgtttatcattttattaatgttaaataaagtgtaaaatgcagatgttcttcaccccttttggtagaacaaaagcaggatgataaccatatccccccagtgctcatcaaagtaggacaataaaaatccatccatctcagtc

SEQ ID NO: 5263 - protein, 205 aa, Homo sapiens; identical to SEQ ID NO: 597

SEQ ID NO: 5264 - DNA, 1106 bp, Homo sapiens
agtcggcgccaaaatcaaacgcgtcctggcctgtcccgcccctctccccaagcgcgggcccggccagcggaagcccctgcgcccgcgccatgtcaaagaaaaaaggactgagtgcagaagaaaagagaactcgcatgatggaaatattttctgaaacaaaagatgtatttcaattaaaagacttggagaagattgctcccaaagagaaaggcattactgctatgtcagtaaaagaagtccttcaaagcttagttgatgatggtatggttgactgtgagaggatcggaacttctaattattattgggcttttccaagtaaagctcttcatgcaaggaaacataagttggaggttctggaatctcaggaccctggctgctgcttccatgaaataattaaagtctcctattatagaaaattctggctgggcgcagtggctcacgcctgtaatcccagcactttgggaggctgaggcgggcagatcacgaggtgactttcccccacccccacatgaagtgcaagatggagttgtctgagggaagtcaaaagcatgcaagcctacagaaaagcattgagaaagctaaaattggccgatgtgaaacggaagagcgaaccaggctagcaaaagagctttcttcacttcgagaccaaagggaacagctaaaggcagaagtagaaaaatacaaagactgtgatccgcaagttgtggaagaaatacgccaagcaaataaagtagccaaagaagctgctaacagatggactgataacatattcgcaataaaatcttgggccaaaagaaaatttgggtttgaagaaaataaaattgatagaacttttggaattccagaagactttgactacatagactaaaatattccatggtggtgaaggatgtacaagcttgtgaatatgtaaattttaaactattatctaactaagtgtactgaattgtcgtttgcctgtaactgtgtttatcattttattaatgttaaataaagtgtaaaatgcagatgttcttcaccccttttggtagaacaaaagcaggatgataaccatatccccccagtgctcatcaaagtaggacaataaaaatccatccatctcagtc

SEQ ID NO: 5265 - protein, 126 aa, Homo sapiens; identical to SEQ ID NO: 5255

SEQ ID NO: 5266 - DNA, 607 bp, Homo sapiens; identical to SEQ ID NO: 598

SEQ ID NO: 5267 - protein, 81 aa, Homo sapiens; identical to SEQ ID NO: 599

SEQ ID NO: 5268 - DNA, 414 bp, Homo sapiens
ctgagattaatggccctgggttgcagccaaaagcatctcagagggtatgatgcatttcctgactgtggtcggctttccatgggtgaaacagaaaagtcttcaaatatcctcaccaactgctttcctagatttttcagccagttacttgaccatattaggaaaagaaaggtgagcttgggcttcaggacatagaaaacaacattagttatgctggaaagtatcaccaaagaagtgcagctcagacaagctgtattctattttgttcttttgaacataaacacctataaagggaccaaaagaaatctaaatgatcaacgggagcaatcctgaataggcaacaacaatcattattgccaagtgattgtcttatcatttgtcatcagtttttttttcagagtaattacatttaaatgt

SEQ ID NO: 5269 - protein, 60 aa, Homo sapiens
MALGCSQKHLRGYDAFPDCGRLSMGETEKSSNILTNCFPRFFSQLLDHIRKRKVSLGFRT

SEQ ID NO: 5270 - DNA, 743 bp, Homo sapiens
ggctgatctacccagtcagcaaggccagattgcagagaaactcagagtctaggaaaatgaatgtctaggaacattcctcaaatagtcctaccagaagacacaaagatgatgcatccggatgaagaatatatcactgagattaatggccctgggttgcagccaaaagcatctcagaggtagaacactgttgcagatggtgatgttaccatttgaaagtaagaagaaaactagtatctctttacaccaagagtaaaaatagagaagatgcttacaaactgcaacacatagagtttcttgaaatcacagtttgggagtggaggaaaaggctgcttaagtgtttggaaagggagagtaaggatgaaatagagtgggggtatgatgcatttcctgactgtggtcggctttccatgggtgaaacagaaaagtcttcaaatatcctcaccaactgctttcctagatttttcagccagttacttgaccatattaggaaaagaaaggtgagcttgggcttcaggacatagaaaacaacattagttatgctggaaagtatcaccaaagaagtgcagctcagacaagctgtattctattttgttcttttgaacataaacacctataaagggaccaaaagaaatctaaatgatcaacgggagcaatcctgaataggcaacaacaatcattattgccaagtgattgtcttatcatttgtcatcagtttttttttcagagtaattacatttaaatgt

SEQ ID NO: 5271 - protein, 44 aa, Homo sapiens
MKNISLRLMALGCSQKHLRGRTLLQMVMLPFESKKKTSISLHQE

SEQ ID NO: 5272 - DNA, 469 bp, Homo sapiens
atccagaacaactactcaaggacatgtctgaatgagtcactgaaccatggctctgtgaggtcaaagatagtgagacaaaaaggaattgctcaaatactgagatgcatgtcaactcttccaacaacctccagaatttactgagcctgtaacacagcttttgtaatccttttctgtgaaatccagtactgtgtcagcttcgttagggtctaaagtgtacctttcataaaggacctcaagatttattttcctgagctttaaatgagtgaaaatgtgttttgttgaaacttcccaagaagtaactgcattttctatggaatcttccattgtttatgggcctgatgaaagcatttggcacttaatgattcccagactatttcaactttataaaaaatcaagaaaaagaaaaaaaaggtgaaaagtaaatgttttgaatgctaacaataaaatatgtggatttttaaaccttaca

SEQ ID NO: 5273 - protein, 48 aa, Homo sapiens
MCFVETSQEVTAFSMESSIVYGPDESIWHLMIPRLFQLYKKSRKRKKR

SEQ ID NO: 5274 - DNA, 440 bp, Homo sapiens
tgatccactcgctcctcagcttaaagacatggtcaaagatagtgagacaaaaaggaattgctcaaatactgagatgcatgtcaactcttccaacaacctccagaatttactgagcctgtaacacagcttttgtaatccttttctgtgaaatccagtactgtgtcagcttcgttagggtctaaagtgtacctttcataaaggacctcaagatttattttcctgagctttaaatgagtgaaaatgtgttttgttgaaacttcccaagaagtaactgcattttctatggaatcttccattgtttatgggcctgatgaaagcatttggcacttaatgattcccagactatttcaactttataaaaaatcaagaaaaagaaaaaaaaggtgaaaagtaaatgttttgaatgctaacaataaaatatgtggatttttaaaccttac

SEQ ID NO: 5275 - protein, 30 aa, Homo sapiens
MVKDSETKRNCSNTEMHVNSSNNLQNLLSL

SEQ ID NO: 5276 - DNA, 947 bp, Homo sapiens
aagatgcaggtttatgctgttctatcatttagtaagttattatacagatacgctgttgttattttttaaataagtgagtttacaaaaaataagggttcagtggaaatatatgaaataattcacatgctataaaacattaggacaactaatcccgaaggtcaaaaactctctaatgaagagctcgggggtgaagacattctgaatatttagccaccaaaagaagaagtttaatgaaaatatattcctagtaggaatgcattcagaatgttctgtctgaatccaaactttattcattgttggaattaaagtaaacttgtcaatgtttcatggatactggcagaagaaacaagtctcctgggtcagagacaagcaagtagcacagcaagcagcatgagcatcaagtctgcactgattcccctacccaccaggttccacaagggaggcacaacaggccaggaggataccaagcatgcagtgggtttgcatcatcacaactgacaaatgggagcttgggaaatctactgctttttgagtaagcacaaagcaagcctgaaggacaaatgcaatcctaagaaatgcttcaggttaagaagacaggtcaaggtcttgcatttttggcatacccagcaagtatgtacaaggacgcatggggctgaaagaagattgccttgcccaactgatgcttgagaaaattttggtttaaagaattttctgatcaaaattgatttctattcataacaagaaaatctatttattctctctctctttctctgtctctctctcacaaatatgcatgcacacacacgcgcgcacacacacacacgccttttacattgtcttaaactgatactgaaaccttaaatagtaacccccccacaccacctgttcccatgtcaaccagaaactctgtggtgataaaagtaaagatggctttttacacttattca

SEQ ID NO: 5277 - protein, 61 aa, Homo sapiens
MGAWEIYCFLSKHKASLKDKCNPKKCFRLRRQVKVLHFWHTQQVCTRTHGAERRLPCPTDA

SEQ ID NO: 5278 - DNA, 4835 bp, Homo sapiens
gcctagggaggaggagcgagaatcagcctggttcagtgactgagacaaactggaggtgaaaggagctggtactgtccactgtgctgtcggtgctgaacctgagacgcgagcggaccagttgctccagcacctgaaggcaacgccctcttgcaccctctgtgccctgtgggacccgcttcaccaacaggacccatatcaacttgacaaaggagtgtggtatcggacgtgggagagagtcctctgtttgccacctgggcgctcattcaggcgtgactttggagatttctatagttttagaccaaactatttttttttccccagctaagacgatcttttgagagttttttttttttattgtgatttatatttccacagcgtttaggaatctttctgggggacttttgtgactgttaaaataaggtgaaaagcaataaggatgtttaagtgctggtcagttgtcttggttctcggattcatttttctggagtcggaaggaaggccaaccaaagaaggaggatatggccttaaatcctatcagcctctaatgagattgcgacataagcaggaaaaaaatcaagaaagttcaagagtcaaaggatttatgattcaggatggcccttttggatcttgtgaaaataagtactgtggtttgggaagacactgtgttaccagcagagagacagggcaagcagaatgtgcctgtatggacctttgcaaacgtcactacaaacctgtgtgtggatctgacggagaattctatgaaaaccactgtgaagtgcacagagctgcttgcctgaaaaaacaaaagattaccattgttcacaatgaagactgcttctttaaaggagataagtgcaagactactgaatacagcaagatgaaaaatatgctattagatttacaaaatcaaaaatatattatgcaagaaaatgaaaatcctaatggcgacgacatatctcggaagaagctattggtggatcaaatgtttaaatattttgatgcagacagtaatggacttgtagatattaatgaactaactcaggtgataaaacaggaagaacttggcaaggatctctttgattgtactttgtatgttctattgaaatatgatgattttaatgctgacaagcacctggctcttgaagaattttatagagcattccaagtgatccagttgagtctgccagaagatcagaaactaagcatcactgcagcaactgtgggacaaagtgctgttctgagctgtgccattcaaggaaccctgagacctcccattatctggaaaaggaacaatattattctaaataatttagatttggaagacatcaatgactttggagatgatgggtccttgtatattactaaggttaccacaactcacgttggcaattacacctgctatgcagatggctatgaacaagtctatcagactcacatcttccaagtgaatgttcctccagtcatccgggtgtatccagagagtcaggctagagagcctggggtaactgccagtcttaggtgccatgcagagggcataccaaagcctcagcttggctggttgaagaatggaattgatattacaccaaagctttccaaacaactcacgcttcaagcaaatggcagtgaggttcacataagcaatgtgcgctatgaagatactggagcatacacttgtatcgcaaagaatgaagcaggagtggatgaagacatctcttctctttttgtggaagactctgctagaaagaccctagctaacatattatggagagaagaaggtctgggaattgggaacatgttctatgttttttatgaagatggaatcaaagtgatacaacccatagaatgtgaatttcagaggcacattaagcctagtgaaaagctccttggatttcaggatgaagtctgtcccaaagctgagggagatgaagttcagaggtgtgtgtgggcatcagctgttaatgtcaaagacaagttcatttatgttgcacagccaactttggacagagtccttattgttgatgtgcagtcccaaaaagttgttcaggcagtgagcacagaccctgtcccagttaaattacactatgacaaatcacatgatcaggtctgggtgctaagctggggtaccttggagaagacatcaccaacactacaggtaattaccctggccagtgggaatgtgcctcaccacacgatccacacccaaccagtgggaaagcaatttgacagagtggatgattttttcattcccaccacaacactcattatcacccatatgaggtttggatttattcttcataaagatgaagctgcactacaaaaaattgatcttgaaaccatgtcatacatcaagacaattaacttgaaggactataagtgcgttcctcagtcattggcatatacacacttgggaggctactacttcattggctgcaaacctgacagcaccggagcagtttccccacaggtcatggtggacggtgtaactgactcagtcattgggttcaatagtgatgtgacgggcactccatatgtctctccagatggccactaccttgtcagcattaatgatgtgaaaggtcttgtaagggttcagtacattaccatcagaggagaaatacaggaggcttttgatatttacacaaatctgcacatatctgatctggcatttcaaccatcctttactgaagcccaccaatataacatctacggtagttcaagcacacaaactgatgtgctctttgtggagctctcttctgggaaggtcaagatgataaagagtctcaaggaaccactcaaggcagaagaatggccttggaaccggaaaaacaggcaaatccaggacagtggcttgtttggtcaatacctgatgacaccttccaaggactctctcttcatcctagatggacgactcaataaattaaactgtgagatcactgaagttgaaaaaggaaatacagtcatttgggttggagatgcctaaaaaccctacgatacaattattgaatgaagcgttttacaatacattgcacttaatccattgtttaaatttacaacttaactttccaagtttatatcctagtcaaacaaaatttacttggttggtccaaataaaataaattgtttttgactaagtgactaagacatacacaattaattatattggttaattagaaatactcagcacaatatttaatgagaaatcacatcagtcacaagaatcaaatatgtaaattatgctttaaacaataaagtaggatttaaatcatttaaaaaactaaactgcagggaatttcagatgacataaagcattatttcattttgagggtagtttattttttttctctgtccttttggtatgattaaacaagaaataaaaggtgttgtggaaacttaaaattcttaattcaaaatattcggtcctgtccactgtttataatattttgtgccttgaagggaatgtcacaggaggaaaaggaagactaaagcctgcatactaaatgctctcataactataaatctcttgttgttaaaaaacatctcttgcaccaaatcctgtcttcagtcttttgtttaaccctcaatgaactaccaattgaaggcataagttggtcttaggttgtatacaggtgtcaaactccacttgacatttactgtataatctgcagcatgctatagaaagtggggaggaagggaggaaaaataattacagtcaaaatatttgcaatctatctactcattttgctttcaatcactagagtgcattatgtttttaatgcaagtttgtctgggatgtcaactgcctacagatgtttattactagcagaatagattatttattaatagattgtttcttttcatatagtccaatgtttcatcatcaggaactttcggttttaaaaaagaaacattacttttgtctgctaaagtaaaccatatatagggaaattaacacctaggaaaagaaaactggcaagagaattgatgaggtattagtggcttagaagaattagtaatataagttgggaataaaggggtagcccgacagtggtaagtaaaaatgtagtactccattgtttttgctatttaaatataatgtatcaaaaacctttattctaaaatttccacaaatgattccttttatccatcttcttgtaatcctaaaagcatcttctcactatgtgctgtagtttgaaacctaacgaatcctcctacttgagacactgtagaaaagtaaaaattgttgcttctgttttgttttaagaggaaatgagaaggccagcagaagtagattaaaactagagagctggtttattaaaataagcagataattatccaggcttaaagtaatagcttacatgttttgaaaatccttgtacttatttttgtttttattgttgcaaaaaaatgttaatgggctgttgaaatgacctccatttacttaaggtaatccaataaggtcttttttaaatatacaaattttactcaagtttaaattgtataaaactgcttagaaacctgaaattttatagtgtgtaatatcttatgtgtatatagcatcctgagctgtgtgatacagtagatttcttcttagcagaaacatgcgaggtagatttaataaacaacaaaaatcagcttatgtttctacttattgaatctgctttactttttagcaattttcttccttgtgaacatgaaccatataaagtgtctgtgacttaatgatttcatgtaagtctgtcgcatacatccttcttttgtagcttacaccatgtggatgctctgtctgtagacactgcttgataaaaggagaataaacctcttacattttaaccctt

SEQ ID NO: 5279 - protein, 847 aa, Homo sapiens
MFKCWSVVLVLGFIFLESEGRPTKEGGYGLKSYQPLMRLRHKQEKNQESSRVKGFMIQDGPFGSCENKYCGLGRHCVTSRETGQAECACMDLCKRHYKPVCGSDGEFYENHCEVHRAACLKKQKITIVHNEDCFFKGDKCKTTEYSKMKNMLLDLQNQKYIMQENENPNGDDISRKKLLVDQMFKYFDADSNGLVDINELTQVIKQEELGKDLFDCTLYVLLKYDDFNADKHLALEEFYRAFQVIQLSLPEDQKLSITAATVGQSAVLSCAIQGTLRPPIIWKRNNIILNNLDLEDINDFGDDGSLYITKVTTTHVGNYTCYADGYEQVYQTHIFQVNVPPVIRVYPESQAREPGVTASLRCHAEGIPKPQLGWLKNGIDITPKLSKQLTLQANGSEVHISNVRYEDTGAYTCIAKNEAGVDEDISSLFVEDSARKTLANILWREEGLGIGNMFYVFYEDGIKVIQPIECEFQRHIKPSEKLLGFQDEVCPKAEGDEVQRCVWASAVNVKDKFIYVAQPTLDRVLIVDVQSQKVVQAVSTDPVPVKLHYDKSHDQVWVLSWGTLEKTSPTLQVITLASGNVPHHTIHTQPVGKQFDRVDDFFIPTTTLIITHMRFGFILHKDEAALQKIDLETMSYIKTINLKDYKCVPQSLAYTHLGGYYFIGCKPDSTGAVSPQVMVDGVTDSVIGFNSDVTGTPYVSPDGHYLVSINDVKGLVRVQYITIRGEIQEAFDIYTNLHISDLAFQPSFTEAHQYNIYGSSSTQTDVLFVELSSGKVKMIKSLKEPLKAEEWPWNRKNRQIQDSGLFGQYLMTPSKDSLFILDGRLNKLNCEITEVEKGNTVIWVGDA

SEQ ID NO: 5280 - DNA, 724 bp, Homo sapiens
gctcttggaatttaaatatatattcaaagctccactaacctcctcctgcctcccacgtctcagaagtgtgacacaagaaagacaaataaaggagcttgaggggattttgcaacatttgaatgacagaacgaaagtgcaatatatgactagggctgctgagctcaatacaacatgaactactggaggactagacagtgaagcatctgttcttctcattaaacaaccttctcccttgccagagaaggagactgggtgaatttttttaaacaaatgtatttttaaaatattatctagtcagattgaaaggaggtgaaaaggatgaagggagagagagagagagaatacagagagagaaaaaaagacctgaaaagttctattagtattacaaatagtcttttaaagaagaaaaataagtatttttttctagttgtatgaatttgtacaataactgatttcttggtttcaggtaatcactgttaccagttattaatatgtatgtgtattttcttcatggctaattagaaagattgttgtttttttcccacattagtaccaaacatattcctaatgatggctctatgtatctatgcatagcaatctgcatttgtcattttccttagagcccatgtaatatggtgtaatttttatttacataatggaataagtttgtgtcaaattaactggaagaccttgaaatgctttgcaaaataagtcagttccattg

SEQ ID NO: 5281 - protein, 38 aa, Homo sapiens [sequence omitted]

SEQ ID NO: 5282 - DNA, 876 bp, Homo sapiens
cgcataagacatggccagctattccttgccttctgccataattgtgaggcctctccagccatatggaactattcctcttaggactctagatgcacggagagtggccagattaatacagactggcaaaagaagaacttggcaaagtgatttgatcacacacttctcaccctcacatctcctgacagttcccctaatccctgccccacttccccgccatgggcttccatcaggaaactccttgatatcatcttcgagaagaaaactgaggcatagaacatttgggaatgaatctaagactacacatctagaatagcagagtgcatatcatcgtcattcatctcacttttccttctaacatcaaggatctatacaaggccgttgatccccactgctgcatatttcttggatctatctgaggtcccagatcccattgcctcttcatcctcacagccactgctgggtctgggtcctcataagttctatctggaagtttcagtacagtctttctcgatgtgctccacactgttatgggaatgaattttcaaacacccctgctttgaagatagggtgcttccagggtaaggcataaagttctccagggaggcaacagtgcagtggtatacagacagcacagcctttcattcctgcgaggccacttacacctgagtgaggatgggaagaagagaagacaaggacgaatgtaggaaactgtcagttaaatgacaatgtatggatggcaagagagaaagaatagtcagtgatggaaaaataatcaataacagctttgggcttttgagtttgaaaatggtgtgtagggtgagacaacaataggaaacttctaataaagaatgaacaagtacttctacttgttcaatg

SEQ ID NO: 5283 - protein, 100 aa, Homo sapiens
MASYSLPSAIIVRPLQPYGTIPLRTLDARRVARLIQTGKRRTWQSDLITHFSPSHLLTVPLIPAPLPRHGLPSGNSLISSSRRKLRHRTFGNESKTTHLE

SEQ ID NO: 5284 - DNA, 891 bp, Homo sapiens
caggagagagacatgttttcatctatcctttgtggacttctgttgtttttactgctgtgaaatttgacttgcgatatctgcttgtaaaacatcatcaaatccaaattcattatattccactttttctattacatggtttctgcttcactgattcatatctgttttacctattctgtaagggaggagaagctgcgttaggtttcatctcttgtttaagttcagtttaataaatagtagataatgcctcttctcttttttccttttgaagaggagaaaaaggaaagaattgtagttgattcttatgtagcaacttattcattcattcagtagctatagaagcgaattgttttgtaggtaattattaacgatgctttggataattccctagctaactattccttcttttccatcccagaaagcaatgaagagaaaagctgaagtcagtgattaggagtgtctgtgtaagtaaaagcaacaggcaattactgagtgtggtgtgagaggcacggaaagattgggaattcagcaagaagaggaattgaagtcaaacctcacctacttcccagagtcttctggattttctgttagaagcttcagtatctgaggggcacacccagctccaagatcaccttcccaggcctctcttgctatgacagatgccatgtgacacagttctagccaatgagaagtaaccagaacaccctgggtgcagtggcttatgctgtaatcccagcactttggaaggctaacgtgggaggattgctcgagaccagcctgggcaacatagtgagagcctgtttctacaaaacatacaaaaattagctaggcgtgggggtgcatgactgtagtcccagctactagggaggcagagatgtgaggattgcttgagtc

SEQ ID NO: 5285 - protein, 46 aa, Homo sapiens
MRSNQNTLGAVAYAVIPALWKANVGGLLETSLGNIVRACFYKTYKN

SEQ ID NO: 5286 - DNA, 1033 bp, Homo sapiens
caggagagagacatgttttcatctatcctttgtggacttctgttgtttttactgctgtgaaatttgacttgcgatatctgcttgtaaaacatcatcaaatccaaattcattatattccactttttctattacatggtttctgcttcactgattcatatctgttttacctattctgtaagggaggagaagctgcgttaggtttcatctcttgtttaagttcagtttaataaatagtagataatgcctcttctcttttttccttttgaagaggagaaaaaggaaagaattgtagttgattcttatgtagcaacttattcattcattcagtagctatagaagcgaattgttttgtaggtaattattaacgatgctttggataattccctagctaactattccttcttttccatcccagaaagcaatgaagagaaaagctgaagtcagtgattaggagtgtctgtgtaagtaaaagcaacaggcaattactgagtgtggtgtgagaggcacggaaagattgggaattcagcaagaagaggaattgaagtcaaacctcacctacttcccagagtcttctggattttctgttagaagcttcagtatctgaggaaaggactcaggcaacaaataaacagctaagattttactagagtatgaaagggagagcactggagtgcagtgcggggatggagatgcagctgtggtggctggaagtacaggagggcagctggaggcacctggcctctgaagcctgtcttcttcatctgggtgagatctgctggagtcaggaaggacttcctgctgcaaggataaagaatcccacccatcctaaggcattacatttagtcatcatagctctttcttcacagaattagaaaaaactactttaaatttcatatggaaccaaaaaagagcccatatagccaagaaaatcttaagcaaaaagaacaaagatggaggcatcatgctaactgacttcaaactatactacaaggctacagtaaccaaaacagcatggtactggtgccaaaacaga

SEQ ID NO: 5287 - protein, 73 aa, Homo sapiens
MKGRALECSAGMEMQLWWLEVQEGSWRHLASEACLLHLGEICWSQEGLPAARIKNPTHPKALHLVIIALSSQN

SEQ ID NO: 5288 - DNA, 1328 bp, Homo sapiens
aatacagtacagatctctgtactgtaaacgacaacaaggaccagtcacaatttcagttcttgttacattgataagactccttcagaaagcaatgaagagaaaagctgaagtcagtgattaggagtgtctgtgtaagtaaaagcaacaggcaattactgagtgtggtgtgagaggcacggaaagattgggaattcagcaagaagaggaattgaagtcaaacctcacctacttcccagagtcttctggattttctgttagaagcttcagtatctgaggaaaggactcaggcaacaaataaacagctaagattttactagagtatgaaagggagagcactggagtgcagtgcggggatggagatgcagctgtggtggctggaagtacaggagggcagctggaggcacctggcctctgaagcctgtcttcttcatctgggtgagatctgctggagtcaggaaggacttcctgctgcaaggataaagacctaagaagcatcatgacctgagaaacagtttcacaggccactcttggcaggtgaagtgtggtggcgtaatcatgactcactgcagcctcgaactccgggactcaagctaatctctttcctcagccttcccagcagctgggactacaggtatatgccaccaaacctagctaacattttaaaaaattttttcttttgtagaaacggggtcttgctatgttgaccaggctggttttaaactccttgcctcaagtgatcctcccatcattgcctcccaaagtcttgggattacaggcatgagccactgcgcccagctacaatatattttggatgctgactttatatcctgtgactttgctatggtcgcttattatttctagacatttttgtttttgacagagtctcactgttttgcttaggctggagtgcagtggcacaatcttcattcactgcaacctctgcctcctgggttcaggctattctcctgccacagccttcagagtagctgggactgcaggcacgcaacaccatgcccggctaatttttgtatttttagtagagacaggggaatcacgatgttggtcaggctggtctcgaactcctgacctcaagtgatctgcctgcctcggcctcccaaagtgttggaattacaggcgtgagccaccatgcctggccacggtttttttgatcctttaggattttctaccaagactgtcatgtcatctataatcaagtactcttttatttctttttttccaatttgtttgtattttatttcttttttctcaaagcttattgtactgactaagatccccagaataatgttgaataaaagtattggaaacag

SEQ ID NO: 5289 - protein, 55 aa, Homo sapiens
MKGRALECSAGMEMQLWWLEVQEGSWRHLASEACLLHLGEICWSQEGLPAARIKT

SEQ ID NO: 5290 - DNA, 1144 bp, Homo sapiens
tgtggatctgaaaagaattttctcatctaaaccagagcttcagtctcccaggatcgtgaatgtctgagaataagcagatgcagcccttttcacagaagggcaaggtccgcagctcctcggcatcatggcattatttattcatcatgagagccgcgagtgaacatgtaccctgcagaaaaatcaaatcagtgttcggtttctcgagcagctgcgtttggcagagaaaaagcatttggatctaactttggtaactggacaattataggcgttattaaattggagatgcaaatgagtaaccatgttttcttccgagtttgttctatttcacttgtagtgcttaaattaaaaccagctcagcatttgtaaaagctgattcctgaaagcttagaaaagttctgtgcttgtctatataccagtagtttcactaaaaacatttacatattagttaaccccaaaggaccaaatttgcatttattcatgtttacaggtttcaatggttttagccctgaagtcattgtgtccttagatacctaacactgaagatttgctcacaggtggagattcagatagaaaaaaacacacaagcttagaaatgttaataagtatctctatgcattataaaaatacctacagataatttaaagcctgagtaatttgtttatatatttcccgatttgtggaatagactaatattacatcatagtccgagaactttttataaattgcctagtttttaatttcaattcttccatttacaaactctgggaccttgaacaaattattttacctcagtctcctcactataaaatggagacaataatagtggtacctcttaagttgttgaaagcgttaaacaaatcagtacatgttaaataaattaatatacatgcttaggataatgcctgacagtaattgcaattctgtagatgtgtgtgcatatgtatagattgaatgtagttttatcaaacagtaaattggcatataataataatccctcattatctgtctacctttccctccatatttcagttcaatagaattattgttttattcactttgtagtccacaacgcttatcgatttgtgttgctgcaacatgctagtgtacattttataataaatattgtggcttttagactgttcaa

SEQ ID NO: 5291 - protein, 67 aa, Homo sapiens [sequence omitted]

SEQ ID NO: 5292 - DNA, 335 bp, Homo sapiens
cgcgccctttgagtatcagttgccatctctaaattgaaccgtgtttgtatttacaccggtgaaaatgagtatactgtcattaaaatagaactctttaagaataattgtggtctcttgtggatcaaggaataaactgcttacagcaaaagagtagcaaggtcttcctggcaagatgatgcctttctggtgttcttcctaccaacagagtaacctcctgatctctagaaggaatcctgaagcatgtgccagagacgcagttcctaaagtctttttttctctatggttagagtgactggccaacatccccacaaatctattaaagcaggtttttgtgt

SEQ ID NO: 5293 - protein, 39 aa, Homo sapiens
MMPFWCSSYQQSNLLISRRNPEACARDAVPKVFFSLWLE

SEQ ID NO: 5294 - DNA, 421 bp, Homo sapiens
cagctgcagaatggggagaccttggtggtaactaaaatggagccatagtagaaagaagtcttggccggctacagtggcgcatgcctgtaatcccagccctttgggagactgaggcaggcagatcgcttgaggtcaggtgttcgagaccaggctggccaacatggtcatcaatctctgacaagaacctttcagagtgcttgatgatattgcaagtagcaagctgtgctgcattaaaagatgatgaatctctgttcaggatggaacggagtgtttggcatctccacttcatctttcgtaaaggctgaatgaactctttgctgccacttattgaagataaaaggaggcagaattacccttaagtaaatactttggcctcagtatttcctccactttgtacattaataaaaatccctttctttca

SEQ ID NO: 5295 - protein, 74 aa, Homo sapiens
MPVIPALWETEAGRSLEVRCSRPGWPTWSSISDKNLSECLMILQVASCAALKDDESLFRMERSVWHLHFIFRKG

SEQ ID NO: 5296 - DNA, 1447 bp, Homo sapiens
gggtctggagcttggaggagaagtctgaactaaggataaactaaagagaggccaatgagacttgaaccctgagcctaagttgtcaccagcaggactgatgtgcacacagaaggaatgaagtatggatgtgaaagaacgcaggccttactgctccctgaccaagagcagacgagagaaggaacggcgctacacaaattcctccgcagacaatgaggagtgccgggtacccacacagaagtcctacagttccagcgagacattgaaagcttttgatcatgattcctcgcggctgctttacggcaacagagtgaaggatttggttcacagagaagcagacgagttcactagacaaggacagaattttaccctaaggcagttaggagtttgtgaaccagcaactcgaagaggactggcattttgtgcggaaatggggctccctcacagaggttactctatcagtgcagggtcagatgctgatactgaaaatgaagcagtgatgtccccagagcatgccatgagactttggggcaggggggtcaaatcaggccgcagctcctgcctgtcaagtcggtccaactcagccctcaccctgacagatacggagcacgaaaacaagtccgacagtgagaatgagcaacctgcaagcaatcaaggccagtctaccctgcagcccttgccgccttcccataagcagcactctgcacagcatcatccatccatcacttctctcaacagaaactccctgaccaatagaaggaaccagagtccggccccgccggctgctttgcccgccgagctgcaaaccacacccgagtccgtccagctgcaggacagctgggtccttggcagtaatgtaccactggaaagcaggcatttcctattcaaaacaggaacaggtacaacgccactgttcagtactgcaaccccaggatacacaatggcatctggctctgtttattcaccacctactcggccactacctagaaacaccctatcaagaagtgcttttaaattcaagaagtcttcaaagtactgtagctggaaatgcactgcactgtgtgccgtaggggtctcggtgctcctggcaatactcctgtcttattttatagcaatgcatctctttggcctcaactggcagctacagcagactgaaaatgacacatttgagaatggaaaagtgaattctgataccatgccaacaaacactgtgtcattaccttctggagacaatggaaaattaggtggatttacgcaagaaaataacaccatagattccggagaacttgatattggccgaagagcaattcaagagattcctcccgggatcttctggagatcacagctcttcattgatcagccacagtttcttaaattcaatatctctcttcagaaggatgcattgattggagtatatggccggaaaggcttaccgccttcccatactcag

SEQ ID NO: 5297 - protein, 441 aa, Homo sapiens
MDVKERRPYCSLTKSRREKERRYTNSSADNEECRVPTQKSYSSSETLKAFDHDSSRLLYGNRVKDLVHREADEFTRQGQNFTLRQLGVCEPATRRGLAFCAEMGLPHRGYSISAGSDADTENEAVMSPEHAMRLWGRGVKSGRSSCLSSRSNSALTLTDTEHENKSDSENEQPASNQGQSTLQPLPPSHKQHSAQHHPSITSLNRNSLTNRRNQSPAPPAALPAELQTTPESVQLQDSWVLGSNVPLESRHFLFKTGTGTTPLFSTATPGYTMASGSVYSPPTRPLPRNTLSRSAFKFKKSSKYCSWKCTALCAVGVSVLLAILLSYFIAMHLFGLNWQLQQTENDTFENGKVNSDTMPTNTVSLPSGDNGKLGGFTQENNTIDSGELDIGRRAIQEIPPGIFWRSQLFIDQPQFLKFNISLQKDALIGVYGRKGLPPSHT

SEQ ID NO: 5298 - DNA, 9288 bp, Homo sapiens
atgcagagttccatgaataggccttacatttgcttggaactgggggccgagcaacctgcaagcaatcaaggccagtctaccctgcagcccttgccgccttcccataagcagcactctgcacagcatcatccatccatcacttctctcaacagaaactccctgaccaatagaaggaaccagagtccggccccgccggctgctttgcccgccgagctgcaaaccacacccgagtccgtccagctgcaggacagctgggtccttggcagtaatgtaccactggaaagcagctgtgttgatgtaaaagagcgccctgctcgtccgcttgctgcagccgcccggtctgcagggtccgcggcggcggggagggattctggcgtcctagcgcttctgcaggcccgggtttgggggtggccgctcaggtcagggctaggacccagcactggctttgctggacaggccatcggactgcctcctgggaggtccccaagccaggccacaggcggtcctgctgcaggggtcctaggaggccccgggtgctctgcggaccataaaaataccatggccatgaaaggagctcgcccgccagtgacctgggtcagccaggggctcaggggcggcttccctatggcactcggtgccgccgcaggagctgctgttggaagtggaacctactgctatgtgtttaaaggaaaaataattcatttaataactacaaagagggttttcatgggaccaaagactaaggtaagggactacgtcgttggccatgggcctgcaaacctgtcgctacctgagttttgcgtgtttctctacacgcagctttgccagaatgccactcacgaagcagaaggcaggcttctctccctgggccctgttgctcctctgctgttaccagctcccctcaggttctccacctgctcccagcgtggacatgttcccctttctggagggaagccctttctcccctcacaccatttttctccccagtccactctatttcactcagcagtctgggctttagaaaaccggcatttcctattcaaaacaggaacaggtacaacgccactgttcagtactgcaaccccaggatacacaatggcatctggctctgtttattcaccacctactcggccactacctagaaacaccctatcaagaagtgcttttaaattcaagaagtcttcaaagtcagtgccgttactttatgtattggatctgaagggctttttgacagtggtagtcatcacactgccttcttattcttcctccattgcgctggtaaattccagtacatacacaatgcatctctttggcctcaactggcagctacagcagactgaaaatgacacatttgagaatggaaaagtgaattctgataccatgccaacaaacactgtgtcattaccttctggagacaatgtaaaacctacagacaaccttagtgtttcctatgatcattcccaggttcaggctctagggctttatggaggtagtgatctcagaaaattaggtggatttacgcaagaaaataacaccatagattccggagaacttgatattggccgaagagcaattcaagagattcctcccgggatcttctggagatcacagctcttcattgatcagccacagtttcttaaattcaatatctctcttcagaaggatgcattgattggagtatatggccggaaaggcttaccgccttcccatactcagtatgacttcgtggagctcctggatggcagcaggctgattgccagagagcagcggagcctgcttgagacggagagagccgggcggcaggcgagatccgtcagccttcatgaggccggctttatccagtacttggattctggaatctggcatctggctttttataatgatgggaaaaatgcagagcaggtgtcttttaataccattgttatagagtctgtggtggaatgtccccgaaattgccatggaaatggagaatgcgtttctggaacttgccattgttttccaggatttctgggtccggattgttcaagagccgcctgtccagtgttatgtagtggcaacgggcagtactccaagggccgctgcctgtgtttcagcggctggaagggcaccgagtgtgatgtgccgactacccagtgtattgacccacagtgtgggggtcgtgggatttgtatcatgggctcttgtgcttgcaactcaggatacaaaggagaaagttgtgaagaagctgactgtatagaccctgggtgttctaatcatggtgtgtgtatccacggggaatgtcactgcagtccaggatggggaggtagcaattgtgaaatactgaagaccatgtgtccagaccagtgctccggccacggaacgtatcttcaagaaagtggctcctgcacgtgtgaccctaactggactggcccagactgctcaaacgaaatatgttctgtggactgtggctcacacggcgtttgcatgggggggacgtgtcgctgtgaagaaggctggacgggcccagcctgtaatcagagagcctgccacccccgctgtgccgagcacgggacctgcaaggatggcaagtgtgaatgcagccagggctggaatggagagcactgcactatcgagggttgtcctggtctgtgcaacagcaatggaagatgtaccctggaccaaaatggctggcattgtgtgtgccagcctggatggagaggagcaggctgtgacgtagccatggagactctttgcacagatagcaaggacaatgaaggagatggactcattgactgcatggatcccgattgctgcctacagagttcctgccagaatcagccctattgtcggggactgccggatcctcaggacatcattagccaaagccttcaatcgccttctcagcaagctgccaaatccttttatgatcgaatcagtttccttataggatctgatagcacccatgttatacctggagaaagtcctttcaataagagccttgcatctgtcatcagaggccaagtactgactgctgatggaactccacttattggagtaaatgtctcgtttttccattacccagaatatggatatactattacccgccaggacggaatgtttgacttggtggcaaatggtggggcctctctaactttggtatttgaacgatccccattcctcactcagtatcatactgtgtggattccatggaatgtcttttatgtgatggataccctagtcatgaagaaagaagagaatgatattcccagctgtgatctgagtggattcgtgaggccaaatcccatcattgtgtcatcacctttatccacctttttcagatcttctcctgaagacagtcccatcattcccgaaacacaggtactccacgaggaaactacaattccaggaacagatttgaaactctcctacttgagttccagagctgcagggtataagtcagttctcaagatcaccatgacccagtctattattccatttaatttaatgaaggttcatcttatggtagctgtagtaggaagactcttccaaaagtggtttcctgcctcaccaaacttggcctatactttcatatgggataaaacagatgcatataatcagaaagtctatggtctatctgaagctgttgtgtcagttggatatgagtatgagtcgtgtttggacctgactctgtgggaaaagaggactgccattctgcagggctatgaattggatgcgtccaacatgggtggctggacattagataaacatcacgtgctggatgtacagaacggtatactgtacaagggaaacggggaaaaccagttcatctcccagcagcctccagtcgtgagtagcatcatgggcaatgggcgaaggcgcagcatttcctgccccagttgcaatggtcaagctgatggtaacaagttactggccccagtggcgctagcttgtgggatcgatggcagtctgtacgtaggcgatttcaactatgtgcggcggatattcccttctggaaatgtaacaagtgtcttagaactaagaaataaagattttagacatagcagcaacccagctcatagatactaccttgcaacggatccagtcacgggagatctgtacgtttctgacacaaacacccgcagaatttatcgcccaaagtcacttacgggggcaaaagacttgactaaaaatgcagaagtcgtcgcagggacaggggagcaatgccttccgtttgacgaggcgagatgtggggatggagggaaggccgtggaagccacactcatgagtcccaaaggaatggcagttgataagaatggattaatctactttgttgatggaaccatgattaggaaagttgaccaaaatggaatcatatcaactcttctgggctctaacgatttgacttcagccagacctttaacttgtgacaccagcatgcacatcagccaggtacgtctggaatggcccactgacctagccattaaccctatggataactccatttatgtcctggataataatgtagttttacagatcactgaaaatcgtcaagttcgcattgctgctggacggcccatgcactgtcaggttcccggagtggaatatcctgtggggaagcacgcggtgcagacaacactggaatcagccactgccattgctgtgtcctacagtggggtcctgtacattactgaaactgatgagaagaaaattaaccggataaggcaggtcacaacagatggagaaatctccttagtggccggaataccttcagagtgtgactgcaaaaatgatgccaactgtgactgttaccagagtggagatggctacgccaaggatgccaaactcagtgccccatcctccctggctgcttctccagatggtacactgtatattgcagatctagggaatatccggatccgggctgtgtcaaagaataagcctttacttaactctatgaacttctatgaagttgcgtctccaactgatcaagaactctacatctttgacatcaatggtactcaccaatatactgtaagtttagtcactggtgattacctttacaattttagctacagcaatgacaatgatattactgctgtgacagacagcaatggcaacacccttagaattagacgggacccaaatcgcatgccagttcgagtggtgtctcctgataaccaagtgatatggttgacaataggaacaaatggatgtttgaaaagcatgactgctcaaggactggaattagttttgtttacttaccatggcaatagtggccttttagccactaaaagtgatgaaactggatggacaacgttttttgactatgacagtgaaggtcgtctgacaaatgttacgtttccaactggagtggtcacaaacctgcatggggacatggacaaggctatcacagtggacattgagtcatctagccgagaagaagatgtcagcatcacttcaaatctgtcctcgatcgattctttctacaccatggttcaagatcagttaagaaacagctaccagattggttatgacggctccctcagaattatctacgccagtggcctggactcacactaccaaacagagccgcacgttctggctggcaccgctaatccgacggttgccaaaagaaacatgactttgcctggcgagaacggtcaaaacttggtggaatggagattccgaaaagagcaagcccaagggaaagtcaatgtctttggccgcaagctcagggttaatggcagaaacctcctttcagttgactttgatcgaacaacaaagacagaaaagatctatgacgaccaccgtaaatttctactgaggatcgcctacgacacgtctgggcacccgactctctggctgccaagcagcaagctgatggccgtcaatgtcacctattcatccacaggtcaaattgccagcatccagcgaggcaccactagcgagaaagtagattatgacggacaggggaggatcgtgtctcgggtctttgctgatggtaaaacatggagttacacatatttagaaaagtccatggttcttctgcttcatagccagcggcagtacatcttcgaatacgatatgtgggaccgcctgtctgccatcaccatgcccagtgtggctcgccacaccatgcagaccatccgatccattggctactaccgcaacatatacaaccccccggaaagcaacgcctccatcatcacggactacaacgaggaagggctgcttctacaaacagctttcttgggtacaagtcggagggtcttattcaaatacagaaggcagactaggctctcagaaattttatatgatagcacaagagtcagttttacctatgatgaaacagcaggagtcctaaagacagtaaacctccagagtgatggttttatttgcaccattagatacaggcaaattggtcccctgattgacaggcagattttccgctttagtgaagatgggatggtaaatgcaagatttgactatagctatgacaacagctttcgagtgaccagcatgcagggtgtgatcaatgaaacgccactgcctattgatctgtatcagtttgatgacatttctggcaaagttgagcagtttggaaagtttggagttatatattatgatattaaccagatcatttctacagctgtaatgacctatacgaagcactttgatgctcatggccgtatcaaggagattcaatatgagatattcaggtcgctcatgtactggattacaattcagtatgataacatgggtcgggtaaccaagagagagattaaaatagggccctttgccaacaccaccaaatatgcttatgaatatgatgttgatggacagctccaaacagtttacctcaatgaaaagataatgtggcggtacaactacgatctgaatggaaacctccatttactgaacccaagtaacagtgcgcgtctgacaccccttcgctatgacctgcgagacagaatcactcgactgggtgatgttcaatatcggttggatgaagatggtttcctacgtcaaaggggcacggaaatctttgaatatagctccaaggggcttctaactcgagtttacagtaaaggcagtggctggacagtgatctaccgttatgacggcctgggaaggcgtgtttctagcaaaaccagtctaggacagcacctgcagtttttttatgctgacttaacttatcccactaggattactcatgtctacaaccattcgagttcagaaattacctccctgtattatgatctccaaggacatctttttgccatggaaatcagcagtggggatgaattctatattgcatcggataacacagggacaccactggctgtgttcagtagcaatgggcttatgctgaaacagattcagtacactgcatatggggaaatctattttgactctaatattgactttcaactggtaattggatttcatggtggcctgtatgacccactcaccaaattaatccactttggagaaagagattatgacattttggcaggacggtggacaacacctgacatagaaatctggaaaagaattgggaaggacccagctccttttaacttgtacatgtttaggaataacaaccctgcaagcaaaatccatgacgtgaaagattacatcacagatgttaacagctggctggtgacatttggtttccatctgcacaatgctattcctggattccctgttcccaaatttgatttaacagaaccttcttacgaacttgtgaagagtcagcagtgggatgatataccgcccatcttcggagtccagcagcaagtggcgcggcaggccaaggccttcctgtcgctggggaagatggccgaggtgcaggtgagccggcgccgggccggcggcgcgcagtcctggctgtggttcgccacggtcaagtcgctgatcggcaagggcgtcatgctggccgtcagccagggccgcgtgcagaccaacgtgctcaacatcgccaacgaggactgcatcaaggtggcggccgtgctcaacaacgccttctacctggagaacctgcacttcaccatcgagggcaaggacacgcactacttcatcaagaccaccacgcccgagagcgacctgggcacgctgcggttgaccagcggccgcaaggcgctggagaacggcatcaacgtgacggtgtcgcagtccaccacggtggtgaacggcaggacgcgcaggttcgcggacgtggagatgcagttcggcgcgctggcgctgcacgtgcgctacggcatgaccctggacgaggagaaggcgcgcatcctggagcaggcgcggcagcgcgcgctcgcccgggcctgggcgcgcgagcagcagcgcgtgcgcgacggcgaggagggcgcgcgcctctggacggagggcgagaagcggcagctgctgagcgccggcaaggtgcagggctacgacgggtactacgtactctcggtggagcagtaccccgagctggccgacagcgccaacaacatccagttcctgcggcagagcgagatcggcaggaggtaacgcccgggccgcgcccgccgagccgctcacgccctgcccacattgtcctgtggcacaacccgagtgggactctccaacgcccaagagccttcctcccgggggaatgagactgctgttacgacccacacccacaccgcgaaaacaaggaccgcttttttccgaatgaccttaaaggtgatcggctttaacgaatatgtttacatatgcatagcgctgcactcagtcggactgaacgtagccagaggaaaaaaaaatcatcaaggacaaaggcctcgacctgttgcgctgggccgtctgttccttctaggcactgtatttaactaactttaaaaaagaaaaaaaaatgtgtacagtgtttccaaatagtcccgaattgtcgacctttgcttacaagaagtagtctgtctgcataggatgtgatagctatctctgttcattttacaatgtggggcaaagttactgtttctagacaacccaactgctttccctgtgcagctttgtagaaggacattggcacagtgacttctgcggcggggatttattaatggattttacaatgctaacgtggtttcccttcggggaaaaaactggcaactagaatccttgtcactgataagcaaaggaaatcctgatttttttgtaaattatgtgagacaagttgtttatggatttttatatgaattacaatttactgtacatcaaatcttagtctcagaggagttaatttatgtaaagtgtttaaaaatttatacttaaaaataaaatgataaaaacgtg

SEQ ID NO: 5299 - protein, 2836 aa, Homo sapiens
MQSSMNRPYICLELGAEQPASNQGQSTLQPLPPSHKQHSAQHHPSITSLNRNSLTNRRNQSPAPPAALPAELQTTPESVQLQDSWVLGSNVPLESSCVDVKERPARPLAAAARSAGSAAAGRDSGVLALLQARVWGWPLRSGLGPSTGFAGQAIGLPPGRSPSQATGGPAAGVLGGPGCSADHKNTMAMKGARPPVTWVSQGLRGGFPMALGAAAGAAVGSGTYCYVFKGKIIHLITTKRVFMGPKTKVRDYVVGHGPANLSLPEFCVFLYTQLCQNATHEAEGRLLSLGPVAPLLLPAPLRFSTCSQRGHVPLSGGKPFLPSHHFSPQSTLFHSAVWALENRHFLFKTGTGTTPLFSTATPGYTMASGSVYSPPTRPLPRNTLSRSAFKFKKSSKSVPLLYVLDLKGFLTVVVITLPSYSSSIALVNSSTYTMHLFGLNWQLQQTENDTFENGKVNSDTMPTNTVSLPSGDNVKPTDNLSVSYDHSQVQALGLYGGSDLRKLGGFTQENNTIDSGELDIGRRAIQEIPPGIFWRSQLFIDQPQFLKFNISLQKDALIGVYGRKGLPPSHTQYDFVELLDGSRLIAREQRSLLETERAGRQARSVSLHEAGFIQYLDSGIWHLAFYNDGKNAEQVSFNTIVIESVVECPRNCHGNGECVSGTCHCFPGFLGPDCSRAACPVLCSGNGQYSKGRCLCFSGWKGTECDVPTTQCIDPQCGGRGICIMGSCACNSGYKGESCEEADCIDPGCSNHGVCIHGECHCSPGWGGSNCEILKTMCPDQCSGHGTYLQESGSCTCDPNWTGPDCSNEICSVDCGSHGVCMGGTCRCEEGWTGPACNQRACHPRCAEHGTCKDGKCECSQGWNGEHCTIEGCPGLCNSNGRCTLDQNGWHCVCQPGWRGAGCDVAMETLCTDSKDNEGDGLIDCMDPDCCLQSSCQNQPYCRGLPDPQDIISQSLQSPSQQAAKSFYDRISFLIGSDSTHVIPGESPFNKSLASVIRGQVLTADGTPLIGVNVSFFHYPEYGYTITRQDGMFDLVANGGASLTLVFERSPFLTQYHTVWIPWNVFYVMDTLVMKKEENDIPSCDLSGFVRPNPIIVSSPLSTFFRSSPEDSPIIPETQVLHEETTIPGTDLKLSYLSSRAAGYKSVLKITMTQSIIPFNLMKVHLMVAVVGRLFQKWFPASPNLAYTFIWDKTDAYNQKVYGLSEAVVSVGYEYESCLDLTLWEKRTAILQGYELDASNMGGWTLDKHHVLDVQNGILYKGNGENQFISQQPPVVSSIMGNGRRRSISCPSCNGQADGNKLLAPVALACGIDGSLYVGDFNYVRRIFPSGNVTSVLELRNKDFRHSSNPAHRYYLATDPVTGDLYVSDTNTRRIYRPKSLTGAKDLTKNAEVVAGTGEQCLPFDEARCGDGGKAVEATLMSPKGMAVDKNGLIYFVDGTMIRKVDQNGIISTLLGSNDLTSARPLTCDTSMHISQVRLEWPTDLAINPMDNSIYVLDNNVVLQITENRQVRIAAGRPMHCQVPGVEYPVGKHAVQTTLESATAIAVSYSGVLYITETDEKKINRIRQVTTDGEISLVAGIPSECDCKNDANCDCYQSGDGYAKDAKLSAPSSLAASPDGTLYIADLGNIRIRAVSKNKPLLNSMNFYEVASPTDQELYIFDINGTHQYTVSLVTGDYLYNFSYSNDNDITAVTDSNGNTLRIRRDPNRMPVRVVSPDNQVIWLTIGTNGCLKSMTAQGLELVLFTYHGNSGLLATKSDETGWTTFFDYDSEGRLTNVTFPTGVVTNLHGDMDKAITVDIESSSREEDVSITSNLSSIDSFYTMVQDQLRNSYQIGYDGSLRIIYASGLDSHYQTEPHVLAGTANPTVAKRNMTLPGENGQNLVEWRFRKEQAQGKVNVFGRKLRVNGRNLLSVDFDRTTKTEKIYDDHRKFLLRIAYDTSGHPTLWLPSSKLMAVNVTYSSTGQIASIQRGTTSEKVDYDGQGRIVSRVFADGKTWSYTYLEKSMVLLLHSQRQYIFEYDMWDRLSAITMPSVARHTMQTIRSIGYYRNIYNPPESNASIITDYNEEGLLLQTAFLGTSRRVLFKYRRQTRLSEILYDSTRVSFTYDETAGVLKTVNLQSDGFICTIRYRQIGPLIDRQIFRFSEDGMVNARFDYSYDNSFRVTSMQGVINETPLPIDLYQFDDISGKVEQFGKFGVIYYDINQIISTAVMTYTKHFDAHGRIKEIQYEIFRSLMYWITIQYDNMGRVTKREIKIGPFANTTKYAYEYDVDGQLQTVYLNEKIMWRYNYDLNGNLHLLNPSNSARLTPLRYDLRDRITRLGDVQYRLDEDGFLRQRGTEIFEYSSKGLLTRVYSKGSGWTVIYRYDGLGRRVSSKTSLGQHLQFFYADLTYPTRITHVYNHSSSEITSLYYDLQGHLFAMEISSGDEFYIASDNTGTPLAVFSSNGLMLKQIQYTAYGEIYFDSNIDFQLVIGFHGGLYDPLTKLIHFGERDYDILAGRWTTPDIEIWKRIGKDPAPFNLYMFRNNNPASKIHDVKDYITDVNSWLVTFGFHLHNAIPGFPVPKFDLTEPSYELVKSQQWDDIPPIFGVQQQVARQAKAFLSLGKMAEVQVSRRRAGGAQSWLWFATVKSLIGKGVMLAVSQGRVQTNVLNIANEDCIKVAAVLNNAFYLENLHFTIEGKDTHYFIKTTTPESDLGTLRLTSGRKALENGINVTVSQSTTVVNGRTRRFADVEMQFGALALHVRYGMTLDEEKARILEQARQRALARAWAREQQRVRDGEEGARLWTEGEKRQLLSAGKVQGYDGYYVLSVEQYPELADSANNIQFLRQSEIGRR

SEQ ID NO: 5300 - DNA, 11184 bp, Homo sapiens
atgcagagttccatgaataggccttacatttgcttggaactgggggccgagcaacctgcaagcaatcaaggccagtctaccctgcagcccttgccgccttcccataagcagcactctgcacagcatcatccatccatcacttctctcaacagaaactccctgaccaatagaaggaaccagagtccggccccgccggctgctttgcccgccgagctgcaaaccacacccgagtccgtccagctgcaggacagctgggtccttggcagtaatgtaccactggaaagcagctgtgttgatgtaaaagagcgccctgctcgtccgcttgctgcagccgcccggtctgcagggtccgcggcggcggggagggattctggcgtcctagcgcttctgcaggcccgggtttgggggtggccgctcaggtcagggctaggacccagcactggctttgctggacaggccatcggactgcctcctgggaggtccccaagccaggccacaggcggtcctgctgcaggggtcctaggaggccccgggtgctctgcggaccataaaaataccatggccatgaaaggagctcgcccgccagtgacctgggtcagccaggggctcaggggcggcttccctatggcactcggtgccgccgcaggagctgctgttggaagtggaacctactgctatgtgtttaaaggaaaaataattcatttaataactacaaagagggttttcatgggaccaaagactaaggtaagggactacgtcgttggccatgggcctgcaaacctgtcgctacctgagttttgcgtgtttctctacacgcagctttgccagaatgccactcacgaagcagaaggcaggcttctctccctgggccctgttgctcctctgctgttaccagctcccctcaggttctccacctgctcccagcgtggacatgttcccctttctggagggaagccctttctcccctcacaccatttttctccccagtccactctatttcactcagcagtctgggctttagaaaaccggcatttcctattcaaaacaggaacaggtacaacgccactgttcagtactgcaaccccaggatacacaatggcatctggctctgtttattcaccacctactcggccactacctagaaacaccctatcaagaagtgcttttaaattcaagaagtcttcaaagtcagtgccgttactttatgtattggatctgaagggctttttgacagtggtagtcatcacactgccttcttattcttcctccattgcgctggtaaattccagtacatacacaatgcatctctttggcctcaactggcagctacagcagactgaaaatgacacatttgagaatggaaaagtgaattctgataccatgccaacaaacactgtgtcattaccttctggagacaatgtaaaacctacagacaaccttagtgtttcctatgatcattcccaggttcaggctctagggctttatggaggtagtgatctcagaaaattaggtggatttacgcaagaaaataacaccatagattccggagaacttgatattggccgaagagcaattcaagagattcctcccgggatcttctggagatcacagctcttcattgatcagccacagtttcttaaattcaatatctctcttcagaaggatgcattgattggagtatatggccggaaaggcttaccgccttcccatactcagtatgacttcgtggagctcctggatggcagcaggctgattgccagagagcagcggagcctgcttgagacggagagagccgggcggcaggcgagatccgtcagccttcatgaggccggctttatccagtacttggattctggaatctggcatctggctttttataatgatgggaaaaatgcagagcaggtgtcttttaataccattgttatagagtctgtggtggaatgtccccgaaattgccatggaaatggagaatgcgtttctggaacttgccattgttttccaggatttctgggtccggattgttcaagagccgcctgtccagtgttatgtagtggcaacgggcagtactccaagggccgctgcctgtgtttcagcggctggaagggcaccgagtgtgatgtgccgactacccagtgtattgacccacagtgtgggggtcgtgggatttgtatcatgggctcttgtgcttgcaactcaggatacaaaggagaaagttgtgaagaagctgactgtatagaccctgggtgttctaatcatggtgtgtgtatccacggggaatgtcactgcagtccaggatggggaggtagcaattgtgaaatactgaagaccatgtgtccagaccagtgctccggccacggaacgtatcttcaagaaagtggctcctgcacgtgtgaccctaactggactggcccagactgctcaaacgaaatatgttctgtggactgtggctcacacggcgtttgcatgggggggacgtgtcgctgtgaagaaggctggacgggcccagcctgtaatcagagagcctgccacccccgctgtgccgagcacgggacctgcaaggatggcaagtgtgaatgcagccagggctggaatggagagcactgcactatcgagggttgtcctggtctgtgcaacagcaatggaagatgtaccctggaccaaaatggctggcattgtgtgtgccagcctggatggagaggagcaggctgtgacgtagccatggagactctttgcacagatagcaaggacaatgaaggagatggactcattgactgcatggatcccgattgctgcctacagagttcctgccagaatcagccctattgtcggggactgccggatcctcaggacatcattagccaaagccttcaatcgccttctcagcaagctgccaaatccttttatgatcgaatcagtttccttataggatctgatagcacccatgttatacctggagaaagtcctttcaataagagccttgcatctgtcatcagaggccaagtactgactgctgatggaactccacttattggagtaaatgtctcgtttttccattacccagaatatggatatactattacccgccaggacggaatgtttgacttggtggcaaatggtggggcctctctaactttggtatttgaacgatccccattcctcactcagtatcatactgtgtggattccatggaatgtcttttatgtgatggataccctagtcatgaagaaagaagagaatgatattcccagctgtgatctgagtggattcgtgaggccaaatcccatcattgtgtcatcacctttatccacctttttcagatcttctcctgaagacagtcccatcattcccgaaacacaggtactccacgaggaaactacaattccaggaacagatttgaaactctcctacttgagttccagagctgcagggtataagtcagttctcaagatcaccatgacccagtctattattccatttaatttaatgaaggttcatcttatggtagctgtagtaggaagactcttccaaaagtggtttcctgcctcaccaaacttggcctatactttcatatgggataaaacagatgcatataatcagaaagtctatggtctatctgaagctgttgtgtcagttggatatgagtatgagtcgtgtttggacctgactctgtgggaaaagaggactgccattctgcagggctatgaattggatgcgtccaacatgggtggctggacattagataaacatcacgtgctggatgtacagaacggtatactgtacaagggaaacggggaaaaccagttcatctcccagcagcctccagtcgtgagtagcatcatgggcaatgggcgaaggcgcagcatttcctgccccagttgcaatggtcaagctgatggtaacaagttactggccccagtggcgctagcttgtgggatcgatggcagtctgtacgtaggcgatttcaactatgtgcggcggatattcccttctggaaatgtaacaagtgtcttagaactaagaaataaagattttagacatagcagcaacccagctcatagatactaccttgcaacggatccagtcacgggagatctgtacgtttctgacacaaacacccgcagaatttatcgcccaaagtcacttacgggggcaaaagacttgactaaaaatgcagaagtcgtcgcagggacaggggagcaatgccttccgtttgacgaggcgagatgtggggatggagggaaggccgtggaagccacactcatgagtcccaaaggaatggcagttgataagaatggattaatctactttgttgatggaaccatgattaggaaagttgaccaaaatggaatcatatcaactcttctgggctctaacgatttgacttcagccagacctttaacttgtgacaccagcatgcacatcagccaggtacgtctggaatggcccactgacctagccattaaccctatggataactccatttatgtcctggataataatgtagttttacagatcactgaaaatcgtcaagttcgcattgctgctggacggcccatgcactgtcaggttcccggagtggaatatcctgtggggaagcacgcggtgcagacaacactggaatcagccactgccattgctgtgtcctacagtggggtcctgtacattactgaaactgatgagaagaaaattaaccggataaggcaggtcacaacagatggagaaatctccttagtggccggaataccttcagagtgtgactgcaaaaatgatgccaactgtgactgttaccagagtggagatggctacgccaaggatgccaaactcagtgccccatcctccctggctgcttctccagatggtacactgtatattgcagatctagggaatatccggatccgggctgtgtcaaagaataagcctttacttaactctatgaacttctatgaagttgcgtctccaactgatcaagaactctacatctttgacatcaatggtactcaccaatatactgtaagtttagtcactggtgattacctttacaattttagctacagcaatgacaatgatattactgctgtgacagacagcaatggcaacacccttagaattagacgggacccaaatcgcatgccagttcgagtggtgtctcctgataaccaagtgatatggttgacaataggaacaaatggatgtttgaaaagcatgactgctcaaggactggaattagttttgtttacttaccatggcaatagtggccttttagccactaaaagtgatgaaactggatggacaacgttttttgactatgacagtgaaggtcgtctgacaaatgttacgtttccaactggagtggtcacaaacctgcatggggacatggacaaggctatcacagtggacattgagtcatctagccgagaagaagatgtcagcatcacttcaaatctgtcctcgatcgattctttctacaccatggttcaagatcagttaagaaacagctaccagattggttatgacggctccctcagaattatctacgccagtggcctggactcacactaccaaacagagccgcacgttctggctggcaccgctaatccgacggttgccaaaagaaacatgactttgcctggcgagaacggtcaaaacttggtggaatggagattccgaaaagagcaagcccaagggaaagtcaatgtctttggccgcaagctcagggttaatggcagaaacctcctttcagttgactttgatcgaacaacaaagacagaaaagatctatgacgaccaccgtaaatttctactgaggatcgcctacgacacgtctgggcacccgactctctggctgccaagcagcaagctgatggccgtcaatgtcacctattcatccacaggtcaaattgccagcatccagcgaggcaccactagcgagaaagtagattatgacggacaggggaggatcgtgtctcgggtctttgctgatggtaaaacatggagttacacatatttagaaaagtccatggttcttctgcttcatagccagcggcagtacatcttcgaatacgatatgtgggaccgcctgtctgccatcaccatgcccagtgtggctcgccacaccatgcagaccatccgatccattggctactaccgcaacatatacaaccccccggaaagcaacgcctccatcatcacggactacaacgaggaagggctgcttctacaaacagctttcttgggtacaagtcggagggtcttattcaaatacagaaggcagactaggctctcagaaattttatatgatagcacaagagtcagttttacctatgatgaaacagcaggagtcctaaagacagtaaacctccagagtgatggttttatttgcaccattagatacaggcaaattggtcccctgattgacaggcagattttccgctttagtgaagatgggatggtaaatgcaagatttgactatagctatgacaacagctttcgagtgaccagcatgcagggtgtgatcaatgaaacgccactgcctattgatctgtatcagtttgatgacatttctggcaaagttgagcagtttggaaagtttggagttatatattatgatattaaccagatcatttctacagctgtaatgacctatacgaagcactttgatgctcatggccgtatcaaggagattcaatatgagatattcaggtcgctcatgtactggattacaattcagtatgataacatgggtcgggtaaccaagagagagattaaaatagggccctttgccaacaccaccaaatatgcttatgaatatgatgttgatggacagctccaaacagtttacctcaatgaaaagataatgtggcggtacaactacgatctgaatggaaacctccatttactgaacccaagtaacagtgcgcgtctgacaccccttcgctatgacctgcgagacagaatcactcgactgggtgatgttcaatatcggttggatgaagatggtttcctacgtcaaaggggcacggaaatctttgaatatagctccaaggggcttctaactcgagtttacagtaaaggcagtggctggacagtgatctaccgttatgacggcctgggaaggcgtgtttctagcaaaaccagtctaggacagcacctgcagtttttttatgctgacttaacttatcccactaggattactcatgtctacaaccattcgagttcagaaattacctccctgtattatgatctccaaggacatctttttgccatggaaatcagcagtggggatgaattctatattgcatcggataacacagggacaccactggctgtgttcagtagcaatgggcttatgctgaaacagattcagtacactgcatatggggaaatctattttgactctaatattgactttcaactggtaattggatttcatggtggcctgtatgacccactcaccaaattaatccactttggagaaagagattatgacattttggcaggacggtggacaacacctgacatagaaatctggaaaagaattgggaaggacccagctccttttaacttgtacatgtttaggaataacaaccctgcaagcaaaatccatgacgtgaaagattacatcacagatgttaacagctggctggtgacatttggtttccatctgcacaatgctattcctggattccctgttcccaaatttgatttaacagaaccttcttacgaacttgtgaagagtcagcagtgggatgatataccgcccatcttcggagtccagcagcaagtggcgcggcaggccaaggccttcctgtcgctggggaagatggccgaggtgcaggtgagccggcgccgggccggcggcgcgcagtcctggctgtggttcgccacggtcaagtcgctgatcggcaagggcgtcatgctggccgtcagccagggccgcgtgcagaccaacgtgctcaacatcgccaacgaggactgcatcaaggtggcggccgtgctcaacaacgccttctacctggagaacctgcacttcaccatcgagggcaaggacacgcactacttcatcaagaccaccacgcccgagagcgacctgggcacgctgcggttgaccagcggccgcaaggcgctggagaacggcatcaacgtgacggtgtcgcagtccaccacggtggtgaacggcaggacgcgcaggttcgcggacgtggagatgcagttcggcgcgctggcgctgcacgtgcgctacggcatgaccctggacgaggagaaggcgcgcatcctggagcaggcgcggcagcgcgcgctcgcccgggcctgggcgcgcgagcagcagcgcgtgcgcgacggcgaggagggcgcgcgcctctggacggagggcgagaagcggcagctgctgagcgccggcaaggtgcagggctacgacgggtactacgtactctcggtggagcagtaccccgagctggccgacagcgccaacaacatccagttcctgcggcagagcgagatcggcaggaggtaacgcccgggccgcgcccgccgagccgctcacgccctgcccacattgtcctgtggcacaacccgagtgggactctccaacgcccaagagccttcctcccgggggaatgagactgctgttacgacccacacccacaccgcgaaaacaaggaccgcttttttccgaatgaccttaaaggtgatcggctttaacgaatatgtttacatatgcatagcgctgcactcagtcggactgaacgtagccagaggaaaaaaaaatcatcaaggacaaaggcctcgacctgttgcgctgggccgtctgttccttctaggcactgtatttaactaactttaaaaaagaaaaaaaaatgtgtacagtgtttccaaatagtcccgaattgtcgacctttgcttacaagaagtagtctgtctgcataggatgtgatagctatctctgttcattttacaatgtggggcaaagttactgtttctagacaacccaactgctttccctgtgcagctttgtagaaggacattggcacagtgacttctgcggcggggatttattaatggattttacaatgctaacgtggtttcccttcggggaaaaaactggcaactagaatccttgtcactgataagcaaaggaaatcctgatttttttgtaaattatgtgagacaagttgtttatggatttttatatgaattacaatttactgtacatcaaatcttagtctcagaggagttaatttatgtaaagtgtttaaaaatttatacttaaaaataaaatgataaaaacgtgaactgtgtgatttttttaaaaggattgcaccttttgttatctgttatagctgtacagtatgaattattatattgtagagatataacaacttatgcctataatgtccagaagtgttaatatttttgtattaggttgaaaaaatgtgcaagcttctatcactagatggataggaccgtgcaattctaggtgggtggcgaatcagagagctcctttctcttccctctctcacgcatcaggccagtgtcctcagcattgtcaactgagaggcacagtagacaactagggctggtggaatgtaagggaagaagattgaaaaaacgggaggaagggttctctggccctctctcaaccttgcaagtcaatggggagttgttgatataattaaccccgaggtttttactgttactgttccaaagctctgtctcttgatggaggagagaccacatcagatgctggggaaataggaggaggaaaggttctgatgtagtcgtgatcctaaacacgtgtcttaagatctaggaaagacagcagaaaccgagcagtggtgggtgagccagatggagccggtcagggttactctaagcccacatgaccaaaccatcttggggggctggtttgaatgacagcctctgctctgtctcggggaagccgggggtggcagatccagctggaagtgaactgacagccgcgccctcctgcacacatgcatgcacgcgtgtgggaacgagcccagccgccatctgcacttccgtgtcggctcagctctgacaaatctctttcctgagcactaaattcagccacgaaaatatttttagaagatatttctcagttcatcgagctatagtacacactgttttcctctatgtataatggtgataaaatatagcaagtgaacatgtcgtaaatataaaggttcaagtgatgtattgaaaataattttctaactgctttgtatgtatcacatactctaaattgcacagtaggcgtgtttattaaacagatgattggctgggaaagtttcaaaatagctactgaatttacagtatcagtgctattactgtctttgtgtatttggtagagcataccgaagtaattaatcttctaatgaatgctgatgatattttattagaatgaaagcacagattagcattaatattttttattctggaaatcctttggcaagtattatgaagcccaaatttagaaaactatgagatttcaaaccacataaacatgattctgttttccattttattttttaactgttaggtatttgcagttctgttccgtggaacttctgcaggcctgtatttagcatgctgtaagtacttttgggtgaaataggctctgagtctaaattctcagacatgtttctgatgtattaccatgaaaagcttgtgccacatgacagaagtgagatcatagtcttaacctcttcttgacgtggactggtcttcactcgggcaccgataaataacagatttggagtatctcctggtgcttattttagatgatgaagtcaaatcaacccaattagtgtcctgttagtaggtataatgagcctatttctttctaaaaagacttgtgatctggacatgcttttacaagaaatagtgaccttggggaatatgtaaacaaaagacctttttctaagagttgggagggggtgggggactgtataatgaaaagaattagcttacaaaaaagaaattgatattcaaagtattttaggcaaagccagtcaaaatgctttcatgatattttgagatgtaaattttgtctgatttgtattgttcttttcatttgccttcttaactttatatgtgacctgaattttccataacttgatgactatagattgcacctaggcattccaataaaagccaacccaatgtg

SEQ ID NO: 5301 - protein, 2836 aa, Homo sapiens; identical to SEQ ID NO: 5299

SEQ ID NO: 5302 - DNA, 3999 bp, Homo sapiens
atttctgggtccggattgttcaagagccgcctgtccagtgttatgtagtggcaacgggcagtactccaagggccgctgcctgtgtttcagcggctggaagggcaccgagtgtgatgtgccgactacccagtgtattgacccacagtgtgggggtcgtgggatttgtatcatgggctcttgtgcttgcaactcaggatacaaaggagaaagttgtgaagaagctgactgtatagaccctgggtgttctaatcatggtgtgtgtatccacggggaatgtcactgcagtccaggatggggaggtagcaattgtgaaatactgaagaccatgtgtccagaccagtgctccggccacggaacgtatcttcaagaaagtggctcctgcacgtgtgaccctaactggactggcccagactgctcaaacgaaatatgttctgtggactgtggctcacacggcgtttgcatgggggggacgtgtcgctgtgaagaaggctggacgggcccagcctgtaatcagagagcctgccacccccgctgtgccgagcacgggacctgcaaggatggcaagtgtgaatgcagccagggctggaatggagagcactgcactatcgagggttgtcctggtctgtgcaacagcaatggaagatgtaccctggaccaaaatggctggcattgtgtgtgccagcctggatggagaggagcaggctgtgacgtagccatggagactctttgcacagatagcaaggacaatgaaggagatggactcattgactgcatggatcccgattgctgcctacagagttcctgccagaatcagccctattgtcggggactgccggatcctcaggacatcattagccaaagccttcaatcgccttctcagcaagctgccaaatccttttatgatcgaatcagtttccttataggatctgatagcacccatgttatacctggagaaagtcctttcaataagagccttgcatctgtcatcagaggccaagtactgactgctgatggaactccacttattggagtaaatgtctcgtttttccattacccagaatatggatatactattacccgccaggacggaatgtttgacttggtggcaaatggtggggcctctctaactttggtatttgaacgatccccattcctcactcagtatcatactgtgtggattccatggaatgtcttttatgtgatggataccctagtcatgaagaaagaagagaatgatattcccagctgtgatctgagtggattcgtgaggccaaatcccatcattgtgtcatcacctttatccacctttttcagatcttctcctgaagacagtcccatcattcccgaaacacaggtactccacgaggaaactacaattccaggaacagatttgaaactctcctacttgagttccagagctgcagggtataagtcagttctcaagatcaccatgacccagtctattattccatttaatttaatgaaggttcatcttatggtagctgtagtaggaagactcttccaaaagtggtttcctgcctcaccaaacttggcctatactttcatatgggataaaacagatgcatataatcagaaagtctatggtctatctgaagctgttgtgtcagttggatatgagtatgagtcgtgtttggacctgactctgtgggaaaagaggactgccattctgcagggctatgaattggatgcgtccaacatgggtggctggacattagataaacatcacgtgctggatgtacagaacggtatactgtacaagggaaacggggaaaaccagttcatctcccagcagcctccagtcgtgagtagcatcatgggcaatgggcgaaggcgcagcatttcctgccccagttgcaatggtcaagctgatggtaacaagttactggccccagtggcgctagcttgtgggatcgatggcagtctgtacgtaggcgatttcaactatgtgcggcggatattcccttctggaaatgtaacaagtgtcttagaactaagaaataaagattttagacatagcagcaacccagctcatagatactaccttgcaacggatccagtcacgggagatctgtacgtttctgacacaaacacccgcagaatttatcgcccaaagtcacttacgggggcaaaagacttgactaaaaatgcagaagtcgtcgcagggacaggggagcaatgccttccgtttgacgaggcgagatgtggggatggagggaaggccgtggaagccacactcatgagtcccaaaggaatggcagttgataagaatggattaatctactttgttgatggaaccatgattaggaaagttgaccaaaatggaatcatatcaactcttctgggctctaacgatttgacttcagccagacctttaacttgtgacaccagcatgcacatcagccaggtacgtctggaatggcccactgacctagccattaaccctatggataactccatttatgtcctggataataatgtagttttacagatcactgaaaatcgtcaagttcgcattgctgctggacggcccatgcactgtcaggttcccggagtggaatatcctgtggggaagcacgcggtgcagacaacactggaatcagccactgccattgctgtgtcctacagtggggtcctgtacattactgaaactgatgagaagaaaattaaccggataaggcaggtcacaacagatggagaaatctccttagtggccggaataccttcagagtgtgactgcaaaaatgatgccaactgtgactgttaccagagtggagatggctacgccaaggatgccaaactcagtgccccatcctccctggctgcttctccagatggtacactgtatattgcagatctagggaatatccggatccgggctgtgtcaaagaataagcctttacttaactctatgaacttctatgaagttgcgtctccaactgatcaagaactctacatctttgacatcaatggtactcaccaatatactgtaagtttagtcactggtgattacctttacaattttagctacagcaatgacaatgatattactgctgtgacagacagcaatggcaacacccttagaattagacgggacccaaatcgcatgccagttcgagtggtgtctcctgataaccaagtgatatggttgacaataggaacaaatggatgtttgaaaagcatgactgctcaaggactggaattagttttgtttacttaccatggcaatagtggccttttagccactaaaagtgatgaaactggatggacaacgttttttgagtaagtatatgaaaattctactctgattataaaatactgtgatataataatatcatctataataacaatataatcttaagagctggaggattccatgtttttgagagtctagagcttctgtaatttttggatcccggctgggcacggtggctcattcccgtagtctcagctcctggggaggctgagacgggaggattgcttgagcccaggacttcgaggccacagtgagctatgattgtgccactgcactccaggctgagtgacagagccagaacgtatctctaaagaaaaaaaaatggccgggcgcagtggctcacgcctgtaatcccagcactttgggaggccgaggcgggcggatcacgaggtcagaagatcgagaccatcctggataacacggtgaaacccccgtctctactaaaaatacaaaaaaaatagccgggcgtggtggcgggcgcctgtagtcccagctactcgggaggctgaggcaggagaatggcgtgaacccgggaggcgcagcttgcagtgagccgagatcgcgccactgcactccagtctctgggcgacagagcgagactccgcctcaaaaaaaaaaagatacctctttctgagaaagaagacaaaattgcaagatacaagatgtagggccttggaaagggaagggactcgtgtaagggagaagcccaaagcttaagtttcagt

SEQ ID NO: 5303 - protein, 1044 aa, Homo sapiens
MGSCACNSGYKGESCEEADCIDPGCSNHGVCIHGECHCSPGWGGSNCEILKTMCPDQCSGHGTYLQESGSCTCDPNWTGPDCSNEICSVDCGSHGVCMGGTCRCEEGWTGPACNQRACHPRCAEHGTCKDGKCECSQGWNGEHCTIEGCPGLCNSNGRCTLDQNGWHCVCQPGWRGAGCDVAMETLCTDSKDNEGDGLIDCMDPDCCLQSSCQNQPYCRGLPDPQDIISQSLQSPSQQAAKSFYDRISFLIGSDSTHVIPGESPFNKSLASVIRGQVLTADGTPLIGVNVSFFHYPEYGYTITRQDGMFDLVANGGASLTLVFERSPFLTQYHTVWIPWNVFYVMDTLVMKKEENDIPSCDLSGFVRPNPIIVSSPLSTFFRSSPEDSPIIPETQVLHEETTIPGTDLKLSYLSSRAAGYKSVLKITMTQSIIPFNLMKVHLMVAVVGRLFQKWFPASPNLAYTFIWDKTDAYNQKVYGLSEAVVSVGYEYESCLDLTLWEKRTAILQGYELDASNMGGWTLDKHHVLDVQNGILYKGNGENQFISQQPPVVSSIMGNGRRRSISCPSCNGQADGNKLLAPVALACGIDGSLYVGDFNYVRRIFPSGNVTSVLELRNKDFRHSSNPAHRYYLATDPVTGDLYVSDTNTRRIYRPKSLTGAKDLTKNAEVVAGTGEQCLPFDEARCGDGGKAVEATLMSPKGMAVDKNGLIYFVDGTMIRKVDQNGIISTLLGSNDLTSARPLTCDTSMHISQVRLEWPTDLAINPMDNSIYVLDNNVVLQITENRQVRIAAGRPMHCQVPGVEYPVGKHAVQTTLESATAIAVSYSGVLYITETDEKKINRIRQVTTDGEISLVAGIPSECDCKNDANCDCYQSGDGYAKDAKLSAPSSLAASPDGTLYIADLGNIRIRAVSKNKPLLNSMNFYEVASPTDQELYIFDINGTHQYTVSLVTGDYLYNFSYSNDNDITAVTDSNGNTLRIRRDPNRMPVRVVSPDNQVIWLTIGTNGCLKSMTAQGLELVLFTYHGNSGLLATKSDETGWTTFFE

SEQ ID NO: 5304 - DNA, 513 bp, Homo sapiens
ctctatcacaatgtcgtctcttggagatttagaaaaaaaaagaaaaaaaaaaaggtgttttttccccccagtagaaaaaactgatgaaaggagctcagaaccagacacttcgttctccaaagccaccaggcagttccaccttcttttacatggcttctacatggattccgtaggaaagcacaaggcagatctacagattactctaaatgccaaggctaattcttggccttaactgtttttcaaaatacattcagatacacagccatccctggaacataacaaatgaggctgtggaacactgagcgaaagacgaatttggctcagagtgcagatctgccattgctctcaatgctggctgcaaggaagcggaacccaaggctccatgtcctttttttgatgaaattggtgtatgtaaagacaagcaaatacgaaagaagaatttgaaggacagacaaactgcaacatcaacatagattacaacatcaaaataaacattatctttgtagtagtttt

SEQ ID NO: 5305 - protein, 53 aa, Homo sapiens
MRLWNTERKTNLAQSADLPLLSMLAARKRNPRLHVLFLMKLVYVKTSKYERRI

SEQ ID NO: 5306 - DNA, 6371 bp, Homo sapiens
tcatttgctgattgtgttggggatgagctgccgtggggatgggaagcagggtttgaccctcagattggtgtctactacatcgatcacatcaacaaaaccacgcagatagaagatccaagaaaacaatggaggggggaacaggagaagatgctcaaggactacctctctgtggcacaggatgccctccggacacagaaggaactgtaccatgtgaaggagcagaggctggcgctggccctggatgaatacgtgcgattaaatgatgcctataaggaaaagtcaagttctcacacaagcttattctcaggatcttcatccagtactaaatatgatcccgatattttaaaagctgagatctccactacaagattaaggaattgataaaaaaatgtctggaggccagagcgggtatgaactcagtgaagccaaagccattctaacagaactaaaatctatcagaaaggcaattagctcaggagaaaaagaaaaacaagatctgatgcagagtcttgctaagctgcaggagcggtttcatttggatcagaacattggcagatctgagccagatttgagatgtagtcctgtgaactctcatttatgtctctccagacagacccttgatgctgggtcacaaacaagcatttccggagatattggagtaagaagtagatcaaatttagctgaaaaggtcaggctaagcctacagtatgaagaagccaaaagaagtatggccaacttaaaaattgaactgtcaaaattggacagtgaggcctggcctggggcactggatattgagaaggaaaaactgatgctgattaatgaaaaagaagaacttttgaaagagcttcagttcgtcaccccacagaaacgtacccaagatgaattagaacgcctagaagctgaaaggcagcggctggaagaagagttgctgtctgtgaggggaacaccaagcagagctctggccgagagattgagattggaagagagaagaaaagagctgctacagaaacttgaagaaactactaaattaactacttatttgcattcacaacttaaaagcctctctgccagcaccctgtccatgtcatctgggagcagcctgggttccctggcatcgagtcggggctctctgaacacctccagcagagggtcactcaactccctcagttccaccgaactctattacagcagtcaaagtgatcagatagatgtggattatcagtataaactggacttccttctgcaagagaaaagcggttacattccttctggacccatcaccaccatccatgaaaacgaggtggtcaagtcccctagccagcctggccagagtggactctgtggagtggcagctgcagcaacaggccacactcctccactggctgaggccccgaagtctgtggcctccctgtcctcgaggtcctccctttcctccttgtctcctccaggctctcccttggttttggaaggcacgtttcccatgtcttcttctcatgatgcctctctccatcagttcactgctgactttgaagactgtgagttgagtagccattttgcagatatcagcctcatcgaaaatcagattttgctggattctgattcaggaggagcctcccagtctctttcagaggataaagaccttaatgaatgtgctagggagccattatatgaaggaactgcagatgtggaaaaatcattaccaaaaagaagagtgatccacttgcttggggagaaaaccacttgtgtgtcggctgctgtgtctgatgagtctgtggctggagacagtggggtctatgaagctttcgtgaaacaacctagtgaaatggaagatgtcacatacagtgaagaggatgtagccattgtagagaccgcccaggttcagataggactcagatacaatgcaaaaagttcaagtttcatggtgattatagcacagctccgaaaccttcatgccttcttgatacctcatacttcaaaagtatattttagggttgccgttcttccttcctcaactgatgtcagctgtctgtttcgcacaaaagttcatccgcccacagaatccattttattcaatgatgtgttcagagtcgccatttcccaaacagccttacaacagaagacactgagggtagacctttgctctgtcagtaaacaccgaagggaagaatgcctggctggaactcagatcagcctggcagatttaccattttccagtgaggttttcactctatggtataacttgcttccttccaagcaaatgccttgcaaaaagaatgaagaaaatgaggactctgtatttcaaccaaaccagccgttagtagattctatagacttggatgcagtgtcagccttacttgcaagaacatcagctgagttgttagctgtggaacaagaattagcacaagaagaagaagaagaatcaggacaagaagagccaaggggcccagatggagactggctaacaatgctaagagaggcctctgatgaaattgtggctgaaaaagaggctgaagttaaattgccagaggacagtagctgtacagaagatttaagttcatgcactagtgtgcctgagatgaatgaagacgggaacaggaaagaaagcaactgtgccaaagacctcagaagtcagccacctactagaataccaacactggttgacaaagagacaaacactgatgaagccgctaatgacaatatggcagttcgccccaaagagcgcagcagcctgagctctagacagcatccgtttgtgaggagcagtgtgatagtgcgctcacagaccttttctccaggagagcggaaccagtacatctgcaggttaaatcggagtgacagtgacagttcaaccctggctaaaaaatcactgtttgtgagaaactccaccgaacgccgcagtttgagggtcaaaaggacggtttgccagtcagtccttagaagaacaacacaggaatgcccagtgcggacatctctagacttagaactggaccttcaggcatctctgacccggcagagccgcctcaatgatgagctgcaggcgctgagggacttgcggcagaagctggaggaactgaaagctcagggagagactgaccttccaccaggcgtgctggaggatgagaggttccagaggcttctgaagcaagctgagaagcaggctgaacagtccaaagaagagcagaagcaaggtctgaatgcagagaagttgatgaggcaagtctccaaggacgtgtgtcggctccgggagcagagccagaaggtgcctcggcaggtgcagtccttcagggagaagattgcctacttcaccagagcaaagataagcatcccatccctgccagctgatgatgtgtgattacatgacttaagaaattattttttcatctgttcactttcttagggagggtaaaagactgaagatttgtgtttttgttttggtgtttggttttttttggtaacgtaactgtcaactcttgaagaacttttatttcacatcagattttcaacacattaatttgtaaagtaccttgagtgtaatttttatatgcttaaaaaagaaaaaatcatataagaaagatgggataacctggtacacaaatgttgcccagtatgtgcgcattgccagtggacttcattttgtaaaaatggaatagaggcagtaccccacatgtgtactgttgagccggctgttgagaaacaacttggttcagccggtggttttgcttctcctttgtgttcctgtgagtaggctgtgccgatggcagcagcgccacgtggtatctgtgcgctggcgaggagaggagcgctttccatttggaggcagtgtgagcacacgctggagtgcagcgttccaaagtccgcccgaaatggatgctgcgtccacggccatcacctgtgcgggaacacctggtttccttaagacaatttcctttttgtccttttatatttttctaaagaaaactaagatataaactaccaagtgctcttaagaataaaaataagaataagaatacaaaggagcactactcttggctacacgaaagatcttgggattcatgacactgagggcagggagaagaaagaacaccagccacgcagagatacaaataagctcatcaaatgagcagctggtttgtctcactcagcctgaatttgcattaagtgttcaaaagtgagtttctggcttgcactagtgttttgccctaaatctaaggatggtgcctagtggtggccctgtgttctgaggacagagagagctggaggggtggagggaaatgcatcggcactcatttggtgtaaccaagaagagggggaaagatgtcttgatagaatcaaagttgccaaaaacaaagaagagtttatcaagcagatttctaacatttagtagaaactacttcatagctctcatttttagggggttctatctataatttatggtaaatagttgggaggcaaagggaagaatgtgtgtggggggattattaatttgaagtataagctaaattgtttattaaaaagcctattttggatgaacaagtttagagagataaactgactaatgtgtcctccagtttagaatttcaccttacccgacccaggcacttcttaaaaacacagatcctcagtgcagctctgccagcatcaaggcttttaaaatatgtagtatttaggccatttaaaccatacttattactcaataacccaagaaacaattttgggttagccatctaatatagcaaataaaatagattttttaaagaaatccaaaattgtcttaaaggaatggaccccttgaagaaaaaaaaaaaaagttttgttcctcagttagaatgctcactagctcactagcaagaatttttattttcttgaaagcaattatatatattttggaaagttcatgttattggaattgaagttcaaattaagcaacttctgagcctagaactttaattactttttcctaaatgtcccaacacttacatacaaatttctttgaagacataactggacatggcagacactgctttgaacaaaaaccagcctagtgaattgactgagtacagtcctttaaggctgcccagttcattctattagatgactaaggaaaactagaaaaagaatacagttcacccttgtcaaggtcaaatgtgaaagacagaagtttatttaatgtagaggtaaatgaaggtgagctgttttcagcatcttagtttgaccatgaaaatgtctatagaattatgtgtagttgttccgtacgattttattttcttcatttatttatttacagtcttatttatgttctgtttaatatatagtttgattctggccattttaaatatttgacacagaagagactatattggaatatttacagctttataagtctttcatcagattagctgttgactttttgtaatacaaaaagtttcagacaagtattaaagaataaaatctgtctcaggctggtagttagcagttgtgaccaagatgcttttggttgttgtatttcacaaaatttcctcatttctaacatgagagatgaacttattttaatataatcctttttctacactttaaaagtcagcaatagtgttatgtatttataggcagcttttaataatcttgtcatatttgtactaacccaaatgattcacagtgacaaaacattttaataacttgatcacaaaaccatatggacaaatatgaattttaatattataaatactatttttaaaaggtagaatttattcgcacagggtaaaaagaatgtaatatttagttctcaagtttgaattatcagtatattattacaattttgtatatcagaatcttaagtgttacaggtacaaaaagaatattgctagccaaatgaacaaagtttagctaaatctctgtagcatgcaaatcaaataaattaaaattttttgctattgctttatctatattgtcttaaatatcaaaagctcaggactgaacttaatatttaatcaggttaaattctgaacatgtttctgttttaatttgtcttgtttgtaaacgtatgcaaatacatcacatagattaactggtttctgcactttccatgtgtttgtgggtggaaaaaaattcagtggttttttttaaaaaaaaaagcaaaaacaaagctacatattgcctaatactctatttcagtgtcgtttattgttcagtttatttccctgattggcacaaacacaagagtttccttgaaccatgtaccaagcaaatacaaaatatttcatgaagaaatccccaggctggcagtttgtgatgaatagttcttgttggaactatatgtattgctgataaaaaaggacgaagtattttcattgagcaaataaaatgaagggctccag

SEQ ID NO: 5307 - protein, 987 aa, Homo sapiens
MSGGQSGYELSEAKAILTELKSIRKAISSGEKEKQDLMQSLAKLQERFHLDQNIGRSEPDLRCSPVNSHLCLSRQTLDAGSQTSISGDIGVRSRSNLAEKVRLSLQYEEAKRSMANLKIELSKLDSEAWPGALDIEKEKLMLINEKEELLKELQFVTPQKRTQDELERLEAERQRLEEELLSVRGTPSRALAERLRLEERRKELLQKLEETTKLTTYLHSQLKSLSASTLSMSSGSSLGSLASSRGSLNTSSRGSLNSLSSTELYYSSQSDQIDVDYQYKLDFLLQEKSGYIPSGPITTIHENEVVKSPSQPGQSGLCGVAAAATGHTPPLAEAPKSVASLSSRSSLSSLSPPGSPLVLEGTFPMSSSHDASLHQFTADFEDCELSSHFADISLIENQILLDSDSGGASQSLSEDKDLNECAREPLYEGTADVEKSLPKRRVIHLLGEKTTCVSAAVSDESVAGDSGVYEAFVKQPSEMEDVTYSEEDVAIVETAQVQIGLRYNAKSSSFMVIIAQLRNLHAFLIPHTSKVYFRVAVLPSSTDVSCLFRTKVHPPTESILFNDVFRVAISQTALQQKTLRVDLCSVSKHRREECLAGTQISLADLPFSSEVFTLWYNLLPSKQMPCKKNEENEDSVFQPNQPLVDSIDLDAVSALLARTSAELLAVEQELAQEEEEESGQEEPRGPDGDWLTMLREASDEIVAEKEAEVKLPEDSSCTEDLSSCTSVPEMNEDGNRKESNCAKDLRSQPPTRIPTLVDKETNTDEAANDNMAVRPKERSSLSSRQHPFVRSSVIVRSQTFSPGERNQYICRLNRSDSDSSTLAKKSLFVRNSTERRSLRVKRTVCQSVLRRTTQECPVRTSLDLELDLQASLTRQSRLNDELQALRDLRQKLEELKAQGETDLPPGVLEDERFQRLLKQAEKQAEQSKEEQKQGLNAEKLMRQVSKDVCRLREQSQKVPRQVQSFREKIAYFTRAKISIPSLPADDV

SEQ ID NO: 5308 - DNA, 5097 bp, Homo sapiens
agtgtggcctgggctgactaatgtacactctctacacccctaagaaaggggttgtggaactctgagtgggctgtggaagtattttcagaaaccacgcagatagaagatccaagaaaacaatggaggggggaacaggagaagatgctcaaggactacctctctgtggcacaggatgccctccggacacagaaggaactgtaccatgtgaaggagcagaggctggcgctggccctggatgaatacgtgcgattaaatgatgcctataaggaaaagtcaagttctcacacaagcttattctcaggatcttcatccagtactaaatatgatcccgatattttaaaagctgagatctccactacaagattaagggttaaaaagctaaagagagagctctcacagatgaagcaggaactgctctataaagaacaaggctttgaaacattgcagcaaattgataaaaaaatgtctggaggccagagcgggtatgaactcagtgaagccaaagccattctaacagaactaaaatctatcagaaaggcaattagctcaggagaaaaagaaaaacaagatctgatgcagagtcttgctaagctgcaggagcggtttcatttggatcagaacattggcagatctgagccagatttgagatgtagtcctgtgaactctcatttatgtctctccagacagacccttgatgctgggtcacaaacaagcatttccggagatattggagtaagaagtagatcaaatttagctgaaaaggtcaggctaagcctacagtatgaagaagccaaaagaagtatggccaacttaaaaattgaactgtcaaaattggacagtgaggcctggcctggggcactggatattgagaaggaaaaactgatgctgattaatgaaaaagaagaacttttgaaagagcttcagttcgtcaccccacagaaacgtacccaagatgaattagaacgcctagaagctgaaaggcagcggctggaagaagagttgctgtctgtgaggggaacaccaagcagagctctggccgagagattgagattggaagagagaagaaaagagctgctacagaaacttgaagaaactactaaattaactacttatttgcattcacaacttaaaagcctctctgccagcaccctgtccatgtcatctgggagcagcctgggttccctggcatcgagtcggggctctctgaacacctccagcagagggtcactcaactccctcagttccaccgaactctattacagcagtcaaagtgatcagatagatgtggattatcagtataaactggacttccttctgcaagagaaaagcggttacattccttctggacccatcaccaccatccatgaaaacgaggtggtcaagtcccctagccagcctggccagagtggactctgtggagtggcagctgcagcaacaggccacactcctccactggctgaggccccgaagtctgtggcctccctgtcctcgaggtcctccctttcctccttgtctcctccaggctctcccttggttttggaaggcacgtttcccatgtcttcttctcatgatgcctctctccatcagttcactgctgactttgaagactgtgagttgagtagccattttgcagatatcagcctcatcgaaaatcagattttgctggattctgattcaggaggagcctcccagtctctttcagaggataaagaccttaatgaatgtgctagggagccattatatgaaggaactgcagatgtggaaaaatcattaccaaaaagaagagtgatccacttgcttggggagaaaaccacttgtgtgtcggctgctgtgtctgatgagtctgtggctggagacagtggggtctatgaagctttcgtgaaacaacctagtgaaatggaagatgtcacatacagtgaagaggatgtagccattgtagagaccgcccaggttcagataggactcagatacaatgcaaaaagttcaagtttcatggtgattatagcacagctccgaaaccttcatgccttcttgatacctcatacttcaaaagtatattttagggttgccgttcttccttcctcaactgatgtcagctgtctgtttcgcacaaaagttcatccgcccacagaatccattttattcaatgatgtgttcagagtcgccatttcccaaacagccttacaacagaagacactgaggaagaactttacctttgtgacagctatcactcatggagtgtgcttaccactcccagtaccaatgccaagctttgcgtgactgctgtgtatatattatctcatttaatcctcatgacaacctgatgaaagattggttatgaaatggatgattatccactattttcagataaggagctgcttagagagtattggagctttcgggaagatgtgatgttactgtttaaagcaatatgacatttaaatgctacagcagaagacttcacagttaactaattgctggaactcagatcagcctggcagatttaccattttccagtgaggttttcactctatggtataacttgcttccttccaagcaaatgccttgcaaaaagaatgaagaaaatgaggactctgtatttcaaccaaaccagccgttagtagattctatagacttggatgcagtgtcagccttacttgcaagaacatcagctgagttgttagctgtggaacaagaattagcacaagaagaagaagaagaatcaggacaagaagagccaaggggcccagatggagactggctaacaatgctaagagaggcctctgatgaaattgtggctgaaaaagaggctgaagttaaattgccagaggacagtagctgtacagaagatttaagttcatgcactagtgtgcctgagatgaatgaagacgggaacaggaaagaaagcaactgtgccaaagacctcagaagtcagccacctactagaataccaacactggttgacaaagagacaaacactgatgaagccgctaatgacaatatggcagttcgccccaaagagcgcagcagcctgagctctagacagcatccgtttgtgaggagcagtgtgatagtgcgctcacagaccttttctccaggagagcggaaccagtacatctgcaggttaaatcggagtgacagtgacagttcaaccctggctaaaaaatcactgtttgtgagaaactccaccgaacgccgcagtttgagggtcaaaaggacggtttgccagtcagtccttagaagaacaacacaggaatgcccagtgcggacatctctagacttagaactggaccttcaggcatctctgacccggcagagccgcctcaatgatgagctgcaggcgctgagggacttgcggcagaagctggaggaactgaaagctcagggagagactgaccttccaccaggcgtgctggaggatgagaggttccagaggcttctgaagcaagctgagaagcaggctgaacagtccaaagaagagcagaagcaaggtctgaatgcagagaagttgatgaggcaagtctccaaggacgtgtgtcggctccgggagcagagccagaaggtgcctcggcaggtgcagtccttcagggagaagattgcctacttcaccagagcaaagataagcatcccatccctgccagctgatgatgtgtgattacatgacttaagaaattattttttcatctgttcactttcttagggagggtaaaagactgaagatttgtgtttttgttttggtgtttggttttttttggtaacgtaactgtcaactcttgaagaacttttatttcacatcagattttcaacacattaatttgtaaagtaccttgagtgtaatttttatatgcttaaaaaagaaaaaatcatataagaaagatgggataacctggtacacaaatgttgcccagtatgtgcgcattgccagtggacttcattttgtaaaaatggaatagaggcagtaccccacatgtgtactgttgagccggctgttgagaaacaacttggttcagccggtggttttgcttctcctttgtgttcctgtgagtaggctgtgccgatggcagcagcgccacgtggtatctgtgcgctggcgaggagaggagcgctttccatttggaggcagtgtgagcacacgctggagtgcagcgttccaaagtccgcccgaaatggatgctgcgtccacggccatcacctgtgcgggaacacctggtttccttaagacaatttcctttttgtccttttatatttttctaaagaaaactaagatataaactaccaagtgctcttaagaataaaaataagaataagaatacaaaggagcactactcttggctacacgaaagatcttgggattcatgacactgagggcagggagaagaaagaacaccagccacgcagagatacaaataagctcatcaaatgagcagctggtttgtctcactcagcctgaatttgcattaagtgttcaaaagtgagtttctggcttgcactagtgttttgccctaaatctaaggatggtgcctagtggtggccctgtgttctgaggacagagagagctggaggggtggagggaaatgcatcggcactcatttggtgtaaccaagaagagggggaaagatgtcttgatagaatcaaagttgccaaaaacaaagaagagtttatcaagcagatttctaacatttagtagaaactacttcatagctctcatttttagggggttctatctataatttatggtaaatagttgggaggcaaagggaagaatgtgtgtggggggattattaatttgaagtataagctaaattgtttattaaaaagcctattttggatgaacaagtttagagagataaactgactaatgtgtcctccagtttagaatttcaccttacccgacccaggcacttcttaaaaacacagatcctcagtgcagctctgccagcatcaaggcttttaaaatatgtagtatttaggccatttaaaccatacttattactcaataacccaagaaacaattttgggttagccatctaatatagcaaataaaatagattttttaaagaaatccaaaattgtcttaaaggaatggaccccttgaag

SEQ ID NO: 5309 - protein, 712 aa, Homo sapiens
MLKDYLSVAQDALRTQKELYHVKEQRLALALDEYVRLNDAYKEKSSSHTSLFSGSSSSTKYDPDILKAEISTTRLRVKKLKRELSQMKQELLYKEQGFETLQQIDKKMSGGQSGYELSEAKAILTELKSIRKAISSGEKEKQDLMQSLAKLQERFHLDQNIGRSEPDLRCSPVNSHLCLSRQTLDAGSQTSISGDIGVRSRSNLAEKVRLSLQYEEAKRSMANLKIELSKLDSEAWPGALDIEKEKLMLINEKEELLKELQFVTPQKRTQDELERLEAERQRLEEELLSVRGTPSRALAERLRLEERRKELLQKLEETTKLTTYLHSQLKSLSASTLSMSSGSSLGSLASSRGSLNTSSRGSLNSLSSTELYYSSQSDQIDVDYQYKLDFLLQEKSGYIPSGPITTIHENEVVKSPSQPGQSGLCGVAAAATGHTPPLAEAPKSVASLSSRSSLSSLSPPGSPLVLEGTFPMSSSHDASLHQFTADFEDCELSSHFADISLIENQILLDSDSGGASQSLSEDKDLNECAREPLYEGTADVEKSLPKRRVIHLLGEKTTCVSAAVSDESVAGDSGVYEAFVKQPSEMEDVTYSEEDVAIVETAQVQIGLRYNAKSSSFMVIIAQLRNLHAFLIPHTSKVYFRVAVLPSSTDVSCLFRTKVHPPTESILFNDVFRVAISQTALQQKTLRKNFTFVTAITHGVCLPLPVPMPSFA

SEQ ID NO: 5310 - DNA, 6362 bp, Homo sapiens
agtgtggcctgggctgactaatgtacactctctacacccctaagaaaggggttgtggaactctgagtgggctgtggaagtattttcagaaaccacgcagatagaagatccaagaaaacaatggaggggggaacaggagaagatgctcaaggactacctctctgtggcacaggatgccctccggacacagaaggaactgtaccatgtgaaggagcagaggctggcgctggccctggatgaatacgtgcgattaaatgatgcctataaggaaaagtcaagttctcacacaagcttattctcaggatcttcatccagtactaaatatgatcccgatattttaaaagctgagatctccactacaagattaagggttaaaaagctaaagagagagctctcacagatgaagcaggaactgctctataaagaacaaggctttgaaacattgcagcaaattgataaaaaaatgtctggaggccagagcgggtatgaactcagtgaagccaaagccattctaacagaactaaaatctatcagaaaggcaattagctcaggagaaaaagaaaaacaagatctgatgcagagtcttgctaagctgcaggagcggtttcatttggatcagaacattggcagatctgagccagatttgagatgtagtcctgtgaactctcatttatgtctctccagacagacccttgatgctgggtcacaaacaagcatttccggagatattggagtaagaagtagatcaaatttagctgaaaaggtcaggctaagcctacagtatgaagaagccaaaagaagtatggccaacttaaaaattgaactgtcaaaattggacagtgaggcctggcctggggcactggatattgagaaggaaaaactgatgctgattaatgaaaaagaagaacttttgaaagagcttcagttcgtcaccccacagaaacgtacccaagatgaattagaacgcctagaagctgaaaggcagcggctggaagaagagttgctgtctgtgaggggaacaccaagcagagctctggccgagagattgagattggaagagagaagaaaagagctgctacagaaacttgaagaaactactaaattaactacttatttgcattcacaacttaaaagcctctctgccagcaccctgtccatgtcatctgggagcagcctgggttccctggcatcgagtcggggctctctgaacacctccagcagagggtcactcaactccctcagttccaccgaactctattacagcagtcaaagtgatcagatagatgtggattatcagtataaactggacttccttctgcaagagaaaagcggttacattccttctggacccatcaccaccatccatgaaaacgaggtggtcaagtcccctagccagcctggccagagtggactctgtggagtggcagctgcagcaacaggccacactcctccactggctgaggccccgaagtctgtggcctccctgtcctcgaggtcctccctttcctccttgtctcctccaggctctcccttggttttggaaggcacgtttcccatgtcttcttctcatgatgcctctctccatcagttcactgctgactttgaagactgtgagttgagtagccattttgcagatatcagcctcatcgaaaatcagattttgctggattctgattcaggaggagcctcccagtctctttcagaggataaagaccttaatgaatgtgctagggagccattatatgaaggaactgcagatgtggaaaaatcattaccaaaaagaagagtgatccacttgcttggggagaaaaccacttgtgtgtcggctgctgtgtctgatgagtctgtggctggagacagtggggtctatgaagctttcgtgaaacaacctagtgaaatggaagatgtcacatacagtgaagaggatgtagccattgtagagaccgcccaggttcagataggactcagatacaatgcaaaaagttcaagtttcatggtgattatagcacagctccgaaaccttcatgccttcttgatacctcatacttcaaaagtatattttagggttgccgttcttccttcctcaactgatgtcagctgtctgtttcgcacaaaagttcatccgcccacagaatccattttattcaatgatgtgttcagagtcgccatttcccaaacagccttacaacagaagacactgaggaagaactttacctttgtgacagctatcactcatggagtgtgcttaccactcccagtaccaatgccaagctttgcgtgactgctgtgtatatattatctcatttaatcctcatgacaacctgatgaaagattggttatgaaatggatgattatccactattttcagataaggagctgcttagagagtattggagctttcgggaagatgtgatgttactgtttaaagcaatatgacatttaaatgctacagcagaagacttcacagttaactaattgctggaactcagatcagcctggcagatttaccattttccagtgaggttttcactctatggtataacttgcttccttccaagcaaatgccttgcaaaaagaatgaagaaaatgaggactctgtatttcaaccaaaccagccgttagtagattctatagacttggatgcagtgtcagccttacttgcaagaacatcagctgagttgttagctgtggaacaagaattagcacaagaagaagaagaagaatcaggacaagaagagccaaggggcccagatggagactggctaacaatgctaagagaggcctctgatgaaattgtggctgaaaaagaggctgaagttaaattgccagaggacagtagctgtacagaagatttaagttcatgcactagtgtgcctgagatgaatgaagacgggaacaggaaagaaagcaactgtgccaaagacctcagaagtcagccacctactagaataccaacactggttgacaaagagacaaacactgatgaagccgctaatgacaatatggcagttcgccccaaagagcgcagcagcctgagctctagacagcatccgtttgtgaggagcagtgtgatagtgcgctcacagaccttttctccaggagagcggaaccagtacatctgcaggttaaatcggagtgacagtgacagttcaaccctggctaaaaaatcactgtttgtgagaaactccaccgaacgccgcagtttgagggtcaaaaggacggtttgccagtcagtccttagaagaacaacacaggaatgcccagtgcggacatctctagacttagaactggaccttcaggcatctctgacccggcagagccgcctcaatgatgagctgcaggcgctgagggacttgcggcagaagctggaggaactgaaagctcagggagagactgaccttccaccaggcgtgctggaggatgagaggttccagaggcttctgaagcaagctgagaagcaggctgaacagtccaaagaagagcagaagcaaggtctgaatgcagagaagttgatgaggcaagtctccaaggacgtgtgtcggctccgggagcagagccagaaggtgcctcggcaggtgcagtccttcagggagaagattgcctacttcaccagagcaaagataagcatcccatccctgccagctgatgatgtgtgattacatgacttaagaaattattttttcatctgttcactttcttagggagggtaaaagactgaagatttgtgtttttgttttggtgtttggttttttttggtaacgtaactgtcaactcttgaagaacttttatttcacatcagattttcaacacattaatttgtaaagtaccttgagtgtaatttttatatgcttaaaaaagaaaaaatcatataagaaagatgggataacctggtacacaaatgttgcccagtatgtgcgcattgccagtggacttcattttgtaaaaatggaatagaggcagtaccccacatgtgtactgttgagccggctgttgagaaacaacttggttcagccggtggttttgcttctcctttgtgttcctgtgagtaggctgtgccgatggcagcagcgccacgtggtatctgtgcgctggcgaggagaggagcgctttccatttggaggcagtgtgagcacacgctggagtgcagcgttccaaagtccgcccgaaatggatgctgcgtccacggccatcacctgtgcgggaacacctggtttccttaagacaatttcctttttgtccttttatatttttctaaagaaaactaagatataaactaccaagtgctcttaagaataaaaataagaataagaatacaaaggagcactactcttggctacacgaaagatcttgggattcatgacactgagggcagggagaagaaagaacaccagccacgcagagatacaaataagctcatcaaatgagcagctggtttgtctcactcagcctgaatttgcattaagtgttcaaaagtgagtttctggcttgcactagtgttttgccctaaatctaaggatggtgcctagtggtggccctgtgttctgaggacagagagagctggaggggtggagggaaatgcatcggcactcatttggtgtaaccaagaagagggggaaagatgtcttgatagaatcaaagttgccaaaaacaaagaagagtttatcaagcagatttctaacatttagtagaaactacttcatagctctcatttttagggggttctatctataatttatggtaaatagttgggaggcaaagggaagaatgtgtgtggggggattattaatttgaagtataagctaaattgtttattaaaaagcctattttggatgaacaagtttagagagataaactgactaatgtgtcctccagtttagaatttcaccttacccgacccaggcacttcttaaaaacacagatcctcagtgcagctctgccagcatcaaggcttttaaaatatgtagtatttaggccatttaaaccatacttattactcaataacccaagaaacaattttgggttagccatctaatatagcaaataaaatagattttttaaagaaatccaaaattgtcttaaaggaatggaccccttgaagaaaaaaaaaaaaagttttgttcctcagttagaatgctcactagctcactagcaagaatttttattttcttgaaagcaattatatatattttggaaagttcatgttattggaattgaagttcaaattaagcaacttctgagcctagaactttaattactttttcctaaatgtcccaacacttacatacaaatttctttgaagacataactggacatggcagacactgctttgaacaaaaaccagcctagtgaattgactgagtacagtcctttaaggctgcccagttcattctattagatgactaaggaaaactagaaaaagaatacagttcacccttgtcaaggtcaaatgtgaaagacagaagtttatttaatgtagaggtaaatgaaggtgagctgttttcagcatcttagtttgaccatgaaaatgtctatagaattatgtgtagttgttccgtacgattttattttcttcatttatttatttacagtcttatttatgttctgtttaatatatagtttgattctggccattttaaatatttgacacagaagagactatattggaatatttacagctttataagtctttcatcagattagctgttgactttttgtaatacaaaaagtttcagacaagtattaaagaataaaatctgtctcaggctggtagttagcagttgtgaccaagatgcttttggttgttgtatttcacaaaatttcctcatttctaacatgagagatgaacttattttaatataatcctttttctacactttaaaagtcagcaatagtgttatgtatttataggcagcttttaataatcttgtcatatttgtactaacccaaatgattcacagtgacaaaacattttaataacttgatcacaaaaccatatggacaaatatgaattttaatattataaatactatttttaaaaggtagaatttattcgcacagggtaaaaagaatgtaatatttagttctcaagtttgaattatcagtatattattacaattttgtatatcagaatcttaagtgttacaggtacaaaaagaatattgctagccaaatgaacaaagtttagctaaatctctgtagcatgcaaatcaaataaattaaaattttttgctattgctttatctatattgtcttaaatatcaaaagctcaggactgaacttaatatttaatcaggttaaattctgaacatgtttctgttttaatttgtcttgtttgtaaacgtatgcaaatacatcacatagatt

SEQ ID NO: 5311 - protein, 712 aa, Homo sapiens; identical to SEQ ID NO: 5309

SEQ ID NO: 5312 - DNA, 6674 bp, Homo sapiens
agtgtggcctgggctgactaatgtacactctctacacccctaagaaaggggttgtggaactctgagtgggctgtggaagtattttcagaaaccacgcagatagaagatccaagaaaacaatggaggggggaacaggagaagatgctcaaggactacctctctgtggcacaggatgccctccggacacagaaggaactgtaccatgtgaaggagcagaggctggcgctggccctggatgaatacgtgcgattaaatgatgcctataaggaaaagtcaagttctcacacaagcttattctcaggatcttcatccagtactaaatatgatcccgatattttaaaagctgagatctccactacaagattaagggttaaaaagctaaagagagagctctcacagatgaagcaggaactgctctataaagaacaaggctttgaaacattgcagcaaattgataaaaaaatgtctggaggccagagcgggtatgaactcagtgaagccaaagccattctaacagaactaaaatctatcagaaaggcaattagctcaggagaaaaagaaaaacaagatctgatgcagagtcttgctaagctgcaggagcggtttcatttggatcagaacattggcagatctgagccagatttgagatgtagtcctgtgaactctcatttatgtctctccagacagacccttgatgctgggtcacaaacaagcatttccggagatattggagtaagaagtagatcaaatttagctgaaaaggtcaggctaagcctacagtatgaagaagccaaaagaagtatggccaacttaaaaattgaactgtcaaaattggacagtgaggcctggcctggggcactggatattgagaaggaaaaactgatgctgattaatgaaaaagaagaacttttgaaagagcttcagttcgtcaccccacagaaacgtacccaagatgaattagaacgcctagaagctgaaaggcagcggctggaagaagagttgctgtctgtgaggggaacaccaagcagagctctggccgagagattgagattggaagagagaagaaaagagctgctacagaaacttgaagaaactactaaattaactacttatttgcattcacaacttaaaagcctctctgccagcaccctgtccatgtcatctgggagcagcctgggttccctggcatcgagtcggggctctctgaacacctccagcagagggtcactcaactccctcagttccaccgaactctattacagcagtcaaagtgatcagatagatgtggattatcagtataaactggacttccttctgcaagagaaaagcggttacattccttctggacccatcaccaccatccatgaaaacgaggtggtcaagtcccctagccagcctggccagagtggactctgtggagtggcagctgcagcaacaggccacactcctccactggctgaggccccgaagtctgtggcctccctgtcctcgaggtcctccctttcctccttgtctcctccaggctctcccttggttttggaaggcacgtttcccatgtcttcttctcatgatgcctctctccatcagttcactgctgactttgaagactgtgagttgagtagccattttgcagatatcagcctcatcgaaaatcagattttgctggattctgattcaggaggagcctcccagtctctttcagaggataaagaccttaatgaatgtgctagggagccattatatgaaggaactgcagatgtggaaaaatcattaccaaaaagaagagtgatccacttgcttggggagaaaaccacttgtgtgtcggctgctgtgtctgatgagtctgtggctggagacagtggggtctatgaagctttcgtgaaacaacctagtgaaatggaagatgtcacatacagtgaagaggatgtagccattgtagagaccgcccaggttcagataggactcagatacaatgcaaaaagttcaagtttcatggtgattatagcacagctccgaaaccttcatgccttcttgatacctcatacttcaaaagtatattttagggttgccgttcttccttcctcaactgatgtcagctgtctgtttcgcacaaaagttcatccgcccacagaatccattttattcaatgatgtgttcagagtcgccatttcccaaacagccttacaacagaagacactgaggaagaactttacctttgtgacagctatcactcatggagtgtgcttaccactcccagtaccaatgccaagctttgcgtgactgctgtgtatatattatctcatttaatcctcatgacaacctgatgaaagattggttatgaaatggatgattatccactattttcagataaggagctgcttagagagtattggagctttcgggaagatgtgatgttactgtttaaagcaatatgacatttaaatgctacagcagaagacttcacagttaactaattgctggaactcagatcagcctggcagatttaccattttccagtgaggttttcactctatggtataacttgcttccttccaagcaaatgccttgcaaaaagaatgaagaaaatgaggactctgtatttcaaccaaaccagccgttagtagattctatagacttggatgcagtgtcagccttacttgcaagaacatcagctgagttgttagctgtggaacaagaattagcacaagaagaagaagaagaatcaggacaagaagagccaaggggcccagatggagactggctaacaatgctaagagaggcctctgatgaaattgtggctgaaaaagaggctgaagttaaattgccagaggacagtagctgtacagaagatttaagttcatgcactagtgtgcctgagatgaatgaagacgggaacaggaaagaaagcaactgtgccaaagacctcagaagtcagccacctactagaataccaacactggttgacaaagagacaaacactgatgaagccgctaatgacaatatggcagttcgccccaaagagcgcagcagcctgagctctagacagcatccgtttgtgaggagcagtgtgatagtgcgctcacagaccttttctccaggagagcggaaccagtacatctgcaggttaaatcggagtgacagtgacagttcaaccctggctaaaaaatcactgtttgtgagaaactccaccgaacgccgcagtttgagggtcaaaaggacggtttgccagtcagtccttagaagaacaacacaggaatgcccagtgcggacatctctagacttagaactggaccttcaggcatctctgacccggcagagccgcctcaatgatgagctgcaggcgctgagggacttgcggcagaagctggaggaactgaaagctcagggagagactgaccttccaccaggcgtgctggaggatgagaggttccagaggcttctgaagcaagctgagaagcaggctgaacagtccaaagaagagcagaagcaaggtctgaatgcagagaagttgatgaggcaagtctccaaggacgtgtgtcggctccgggagcagagccagaaggtgcctcggcaggtgcagtccttcagggagaagattgcctacttcaccagagcaaagataagcatcccatccctgccagctgatgatgtgtgattacatgacttaagaaattattttttcatctgttcactttcttagggagggtaaaagactgaagatttgtgtttttgttttggtgtttggttttttttggtaacgtaactgtcaactcttgaagaacttttatttcacatcagattttcaacacattaatttgtaaagtaccttgagtgtaatttttatatgcttaaaaaagaaaaaatcatataagaaagatgggataacctggtacacaaatgttgcccagtatgtgcgcattgccagtggacttcattttgtaaaaatggaatagaggcagtaccccacatgtgtactgttgagccggctgttgagaaacaacttggttcagccggtggttttgcttctcctttgtgttcctgtgagtaggctgtgccgatggcagcagcgccacgtggtatctgtgcgctggcgaggagaggagcgctttccatttggaggcagtgtgagcacacgctggagtgcagcgttccaaagtccgcccgaaatggatgctgcgtccacggccatcacctgtgcgggaacacctggtttccttaagacaatttcctttttgtccttttatatttttctaaagaaaactaagatataaactaccaagtgctcttaagaataaaaataagaataagaatacaaaggagcactactcttggctacacgaaagatcttgggattcatgacactgagggcagggagaagaaagaacaccagccacgcagagatacaaataagctcatcaaatgagcagctggtttgtctcactcagcctgaatttgcattaagtgttcaaaagtgagtttctggcttgcactagtgttttgccctaaatctaaggatggtgcctagtggtggccctgtgttctgaggacagagagagctggaggggtggagggaaatgcatcggcactcatttggtgtaaccaagaagagggggaaagatgtcttgatagaatcaaagttgccaaaaacaaagaagagtttatcaagcagatttctaacatttagtagaaactacttcatagctctcatttttagggggttctatctataatttatggtaaatagttgggaggcaaagggaagaatgtgtgtggggggattattaatttgaagtataagctaaattgtttattaaaaagcctattttggatgaacaagtttagagagataaactgactaatgtgtcctccagtttagaatttcaccttacccgacccaggcacttcttaaaaacacagatcctcagtgcagctctgccagcatcaaggcttttaaaatatgtagtatttaggccatttaaaccatacttattactcaataacccaagaaacaattttgggttagccatctaatatagcaaataaaatagattttttaaagaaatccaaaattgtcttaaaggaatggaccccttgaagaaaaaaaaaaaaagttttgttcctcagttagaatgctcactagctcactagcaagaatttttattttcttgaaagcaattatatatattttggaaagttcatgttattggaattgaagttcaaattaagcaacttctgagcctagaactttaattactttttcctaaatgtcccaacacttacatacaaatttctttgaagacataactggacatggcagacactgctttgaacaaaaaccagcctagtgaattgactgagtacagtcctttaaggctgcccagttcattctattagatgactaaggaaaactagaaaaagaatacagttcacccttgtcaaggtcaaatgtgaaagacagaagtttatttaatgtagaggtaaatgaaggtgagctgttttcagcatcttagtttgaccatgaaaatgtctatagaattatgtgtagttgttccgtacgattttattttcttcatttatttatttacagtcttatttatgttctgtttaatatatagtttgattctggccattttaaatatttgacacagaagagactatattggaatatttacagctttataagtctttcatcagattagctgttgactttttgtaatacaaaaagtttcagacaagtattaaagaataaaatctgtctcaggctggtagttagcagttgtgaccaagatgcttttggttgttgtatttcacaaaatttcctcatttctaacatgagagatgaacttattttaatataatcctttttctacactttaaaagtcagcaatagtgttatgtatttataggcagcttttaataatcttgtcatatttgtactaacccaaatgattcacagtgacaaaacattttaataacttgatcacaaaaccatatggacaaatatgaattttaatattataaatactatttttaaaaggtagaatttattcgcacagggtaaaaagaatgtaatatttagttctcaagtttgaattatcagtatattattacaattttgtatatcagaatcttaagtgttacaggtacaaaaagaatattgctagccaaatgaacaaagtttagctaaatctctgtagcatgcaaatcaaataaattaaaattttttgctattgctttatctatattgtcttaaatatcaaaagctcaggactgaacttaatatttaatcaggttaaattctgaacatgtttctgttttaatttgtcttgtttgtaaacgtatgcaaatacatcacatagattaactggtttctgcactttccatgtgtttgtgggtggaaaaaaattcagtggttttttttaaaaaaaaaagcaaaaacaaagctacatattgcctaatactctatttcagtgtcgtttattgttcagtttatttccctgattggcacaaacacaagagtttccttgaaccatgtaccaagcaaatacaaaatatttcatgaagaaatccccaggctggcagtttgtgatgaatagttcttgttggaactatatgtattgctgataaaaaaggacgaagtattttcattgagcaaataaaatgaagggctccag

SEQ ID NO: 5313 - protein, 712 aa, Homo sapiens; identical to SEQ ID NO: 5309

SEQ ID NO: 5314 - DNA, 8700 bp, Homo sapiens
agtgtggcctgggctgactaatgtacactctctacacccctaagaaaggggttgtggaactctgagtgggctgtggaagtattttcagaaaccacgcagatagaagatccaagaaaacaatggaggggggaacaggagaagatgctcaaggactacctctctgtggcacaggatgccctccggacacagaaggaactgtaccatgtgaaggagcagaggctggcgctggccctggatgaatacgtgcgattaaatgatgcctataaggaaaagtcaagttctcacacaagcttattctcaggatcttcatccagtactaaatatgatcccgatattttaaaagctgagatctccactacaagattaagggttaaaaagctaaagagagagctctcacagatgaagcaggaactgctctataaagaacaaggctttgaaacattgcagcaaattgataaaaaaatgtctggaggccagagcgggtatgaactcagtgaagccaaagccattctaacagaactaaaatctatcagaaaggcaattagctcaggagaaaaagaaaaacaagatctgatgcagagtcttgctaagctgcaggagcggtttcatttggatcagaacattggcagatctgagccagatttgagatgtagtcctgtgaactctcatttatgtctctccagacagacccttgatgctgggtcacaaacaagcatttccggagatattggagtaagaagtagatcaaatttagctgaaaaggtcaggctaagcctacagtatgaagaagccaaaagaagtatggccaacttaaaaattgaactgtcaaaattggacagtgaggcctggcctggggcactggatattgagaaggaaaaactgatgctgattaatgaaaaagaagaacttttgaaagagcttcagttcgtcaccccacagaaacgtacccaagatgaattagaacgcctagaagctgaaaggcagcggctggaagaagagttgctgtctgtgaggggaacaccaagcagagctctggccgagagattgagattggaagagagaagaaaagagctgctacagaaacttgaagaaactactaaattaactacttatttgcattcacaacttaaaagcctctctgccagcaccctgtccatgtcatctgggagcagcctgggttccctggcatcgagtcggggctctctgaacacctccagcagagggtcactcaactccctcagttccaccgaactctattacagcagtcaaagtgatcagatagatgtggattatcagtataaactggacttccttctgcaagagaaaagcggttacattccttctggacccatcaccaccatccatgaaaacgaggtggtcaagtcccctagccagcctggccagagtggactctgtggagtggcagctgcagcaacaggccacactcctccactggctgaggccccgaagtctgtggcctccctgtcctcgaggtcctccctttcctccttgtctcctccaggctctcccttggttttggaaggcacgtttcccatgtcttcttctcatgatgcctctctccatcagttcactgctgactttgaagactgtgagttgagtagccattttgcagatatcagcctcatcgaaaatcagattttgctggattctgattcaggaggagcctcccagtctctttcagaggataaagaccttaatgaatgtgctagggagccattatatgaaggaactgcagatgtggaaaaatcattaccaaaaagaagagtgatccacttgcttggggagaaaaccacttgtgtgtcggctgctgtgtctgatgagtctgtggctggagacagtggggtctatgaagctttcgtgaaacaacctagtgaaatggaagatgtcacatacagtgaagaggatgtagccattgtagagaccgcccaggttcagataggactcagatacaatgcaaaaagttcaagtttcatggtgattatagcacagctccgaaaccttcatgccttcttgatacctcatacttcaaaagtatattttagggttgccgttcttccttcctcaactgatgtcagctgtctgtttcgcacaaaagttcatccgcccacagaatccattttattcaatgatgtgttcagagtcgccatttcccaaacagccttacaacagaagacactgaggaagaactttacctttgtgacagctatcactcatggagtgtgcttaccactcccagtaccaatgccaagctttgcgtgactgctgtgtatatattatctcatttaatcctcatgacaacctgatgaaagattggttatgaaatggatgattatccactattttcagataaggagctgcttagagagtattggagctttcgggaagatgtgatgttactgtttaaagcaatatgacatttaaatgctacagcagaagacttcacagttaactaattgctggaactcagatcagcctggcagatttaccattttccagtgaggttttcactctatggtataacttgcttccttccaagcaaatgccttgcaaaaagaatgaagaaaatgaggactctgtatttcaaccaaaccagccgttagtagattctatagacttggatgcagtgtcagccttacttgcaagaacatcagctgagttgttagctgtggaacaagaattagcacaagaagaagaagaagaatcaggacaagaagagccaaggggcccagatggagactggctaacaatgctaagagaggcctctgatgaaattgtggctgaaaaagaggctgaagttaaattgccagaggacagtagctgtacagaagatttaagttcatgcactagtgtgcctgagatgaatgaagacgggaacaggaaagaaagcaactgtgccaaagacctcagaagtcagccacctactagaataccaacactggttgacaaagagacaaacactgatgaagccgctaatgacaatatggcagttcgccccaaagagcgcagcagcctgagctctagacagcatccgtttgtgaggagcagtgtgatagtgcgctcacagaccttttctccaggagagcggaaccagtacatctgcaggttaaatcggagtgacagtgacagttcaaccctggctaaaaaatcactgtttgtgagaaactccaccgaacgccgcagtttgagggtcaaaaggacggtttgccagtcagtccttagaagaacaacacaggaatgcccagtgcggacatctctagacttagaactggaccttcaggcatctctgacccggcagagccgcctcaatgatgagctgcaggcgctgagggacttgcggcagaagctggaggaactgaaagctcagggagagactgaccttccaccaggcgtgctggaggatgagaggttccagaggcttctgaagcaagctgagaagcaggctgaacagtccaaagaagagcagaagcaaggtctgaatgcagagaagttgatgaggcaagtctccaaggacgtgtgtcggctccgggagcagagccagaaggtgcctcggcaggtgcagtccttcagggagaagattgcctacttcaccagagcaaagataagcatcccatccctgccagctgatgatgtgtgattacatgacttaagaaattattttttcatctgttcactttcttagggagggtaaaagactgaagatttgtgtttttgttttggtgtttggttttttttggtaacgtaactgtcaactcttgaagaacttttatttcacatcagattttcaacacattaatttgtaaagtaccttgagtgtaatttttatatgcttaaaaaagaaaaaatcatataagaaagatgggataacctggtacacaaatgttgcccagtatgtgcgcattgccagtggacttcattttgtaaaaatggaatagaggcagtaccccacatgtgtactgttgagccggctgttgagaaacaacttggttcagccggtggttttgcttctcctttgtgttcctgtgagtaggctgtgccgatggcagcagcgccacgtggtatctgtgcgctggcgaggagaggagcgctttccatttggaggcagtgtgagcacacgctggagtgcagcgttccaaagtccgcccgaaatggatgctgcgtccacggccatcacctgtgcgggaacacctggtttccttaagacaatttcctttttgtccttttatatttttctaaagaaaactaagatataaactaccaagtgctcttaagaataaaaataagaataagaatacaaaggagcactactcttggctacacgaaagatcttgggattcatgacactgagggcagggagaagaaagaacaccagccacgcagagatacaaataagctcatcaaatgagcagctggtttgtctcactcagcctgaatttgcattaagtgttcaaaagtgagtttctggcttgcactagtgttttgccctaaatctaaggatggtgcctagtggtggccctgtgttctgaggacagagagagctggaggggtggagggaaatgcatcggcactcatttggtgtaaccaagaagagggggaaagatgtcttgatagaatcaaagttgccaaaaacaaagaagagtttatcaagcagatttctaacatttagtagaaactacttcatagctctcatttttagggggttctatctataatttatggtaaatagttgggaggcaaagggaagaatgtgtgtggggggattattaatttgaagtataagctaaattgtttattaaaaagcctattttggatgaacaagtttagagagataaactgactaatgtgtcctccagtttagaatttcaccttacccgacccaggcacttcttaaaaacacagatcctcagtgcagctctgccagcatcaaggcttttaaaatatgtagtatttaggccatttaaaccatacttattactcaataacccaagaaacaattttgggttagccatctaatatagcaaataaaatagattttttaaagaaatccaaaattgtcttaaaggaatggaccccttgaagaaaaaaaaaaaaagttttgttcctcagttagaatgctcactagctcactagcaagaatttttattttcttgaaagcaattatatatattttggaaagttcatgttattggaattgaagttcaaattaagcaacttctgagcctagaactttaattactttttcctaaatgtcccaacacttacatacaaatttctttgaagacataactggacatggcagacactgctttgaacaaaaaccagcctagtgaattgactgagtacagtcctttaaggctgcccagttcattctattagatgactaaggaaaactagaaaaagaatacagttcacccttgtcaaggtcaaatgtgaaagacagaagtttatttaatgtagaggtaaatgaaggtgagctgttttcagcatcttagtttgaccatgaaaatgtctatagaattatgtgtagttgttccgtacgattttattttcttcatttatttatttacagtcttatttatgttctgtttaatatatagtttgattctggccattttaaatatttgacacagaagagactatattggaatatttacagctttataagtctttcatcagattagctgttgactttttgtaatacaaaaagtttcagacaagtattaaagaataaaatctgtctcaggctggtagttagcagttgtgaccaagatgcttttggttgttgtatttcacaaaatttcctcatttctaacatgagagatgaacttattttaatataatcctttttctacactttaaaagtcagcaatagtgttatgtatttataggcagcttttaataatcttgtcatatttgtactaacccaaatgattcacagtgacaaaacattttaataacttgatcacaaaaccatatggacaaatatgaattttaatattataaatactatttttaaaaggtagaatttattcgcacagggtaaaaagaatgtaatatttagttctcaagtttgaattatcagtatattattacaattttgtatatcagaatcttaagtgttacaggtacaaaaagaatattgctagccaaatgaacaaagtttagctaaatctctgtagcatgcaaatcaaataaattaaaattttttgctattgctttatctatattgtcttaaatatcaaaagctcaggactgaacttaatatttaatcaggttaaattctgaacatgtttctgttttaatttgtcttgtttgtaaacgtatgcaaatacatcacatagattaactggtttctgcactttccatgtgtttgtgggtggaaaaaaattcagtggttttttttaaaaaaaaaagcaaaaacaaagctacatattgcctaatactctatttcagtgtcgtttattgttcagtttatttccctgattggcacaaacacaagagtttccttgaaccatgtaccaagcaaatacaaaatatttcatgaagaaatccccaggctggcagtttgtgatgaatagttcttgttggaactatatgtattgctgataaaaaaggacgaagtattttcattgagcaaataaaatgaagggctccagaatatgtgctctgtggtcgctgcgcctgggctggcagtgtgctccacagagaggcagccgtcccaggaggttatctacccacacaccccagtcctgccctgccgtgccccccacaggctgctcagtgcctgggaagccagaaacgctgcccgtgaaatacagaacacaggatgcagaagcacgtttgtgtggcagagtctacttgaatcatccaaaacccaagatcgccctcctgcctctgacagtatagaaggcgtgactgaatgtggctgccttttgaaaaaggttccatagagacactgaggtctctgattcagaaggagatgatgtgtctacacctttcacctctgaagcttctaaagagctagtaattattttatataataagacgtcatgcattttaaataaatatgcaacaagacctcaggcttattatactaggttatcttaaacacctgaaataagtaaatgatttgccaaatgattccgctccatatgaataataccttcaaagatacatagagattaatgttttatttaccacttctgtgcaatcgctattttaaaattgagaaaactcatccacagtaatgggtgtcattactattcagtcttgattgattttggtctcagactagaagataaaaatggtttaccagtcttggaaagaaactatagtttaatagccacaggaaaagatgcattttcaaaaatcaaaagcacagtgagatgactagagcgggacatcctaccaaatccagtgttgagcaagcgtctcctgaacagcagacgcttgtcctttctggcttagtgtttcaggttggtgtttctcgtctccagttcttgatgatgatcttgtgtttgtgccactgcgtagtggcccgaagctaggggagcgtggctggagcaggctgcacagtggagcagacaccctcctagcagaagagaaagtccagcaaaccagcccagaaacagggcctccccaaactcccacctggggacaaagtctgggacgttctcatcccagaactcctgaaccgtcttgtgggcaacccaagagacgggaaccagggctgtgactcccgaggcccaggacagaattcctcccaggatcagcagtcgcctcttgagatctctctgactctctccaattctcaaacagtccaggccaaacccagagaccagcaggcccagaaatcccagcccatttgacagaaacattaagatcctggagaccctgagttcagcaggcaaagccaggaaggagtcaaagtccttgcattgcatccccacttcctcttggatgacacaggtttgccagagtcccatggtccagttttccatttcatttaagtccaggttgaggttcttccagtgtggcaggtagtttgtaagacaggataaaacccatcccagcaaagataatgaaactccagctagttgagctacagttctaaatactaaagccattataatgtcctgagagctttagccaaactaactcctgcccttcggttgctgtgaaaagaagtgtgacacttgtgttataacttatgaaactcagaaatatttcttcattgtgtatataggaggattcttgccagagttgctattgtttgattccatgttgaatgggtttcacaaaaggatagggaaataatgccgccaaccagtaatgccaaggtgtggccaagattgtgtttgtgtcctgtgggctggatttgacagaaagcagtttgtcactgaaatataattaagtgataatctcctttcattgtcaaggttaaaatggctttcatgttattcccaacctttctaacaaagaattaagtctaaatgcaaaatgtttaactgatggttttggttcaactcctcctgctttgtgtttcactaactgcacctgtcagattttcatctcttatagttctcacatttcaaatgtgcatgttatggtaatactgagtgttattttttaaaaataggtttaagaaaagtatttcttaaccaaataaatcaatcttatcag

SEQ ID NO: 5315 - protein, 712 aa, Homo sapiens; identical to SEQ ID NO: 5309

SEQ ID NO: 5316 - DNA, 5380 bp, Homo sapiens
atgatcccgatattttaaaagctgagatctccactacaagattaaggtatggccaacttaaaaattgaactgtcaaaattggacagtgaggcctggcctggggcactggatattgagaaggaaaaactgatgctgattaatgaaaaagaagaacttttgaaagagcttcagttcgtcaccccacagaaacgtacccaagatgaattagaacgcctagaagctgaaaggcagcggctggaagaagagttgctgtctgtgaggggaacaccaagcagagctctggccgagagattgagattggaagagagaagaaaagagctgctacagaaacttgaagaaactactaaattaactacttatttgcattcacaacttaaaagcctctctgccagcaccctgtccatgtcatctgggagcagcctgggttccctggcatcgagtcggggctctctgaacacctccagcagagggtcactcaactccctcagttccaccgaactctattacagcagtcaaagtgatcagatagatgtggattatcagtataaactggacttccttctgcaagagaaaagcggttacattccttctggacccatcaccaccatccatgaaaacgaggtggtcaagtcccctagccagcctggccagagtggactctgtggagtggcagctgcagcaacaggccacactcctccactggctgaggccccgaagtctgtggcctccctgtcctcgaggtcctccctttcctccttgtctcctccaggctctcccttggttttggaaggcacgtttcccatgtcttcttctcatgatgcctctctccatcagttcactgctgactttgaagactgtgagttgagtagccattttgcagatatcagcctcatcgaaaatcagattttgctggattctgattcaggaggagcctcccagtctctttcagaggataaagaccttaatgaatgtgctagggagccattatatgaaggaactgcagatgtggaaaaatcattaccaaaaagaagagtgatccacttgcttggggagaaaaccacttgtgtgtcggctgctgtgtctgatgagtctgtggctggagacagtggggtctatgaagctttcgtgaaacaacctagtgaaatggaagatgtcacatacagtgaagaggatgtagccattgtagagaccgcccaggttcagataggactcagatacaatgcaaaaagttcaagtttcatggtgattatagcacagctccgaaaccttcatgccttcttgatacctcatacttcaaaagtatattttagggttgccgttcttccttcctcaactgatgtcagctgtctgtttcgcacaaaagttcatccgcccacagaatccattttattcaatgatgtgttcagagtcgccatttcccaaacagccttacaacagaagacactgagggtagacctttgctctgtcagtaaacaccgaagggaagaatgcctggctggaactcagatcagcctggcagatttaccattttccagtgaggttttcactctatggtataacttgcttccttccaagcaaatgccttgcaaaaagaatgaagaaaatgaggactctgtatttcaaccaaaccagccgttagtagattctatagacttggatgcagtgtcagccttacttgcaagaacatcagctgagttgttagctgtggaacaagaattagcacaagaagaagaagaagaatcaggacaagaagagccaaggggcccagatggagactggctaacaatgctaagagaggcctctgatgaaattgtggctgaaaaagaggctgaagttaaattgccagaggacagtagctgtacagaagatttaagttcatgcactagtgtgcctgagatgaatgaagacgggaacaggaaagaaagcaactgtgccaaagacctcagaagtcagccacctactagaataccaacactggttgacaaagagacaaacactgatgaagccgctaatgacaatatggcagttcgccccaaagagcgcagcagcctgagctctagacagcatccgtttgtgaggagcagtgtgatagtgcgctcacagaccttttctccaggagagcggaaccagtacatctgcaggttaaatcggagtgacagtgacagttcaaccctggctaaaaaatcactgtttgtgagaaactccaccgaacgccgcagtttgagggtcaaaaggacggtttgccagtcagtccttagaagaacaacacaggaatgcccagtgcggacatctctagacttagaactggaccttcaggcatctctgacccggcagagccgcctcaatgatgagctgcaggcgctgagggacttgcggcagaagctggaggaactgaaagctcagggagagactgaccttccaccaggcgtgctggaggatgagaggttccagaggcttctgaagcaagctgagaagcaggctgaacagtccaaagaagagcagaagcaaggtctgaatgcagagaagttgatgaggcaagtctccaaggacgtgtgtcggctccgggagcagagccagaaggtgcctcggcaggtgcagtccttcagggagaagattgcctacttcaccagagcaaagataagcatcccatccctgccagctgatgatgtgtgattacatgacttaagaaattattttttcatctgttcactttcttagggagggtaaaagactgaagatttgtgtttttgttttggtgtttggttttttttggtaacgtaactgtcaactcttgaagaacttttatttcacatcagattttcaacacattaatttgtaaagtaccttgagtgtaatttttatatgcttaaaaaagaaaaaatcatataagaaagatgggataacctggtacacaaatgttgcccagtatgtgcgcattgccagtggacttcattttgtaaaaatggaatagaggcagtaccccacatgtgtactgttgagccggctgttgagaaacaacttggttcagccggtggttttgcttctcctttgtgttcctgtgagtaggctgtgccgatggcagcagcgccacgtggtatctgtgcgctggcgaggagaggagcgctttccatttggaggcagtgtgagcacacgctggagtgcagcgttccaaagtccgcccgaaatggatgctgcgtccacggccatcacctgtgcgggaacacctggtttccttaagacaatttcctttttgtccttttatatttttctaaagaaaactaagatataaactaccaagtgctcttaagaataaaaataagaataagaatacaaaggagcactactcttggctacacgaaagatcttgggattcatgacactgagggcagggagaagaaagaacaccagccacgcagagatacaaataagctcatcaaatgagcagctggtttgtctcactcagcctgaatttgcattaagtgttcaaaagtgagtttctggcttgcactagtgttttgccctaaatctaaggatggtgcctagtggtggccctgtgttctgaggacagagagagctggaggggtggagggaaatgcatcggcactcatttggtgtaaccaagaagagggggaaagatgtcttgatagaatcaaagttgccaaaaacaaagaagagtttatcaagcagatttctaacatttagtagaaactacttcatagctctcatttttagggggttctatctataatttatggtaaatagttgggaggcaaagggaagaatgtgtgtggggggattattaatttgaagtataagctaaattgtttattaaaaagcctattttggatgaacaagtttagagagataaactgactaatgtgtcctccagtttagaatttcaccttacccgacccaggcacttcttaaaaacacagatcctcagtgcagctctgccagcatcaaggcttttaaaatatgtagtatttaggccatttaaaccatacttattactcaataacccaagaaacaattttgggttagccatctaatatagcaaataaaatagattttttaaagaaatccaaaattgtcttaaaggaatggaccccttgaagaaaaaaaaaaaaagttttgttcctcagttagaatgctcactagctcactagcaagaatttttattttcttgaaagcaattatatatattttggaaagttcatgttattggaattgaagttcaaattaagcaacttctgagcctagaactttaattactttttcctaaatgtcccaacacttacatacaaatttctttgaagacataactggacatggcagacactgctttgaacaaaaaccagcctagtgaattgactgagtacagtcctttaaggctgcccagttcattctattagatgactaaggaaaactagaaaaagaatacagttcacccttgtcaaggtcaaatgtgaaagacagaagtttatttaatgtagaggtaaatgaaggtgagctgttttcagcatcttagtttgaccatgaaaatgtctatagaattatgtgtagttgttccgtacgattttattttcttcatttatttatttacagtcttatttatgttctgtttaatatatagtttgattctggccattttaaatatttgacacagaagagactatattggaatatttacagctttataagtctttcatcagattagctgttgactttttgtaatacaaaaagtttcagacaagtattaaagaataaaatctgtctcaggctggtagttagcagttgtgaccaagatgcttttggttgttgtatttcacaaaatttcctcatttctaacatgagagatgaacttattttaatataatcctttttctacactttaaaagtcagcaatagtgttatgtatttataggcagcttttaataatcttgtcatatttgtactaacccaaatgattcacagtgacaaaacattttaataacttgatcacaaaaccatatggacaaatatgaattttaatattataaatactatttttaaaaggtagaatttattcgcacagggtaaaaagaatgtaatatttagttctcaagtttgaattatcagtatattattacaattttgtatatcagaatcttaagtgttacaggtacaaaaagaatattgctagccaaatgaacaaagtttagctaaatctctgtagcatgcaaatcaaataaattaaaattttttgctattgctttatctatattgtcttaaatatcaaaagctcaggactgaacttaatatttaatcaggttaaattctgaacatgtttctgttttaatttgtcttgtttgtaaacgtatgcaaatacatcacatagatt

SEQ ID NO: 5317 - protein, 874 aa, Homo sapiens
MANLKIELSKLDSEAWPGALDIEKEKLMLINEKEELLKELQFVTPQKRTQDELERLEAERQRLEEELLSVRGTPSRALAERLRLEERRKELLQKLEETTKLTTYLHSQLKSLSASTLSMSSGSSLGSLASSRGSLNTSSRGSLNSLSSTELYYSSQSDQIDVDYQYKLDFLLQEKSGYIPSGPITTIHENEVVKSPSQPGQSGLCGVAAAATGHTPPLAEAPKSVASLSSRSSLSSLSPPGSPLVLEGTFPMSSSHDASLHQFTADFEDCELSSHFADISLIENQILLDSDSGGASQSLSEDKDLNECAREPLYEGTADVEKSLPKRRVIHLLGEKTTCVSAAVSDESVAGDSGVYEAFVKQPSEMEDVTYSEEDVAIVETAQVQIGLRYNAKSSSFMVIIAQLRNLHAFLIPHTSKVYFRVAVLPSSTDVSCLFRTKVHPPTESILFNDVFRVAISQTALQQKTLRVDLCSVSKHRREECLAGTQISLADLPFSSEVFTLWYNLLPSKQMPCKKNEENEDSVFQPNQPLVDSIDLDAVSALLARTSAELLAVEQELAQEEEEESGQEEPRGPDGDWLTMLREASDEIVAEKEAEVKLPEDSSCTEDLSSCTSVPEMNEDGNRKESNCAKDLRSQPPTRIPTLVDKETNTDEAANDNMAVRPKERSSLSSRQHPFVRSSVIVRSQTFSPGERNQYICRLNRSDSDSSTLAKKSLFVRNSTERRSLRVKRTVCQSVLRRTTQECPVRTSLDLELDLQASLTRQSRLNDELQALRDLRQKLEELKAQGETDLPPGVLEDERFQRLLKQAEKQAEQSKEEQKQGLNAEKLMRQVSKDVCRLREQSQKVPRQVQSFREKIAYFTRAKISIPSLPADDV

SEQ ID NO: 5318 - DNA, 5692 bp, Homo sapiens
atgatcccgatattttaaaagctgagatctccactacaagattaaggtatggccaacttaaaaattgaactgtcaaaattggacagtgaggcctggcctggggcactggatattgagaaggaaaaactgatgctgattaatgaaaaagaagaacttttgaaagagcttcagttcgtcaccccacagaaacgtacccaagatgaattagaacgcctagaagctgaaaggcagcggctggaagaagagttgctgtctgtgaggggaacaccaagcagagctctggccgagagattgagattggaagagagaagaaaagagctgctacagaaacttgaagaaactactaaattaactacttatttgcattcacaacttaaaagcctctctgccagcaccctgtccatgtcatctgggagcagcctgggttccctggcatcgagtcggggctctctgaacacctccagcagagggtcactcaactccctcagttccaccgaactctattacagcagtcaaagtgatcagatagatgtggattatcagtataaactggacttccttctgcaagagaaaagcggttacattccttctggacccatcaccaccatccatgaaaacgaggtggtcaagtcccctagccagcctggccagagtggactctgtggagtggcagctgcagcaacaggccacactcctccactggctgaggccccgaagtctgtggcctccctgtcctcgaggtcctccctttcctccttgtctcctccaggctctcccttggttttggaaggcacgtttcccatgtcttcttctcatgatgcctctctccatcagttcactgctgactttgaagactgtgagttgagtagccattttgcagatatcagcctcatcgaaaatcagattttgctggattctgattcaggaggagcctcccagtctctttcagaggataaagaccttaatgaatgtgctagggagccattatatgaaggaactgcagatgtggaaaaatcattaccaaaaagaagagtgatccacttgcttggggagaaaaccacttgtgtgtcggctgctgtgtctgatgagtctgtggctggagacagtggggtctatgaagctttcgtgaaacaacctagtgaaatggaagatgtcacatacagtgaagaggatgtagccattgtagagaccgcccaggttcagataggactcagatacaatgcaaaaagttcaagtttcatggtgattatagcacagctccgaaaccttcatgccttcttgatacctcatacttcaaaagtatattttagggttgccgttcttccttcctcaactgatgtcagctgtctgtttcgcacaaaagttcatccgcccacagaatccattttattcaatgatgtgttcagagtcgccatttcccaaacagccttacaacagaagacactgagggtagacctttgctctgtcagtaaacaccgaagggaagaatgcctggctggaactcagatcagcctggcagatttaccattttccagtgaggttttcactctatggtataacttgcttccttccaagcaaatgccttgcaaaaagaatgaagaaaatgaggactctgtatttcaaccaaaccagccgttagtagattctatagacttggatgcagtgtcagccttacttgcaagaacatcagctgagttgttagctgtggaacaagaattagcacaagaagaagaagaagaatcaggacaagaagagccaaggggcccagatggagactggctaacaatgctaagagaggcctctgatgaaattgtggctgaaaaagaggctgaagttaaattgccagaggacagtagctgtacagaagatttaagttcatgcactagtgtgcctgagatgaatgaagacgggaacaggaaagaaagcaactgtgccaaagacctcagaagtcagccacctactagaataccaacactggttgacaaagagacaaacactgatgaagccgctaatgacaatatggcagttcgccccaaagagcgcagcagcctgagctctagacagcatccgtttgtgaggagcagtgtgatagtgcgctcacagaccttttctccaggagagcggaaccagtacatctgcaggttaaatcggagtgacagtgacagttcaaccctggctaaaaaatcactgtttgtgagaaactccaccgaacgccgcagtttgagggtcaaaaggacggtttgccagtcagtccttagaagaacaacacaggaatgcccagtgcggacatctctagacttagaactggaccttcaggcatctctgacccggcagagccgcctcaatgatgagctgcaggcgctgagggacttgcggcagaagctggaggaactgaaagctcagggagagactgaccttccaccaggcgtgctggaggatgagaggttccagaggcttctgaagcaagctgagaagcaggctgaacagtccaaagaagagcagaagcaaggtctgaatgcagagaagttgatgaggcaagtctccaaggacgtgtgtcggctccgggagcagagccagaaggtgcctcggcaggtgcagtccttcagggagaagattgcctacttcaccagagcaaagataagcatcccatccctgccagctgatgatgtgtgattacatgacttaagaaattattttttcatctgttcactttcttagggagggtaaaagactgaagatttgtgtttttgttttggtgtttggttttttttggtaacgtaactgtcaactcttgaagaacttttatttcacatcagattttcaacacattaatttgtaaagtaccttgagtgtaatttttatatgcttaaaaaagaaaaaatcatataagaaagatgggataacctggtacacaaatgttgcccagtatgtgcgcattgccagtggacttcattttgtaaaaatggaatagaggcagtaccccacatgtgtactgttgagccggctgttgagaaacaacttggttcagccggtggttttgcttctcctttgtgttcctgtgagtaggctgtgccgatggcagcagcgccacgtggtatctgtgcgctggcgaggagaggagcgctttccatttggaggcagtgtgagcacacgctggagtgcagcgttccaaagtccgcccgaaatggatgctgcgtccacggccatcacctgtgcgggaacacctggtttccttaagacaatttcctttttgtccttttatatttttctaaagaaaactaagatataaactaccaagtgctcttaagaataaaaataagaataagaatacaaaggagcactactcttggctacacgaaagatcttgggattcatgacactgagggcagggagaagaaagaacaccagccacgcagagatacaaataagctcatcaaatgagcagctggtttgtctcactcagcctgaatttgcattaagtgttcaaaagtgagtttctggcttgcactagtgttttgccctaaatctaaggatggtgcctagtggtggccctgtgttctgaggacagagagagctggaggggtggagggaaatgcatcggcactcatttggtgtaaccaagaagagggggaaagatgtcttgatagaatcaaagttgccaaaaacaaagaagagtttatcaagcagatttctaacatttagtagaaactacttcatagctctcatttttagggggttctatctataatttatggtaaatagttgggaggcaaagggaagaatgtgtgtggggggattattaatttgaagtataagctaaattgtttattaaaaagcctattttggatgaacaagtttagagagataaactgactaatgtgtcctccagtttagaatttcaccttacccgacccaggcacttcttaaaaacacagatcctcagtgcagctctgccagcatcaaggcttttaaaatatgtagtatttaggccatttaaaccatacttattactcaataacccaagaaacaattttgggttagccatctaatatagcaaataaaatagattttttaaagaaatccaaaattgtcttaaaggaatggaccccttgaagaaaaaaaaaaaaagttttgttcctcagttagaatgctcactagctcactagcaagaatttttattttcttgaaagcaattatatatattttggaaagttcatgttattggaattgaagttcaaattaagcaacttctgagcctagaactttaattactttttcctaaatgtcccaacacttacatacaaatttctttgaagacataactggacatggcagacactgctttgaacaaaaaccagcctagtgaattgactgagtacagtcctttaaggctgcccagttcattctattagatgactaaggaaaactagaaaaagaatacagttcacccttgtcaaggtcaaatgtgaaagacagaagtttatttaatgtagaggtaaatgaaggtgagctgttttcagcatcttagtttgaccatgaaaatgtctatagaattatgtgtagttgttccgtacgattttattttcttcatttatttatttacagtcttatttatgttctgtttaatatatagtttgattctggccattttaaatatttgacacagaagagactatattggaatatttacagctttataagtctttcatcagattagctgttgactttttgtaatacaaaaagtttcagacaagtattaaagaataaaatctgtctcaggctggtagttagcagttgtgaccaagatgcttttggttgttgtatttcacaaaatttcctcatttctaacatgagagatgaacttattttaatataatcctttttctacactttaaaagtcagcaatagtgttatgtatttataggcagcttttaataatcttgtcatatttgtactaacccaaatgattcacagtgacaaaacattttaataacttgatcacaaaaccatatggacaaatatgaattttaatattataaatactatttttaaaaggtagaatttattcgcacagggtaaaaagaatgtaatatttagttctcaagtttgaattatcagtatattattacaattttgtatatcagaatcttaagtgttacaggtacaaaaagaatattgctagccaaatgaacaaagtttagctaaatctctgtagcatgcaaatcaaataaattaaaattttttgctattgctttatctatattgtcttaaatatcaaaagctcaggactgaacttaatatttaatcaggttaaattctgaacatgtttctgttttaatttgtcttgtttgtaaacgtatgcaaatacatcacatagattaactggtttctgcactttccatgtgtttgtgggtggaaaaaaattcagtggttttttttaaaaaaaaaagcaaaaacaaagctacatattgcctaatactctatttcagtgtcgtttattgttcagtttatttccctgattggcacaaacacaagagtttccttgaaccatgtaccaagcaaatacaaaatatttcatgaagaaatccccaggctggcagtttgtgatgaatagttcttgttggaactatatgtattgctgataaaaaaggacgaagtattttcattgagcaaataaaatgaagggctccag

SEQ ID NO: 5319 - protein, 874 aa, Homo sapiens; identical to SEQ ID NO: 5317

SEQ ID NO: 5320 - DNA, 7718 bp, Homo sapiens
atgatcccgatattttaaaagctgagatctccactacaagattaaggtatggccaacttaaaaattgaactgtcaaaattggacagtgaggcctggcctggggcactggatattgagaaggaaaaactgatgctgattaatgaaaaagaagaacttttgaaagagcttcagttcgtcaccccacagaaacgtacccaagatgaattagaacgcctagaagctgaaaggcagcggctggaagaagagttgctgtctgtgaggggaacaccaagcagagctctggccgagagattgagattggaagagagaagaaaagagctgctacagaaacttgaagaaactactaaattaactacttatttgcattcacaacttaaaagcctctctgccagcaccctgtccatgtcatctgggagcagcctgggttccctggcatcgagtcggggctctctgaacacctccagcagagggtcactcaactccctcagttccaccgaactctattacagcagtcaaagtgatcagatagatgtggattatcagtataaactggacttccttctgcaagagaaaagcggttacattccttctggacccatcaccaccatccatgaaaacgaggtggtcaagtcccctagccagcctggccagagtggactctgtggagtggcagctgcagcaacaggccacactcctccactggctgaggccccgaagtctgtggcctccctgtcctcgaggtcctccctttcctccttgtctcctccaggctctcccttggttttggaaggcacgtttcccatgtcttcttctcatgatgcctctctccatcagttcactgctgactttgaagactgtgagttgagtagccattttgcagatatcagcctcatcgaaaatcagattttgctggattctgattcaggaggagcctcccagtctctttcagaggataaagaccttaatgaatgtgctagggagccattatatgaaggaactgcagatgtggaaaaatcattaccaaaaagaagagtgatccacttgcttggggagaaaaccacttgtgtgtcggctgctgtgtctgatgagtctgtggctggagacagtggggtctatgaagctttcgtgaaacaacctagtgaaatggaagatgtcacatacagtgaagaggatgtagccattgtagagaccgcccaggttcagataggactcagatacaatgcaaaaagttcaagtttcatggtgattatagcacagctccgaaaccttcatgccttcttgatacctcatacttcaaaagtatattttagggttgccgttcttccttcctcaactgatgtcagctgtctgtttcgcacaaaagttcatccgcccacagaatccattttattcaatgatgtgttcagagtcgccatttcccaaacagccttacaacagaagacactgagggtagacctttgctctgtcagtaaacaccgaagggaagaatgcctggctggaactcagatcagcctggcagatttaccattttccagtgaggttttcactctatggtataacttgcttccttccaagcaaatgccttgcaaaaagaatgaagaaaatgaggactctgtatttcaaccaaaccagccgttagtagattctatagacttggatgcagtgtcagccttacttgcaagaacatcagctgagttgttagctgtggaacaagaattagcacaagaagaagaagaagaatcaggacaagaagagccaaggggcccagatggagactggctaacaatgctaagagaggcctctgatgaaattgtggctgaaaaagaggctgaagttaaattgccagaggacagtagctgtacagaagatttaagttcatgcactagtgtgcctgagatgaatgaagacgggaacaggaaagaaagcaactgtgccaaagacctcagaagtcagccacctactagaataccaacactggttgacaaagagacaaacactgatgaagccgctaatgacaatatggcagttcgccccaaagagcgcagcagcctgagctctagacagcatccgtttgtgaggagcagtgtgatagtgcgctcacagaccttttctccaggagagcggaaccagtacatctgcaggttaaatcggagtgacagtgacagttcaaccctggctaaaaaatcactgtttgtgagaaactccaccgaacgccgcagtttgagggtcaaaaggacggtttgccagtcagtccttagaagaacaacacaggaatgcccagtgcggacatctctagacttagaactggaccttcaggcatctctgacccggcagagccgcctcaatgatgagctgcaggcgctgagggacttgcggcagaagctggaggaactgaaagctcagggagagactgaccttccaccaggcgtgctggaggatgagaggttccagaggcttctgaagcaagctgagaagcaggctgaacagtccaaagaagagcagaagcaaggtctgaatgcagagaagttgatgaggcaagtctccaaggacgtgtgtcggctccgggagcagagccagaaggtgcctcggcaggtgcagtccttcagggagaagattgcctacttcaccagagcaaagataagcatcccatccctgccagctgatgatgtgtgattacatgacttaagaaattattttttcatctgttcactttcttagggagggtaaaagactgaagatttgtgtttttgttttggtgtttggttttttttggtaacgtaactgtcaactcttgaagaacttttatttcacatcagattttcaacacattaatttgtaaagtaccttgagtgtaatttttatatgcttaaaaaagaaaaaatcatataagaaagatgggataacctggtacacaaatgttgcccagtatgtgcgcattgccagtggacttcattttgtaaaaatggaatagaggcagtaccccacatgtgtactgttgagccggctgttgagaaacaacttggttcagccggtggttttgcttctcctttgtgttcctgtgagtaggctgtgccgatggcagcagcgccacgtggtatctgtgcgctggcgaggagaggagcgctttccatttggaggcagtgtgagcacacgctggagtgcagcgttccaaagtccgcccgaaatggatgctgcgtccacggccatcacctgtgcgggaacacctggtttccttaagacaatttcctttttgtccttttatatttttctaaagaaaactaagatataaactaccaagtgctcttaagaataaaaataagaataagaatacaaaggagcactactcttggctacacgaaagatcttgggattcatgacactgagggcagggagaagaaagaacaccagccacgcagagatacaaataagctcatcaaatgagcagctggtttgtctcactcagcctgaatttgcattaagtgttcaaaagtgagtttctggcttgcactagtgttttgccctaaatctaaggatggtgcctagtggtggccctgtgttctgaggacagagagagctggaggggtggagggaaatgcatcggcactcatttggtgtaaccaagaagagggggaaagatgtcttgatagaatcaaagttgccaaaaacaaagaagagtttatcaagcagatttctaacatttagtagaaactacttcatagctctcatttttagggggttctatctataatttatggtaaatagttgggaggcaaagggaagaatgtgtgtggggggattattaatttgaagtataagctaaattgtttattaaaaagcctattttggatgaacaagtttagagagataaactgactaatgtgtcctccagtttagaatttcaccttacccgacccaggcacttcttaaaaacacagatcctcagtgcagctctgccagcatcaaggcttttaaaatatgtagtatttaggccatttaaaccatacttattactcaataacccaagaaacaattttgggttagccatctaatatagcaaataaaatagattttttaaagaaatccaaaattgtcttaaaggaatggaccccttgaagaaaaaaaaaaaaagttttgttcctcagttagaatgctcactagctcactagcaagaatttttattttcttgaaagcaattatatatattttggaaagttcatgttattggaattgaagttcaaattaagcaacttctgagcctagaactttaattactttttcctaaatgtcccaacacttacatacaaatttctttgaagacataactggacatggcagacactgctttgaacaaaaaccagcctagtgaattgactgagtacagtcctttaaggctgcccagttcattctattagatgactaaggaaaactagaaaaagaatacagttcacccttgtcaaggtcaaatgtgaaagacagaagtttatttaatgtagaggtaaatgaaggtgagctgttttcagcatcttagtttgaccatgaaaatgtctatagaattatgtgtagttgttccgtacgattttattttcttcatttatttatttacagtcttatttatgttctgtttaatatatagtttgattctggccattttaaatatttgacacagaagagactatattggaatatttacagctttataagtctttcatcagattagctgttgactttttgtaatacaaaaagtttcagacaagtattaaagaataaaatctgtctcaggctggtagttagcagttgtgaccaagatgcttttggttgttgtatttcacaaaatttcctcatttctaacatgagagatgaacttattttaatataatcctttttctacactttaaaagtcagcaatagtgttatgtatttataggcagcttttaataatcttgtcatatttgtactaacccaaatgattcacagtgacaaaacattttaataacttgatcacaaaaccatatggacaaatatgaattttaatattataaatactatttttaaaaggtagaatttattcgcacagggtaaaaagaatgtaatatttagttctcaagtttgaattatcagtatattattacaattttgtatatcagaatcttaagtgttacaggtacaaaaagaatattgctagccaaatgaacaaagtttagctaaatctctgtagcatgcaaatcaaataaattaaaattttttgctattgctttatctatattgtcttaaatatcaaaagctcaggactgaacttaatatttaatcaggttaaattctgaacatgtttctgttttaatttgtcttgtttgtaaacgtatgcaaatacatcacatagattaactggtttctgcactttccatgtgtttgtgggtggaaaaaaattcagtggttttttttaaaaaaaaaagcaaaaacaaagctacatattgcctaatactctatttcagtgtcgtttattgttcagtttatttccctgattggcacaaacacaagagtttccttgaaccatgtaccaagcaaatacaaaatatttcatgaagaaatccccaggctggcagtttgtgatgaatagttcttgttggaactatatgtattgctgataaaaaaggacgaagtattttcattgagcaaataaaatgaagggctccagaatatgtgctctgtggtcgctgcgcctgggctggcagtgtgctccacagagaggcagccgtcccaggaggttatctacccacacaccccagtcctgccctgccgtgccccccacaggctgctcagtgcctgggaagccagaaacgctgcccgtgaaatacagaacacaggatgcagaagcacgtttgtgtggcagagtctacttgaatcatccaaaacccaagatcgccctcctgcctctgacagtatagaaggcgtgactgaatgtggctgccttttgaaaaaggttccatagagacactgaggtctctgattcagaaggagatgatgtgtctacacctttcacctctgaagcttctaaagagctagtaattattttatataataagacgtcatgcattttaaataaatatgcaacaagacctcaggcttattatactaggttatcttaaacacctgaaataagtaaatgatttgccaaatgattccgctccatatgaataataccttcaaagatacatagagattaatgttttatttaccacttctgtgcaatcgctattttaaaattgagaaaactcatccacagtaatgggtgtcattactattcagtcttgattgattttggtctcagactagaagataaaaatggtttaccagtcttggaaagaaactatagtttaatagccacaggaaaagatgcattttcaaaaatcaaaagcacagtgagatgactagagcgggacatcctaccaaatccagtgttgagcaagcgtctcctgaacagcagacgcttgtcctttctggcttagtgtttcaggttggtgtttctcgtctccagttcttgatgatgatcttgtgtttgtgccactgcgtagtggcccgaagctaggggagcgtggctggagcaggctgcacagtggagcagacaccctcctagcagaagagaaagtccagcaaaccagcccagaaacagggcctccccaaactcccacctggggacaaagtctgggacgttctcatcccagaactcctgaaccgtcttgtgggcaacccaagagacgggaaccagggctgtgactcccgaggcccaggacagaattcctcccaggatcagcagtcgcctcttgagatctctctgactctctccaattctcaaacagtccaggccaaacccagagaccagcaggcccagaaatcccagcccatttgacagaaacattaagatcctggagaccctgagttcagcaggcaaagccaggaaggagtcaaagtccttgcattgcatccccacttcctcttggatgacacaggtttgccagagtcccatggtccagttttccatttcatttaagtccaggttgaggttcttccagtgtggcaggtagtttgtaagacaggataaaacccatcccagcaaagataatgaaactccagctagttgagctacagttctaaatactaaagccattataatgtcctgagagctttagccaaactaactcctgcccttcggttgctgtgaaaagaagtgtgacacttgtgttataacttatgaaactcagaaatatttcttcattgtgtatataggaggattcttgccagagttgctattgtttgattccatgttgaatgggtttcacaaaaggatagggaaataatgccgccaaccagtaatgccaaggtgtggccaagattgtgtttgtgtcctgtgggctggatttgacagaaagcagtttgtcactgaaatataattaagtgataatctcctttcattgtcaaggttaaaatggctttcatgttattcccaacctttctaacaaagaattaagtctaaatgcaaaatgtttaactgatggttttggttcaactcctcctgctttgtgtttcactaactgcacctgtcagattttcatctcttatagttctcacatttcaaatgtgcatgttatggtaatactgagtgttattttttaaaaataggtttaagaaaagtatttcttaaccaaataaatcaatcttatcag

SEQ ID NO: 5321 - protein, 874 aa, Homo sapiens; identical to SEQ ID NO: 5317

SEQ ID NO: 5322 - DNA, 2438 bp, Homo sapiens
tgagtctgtttatttcccagataacaacttagcatgcccaggttgcgtgttcatggagcatgcctgcctaccaaaagtgttttgtttttgttttaccataggctaacaatgctaagagaggcctctgatgaaattgtggctgaaaaagaggctgaagttaaattgccagaggacagtagctgtacagaagatttaagttcatgcactagtgtgcctgagatgaatgaagacgggaacaggaaagaaagcaactgtgccaaagacctcagaagtcagccacctactagaataccaacactggttgacaaagagacaaacactgatgaagccgctaatgacaatatggcagttcgccccaaagagcgcagcagcctgagctctagacagcatccgtttgtgaggagcagtgtgatagtgcgctcacagaccttttctccaggagagcggaaccagtacatctgcaggttaaatcggagtgacagtgacagttcaaccctggctaaaaaatcactgtttgtgagaaactccaccgaacgccgcagtttgagggtcaaaaggacggtttgccagtcagtccttagaagaacaacacaggaatgcccagtgcggacatctctagacttagaactggaccttcaggcatctctgacccggcagagccgcctcaatgatgagctgcaggcgctgagggacttgcggcagaagctggaggaactgaaagctcagggagagactgaccttccaccaggcgtgctggaggatgagaggttccagaggcttctgaagcaagctgagaagcaggctgaacagtccaaagaagagcagaagcaaggtctgaatgcagagaagttgatgaggcaagtctccaaggacgtgtgtcggctccgggagcagagccagaaggtgcctcggcaggtgcagtccttcagggagaagattgcctacttcaccagagcaaagataagcatcccatccctgccagctgatgatgtgtgattacatgacttaagaaattattttttcatctgttcactttcttagggagggtaaaagactgaagatttgtgtttttgttttggtgtttggttttttttggtaacgtaactgtcaactcttgaagaacttttatttcacatcagattttcaacacattaatttgtaaagtaccttgagtgtaatttttatatgcttaaaaaagaaaaaatcatataagaaagatgggataacctggtacacaaatgttgcccagtatgtgcgcattgccagtggacttcattttgtaaaaatggaatagaggcagtaccccacatgtgtactgttgagccggctgttgagaaacaacttggttcagccggtggttttgcttctcctttgtgttcctgtgagtaggctgtgccgatggcagcagcgccacgtggtatctgtgcgctggcgaggagaggagcgctttccatttggaggcagtgtgagcacacgctggagtgcagcgttccaaagtccgcccgaaatggatgctgcgtccacggccatcacctgtgcgggaacacctggtttccttaagacaatttcctttttgtccttttatatttttctaaagaaaactaagatataaactaccaagtgctcttaagaataaaaataagaataagaatacaaaggagcactactcttggctacacgaaagatcttgggattcatgacactgagggcagggagaagaaagaacaccagccacgcagagatacaaataagctcatcaaatgagcagctggtttgtctcactcagcctgaatttgcattaagtgttcaaaagtgagtttctggcttgcactagtgttttgccctaaatctaaggatggtgcctagtggtggccctgtgttctgaggacagagagagctggaggggtggagggaaatgcatcggcactcatttggtgtaaccaagaagagggggaaagatgtcttgatagaatcaaagttgccaaaaacaaagaagagtttatcaagcagatttctaacatttagtagaaactacttcatagctctcatttttagggggttctatctataatttatggtaaatagttgggaggcaaagggaagaatgtgtgtggggggattattaatttgaagtataagctaaattgtttattaaaaagcctattttggatgaacaagtttagagagataaactgactaatgtgtcctccagtttagaatttcaccttacccgacccaggcacttcttaaaaacacagatcctcagtgcagctctgccagcatcaaggcttttaaaatatgtagtatttaggccatttaaaccatacttattactcaataacccaagaaacaattttgggttagccatctaatatagcaaataaaatagattttttaaagaaatccaaaattgtcttaaaggaatggaccccttgaag

SEQ ID NO: 5323 - protein, 320 aa, Homo sapiens
MPRLRVHGACLPTKSVLFLFYHRLTMLREASDEIVAEKEAEVKLPEDSSCTEDLSSCTSVPEMNEDGNRKESNCAKDLRSQPPTRIPTLVDKETNTDEAANDNMAVRPKERSSLSSRQHPFVRSSVIVRSQTFSPGERNQYICRLNRSDSDSSTLAKKSLFVRNSTERRSLRVKRTVCQSVLRRTTQECPVRTSLDLELDLQASLTRQSRLNDELQALRDLRQKLEELKAQGETDLPPGVLEDERFQRLLKQAEKQAEQSKEEQKQGLNAEKLMRQVSKDVCRLREQSQKVPRQVQSFREKIAYFTRAKISIPSLPADDV

SEQ ID NO: 5324 - DNA, 3703 bp, Homo sapiens
tgagtctgtttatttcccagataacaacttagcatgcccaggttgcgtgttcatggagcatgcctgcctaccaaaagtgttttgtttttgttttaccataggctaacaatgctaagagaggcctctgatgaaattgtggctgaaaaagaggctgaagttaaattgccagaggacagtagctgtacagaagatttaagttcatgcactagtgtgcctgagatgaatgaagacgggaacaggaaagaaagcaactgtgccaaagacctcagaagtcagccacctactagaataccaacactggttgacaaagagacaaacactgatgaagccgctaatgacaatatggcagttcgccccaaagagcgcagcagcctgagctctagacagcatccgtttgtgaggagcagtgtgatagtgcgctcacagaccttttctccaggagagcggaaccagtacatctgcaggttaaatcggagtgacagtgacagttcaaccctggctaaaaaatcactgtttgtgagaaactccaccgaacgccgcagtttgagggtcaaaaggacggtttgccagtcagtccttagaagaacaacacaggaatgcccagtgcggacatctctagacttagaactggaccttcaggcatctctgacccggcagagccgcctcaatgatgagctgcaggcgctgagggacttgcggcagaagctggaggaactgaaagctcagggagagactgaccttccaccaggcgtgctggaggatgagaggttccagaggcttctgaagcaagctgagaagcaggctgaacagtccaaagaagagcagaagcaaggtctgaatgcagagaagttgatgaggcaagtctccaaggacgtgtgtcggctccgggagcagagccagaaggtgcctcggcaggtgcagtccttcagggagaagattgcctacttcaccagagcaaagataagcatcccatccctgccagctgatgatgtgtgattacatgacttaagaaattattttttcatctgttcactttcttagggagggtaaaagactgaagatttgtgtttttgttttggtgtttggttttttttggtaacgtaactgtcaactcttgaagaacttttatttcacatcagattttcaacacattaatttgtaaagtaccttgagtgtaatttttatatgcttaaaaaagaaaaaatcatataagaaagatgggataacctggtacacaaatgttgcccagtatgtgcgcattgccagtggacttcattttgtaaaaatggaatagaggcagtaccccacatgtgtactgttgagccggctgttgagaaacaacttggttcagccggtggttttgcttctcctttgtgttcctgtgagtaggctgtgccgatggcagcagcgccacgtggtatctgtgcgctggcgaggagaggagcgctttccatttggaggcagtgtgagcacacgctggagtgcagcgttccaaagtccgcccgaaatggatgctgcgtccacggccatcacctgtgcgggaacacctggtttccttaagacaatttcctttttgtccttttatatttttctaaagaaaactaagatataaactaccaagtgctcttaagaataaaaataagaataagaatacaaaggagcactactcttggctacacgaaagatcttgggattcatgacactgagggcagggagaagaaagaacaccagccacgcagagatacaaataagctcatcaaatgagcagctggtttgtctcactcagcctgaatttgcattaagtgttcaaaagtgagtttctggcttgcactagtgttttgccctaaatctaaggatggtgcctagtggtggccctgtgttctgaggacagagagagctggaggggtggagggaaatgcatcggcactcatttggtgtaaccaagaagagggggaaagatgtcttgatagaatcaaagttgccaaaaacaaagaagagtttatcaagcagatttctaacatttagtagaaactacttcatagctctcatttttagggggttctatctataatttatggtaaatagttgggaggcaaagggaagaatgtgtgtggggggattattaatttgaagtataagctaaattgtttattaaaaagcctattttggatgaacaagtttagagagataaactgactaatgtgtcctccagtttagaatttcaccttacccgacccaggcacttcttaaaaacacagatcctcagtgcagctctgccagcatcaaggcttttaaaatatgtagtatttaggccatttaaaccatacttattactcaataacccaagaaacaattttgggttagccatctaatatagcaaataaaatagattttttaaagaaatccaaaattgtcttaaaggaatggaccccttgaagaaaaaaaaaaaaagttttgttcctcagttagaatgctcactagctcactagcaagaatttttattttcttgaaagcaattatatatattttggaaagttcatgttattggaattgaagttcaaattaagcaacttctgagcctagaactttaattactttttcctaaatgtcccaacacttacatacaaatttctttgaagacataactggacatggcagacactgctttgaacaaaaaccagcctagtgaattgactgagtacagtcctttaaggctgcccagttcattctattagatgactaaggaaaactagaaaaagaatacagttcacccttgtcaaggtcaaatgtgaaagacagaagtttatttaatgtagaggtaaatgaaggtgagctgttttcagcatcttagtttgaccatgaaaatgtctatagaattatgtgtagttgttccgtacgattttattttcttcatttatttatttacagtcttatttatgttctgtttaatatatagtttgattctggccattttaaatatttgacacagaagagactatattggaatatttacagctttataagtctttcatcagattagctgttgactttttgtaatacaaaaagtttcagacaagtattaaagaataaaatctgtctcaggctggtagttagcagttgtgaccaagatgcttttggttgttgtatttcacaaaatttcctcatttctaacatgagagatgaacttattttaatataatcctttttctacactttaaaagtcagcaatagtgttatgtatttataggcagcttttaataatcttgtcatatttgtactaacccaaatgattcacagtgacaaaacattttaataacttgatcacaaaaccatatggacaaatatgaattttaatattataaatactatttttaaaaggtagaatttattcgcacagggtaaaaagaatgtaatatttagttctcaagtttgaattatcagtatattattacaattttgtatatcagaatcttaagtgttacaggtacaaaaagaatattgctagccaaatgaacaaagtttagctaaatctctgtagcatgcaaatcaaataaattaaaattttttgctattgctttatctatattgtcttaaatatcaaaagctcaggactgaacttaatatttaatcaggttaaattctgaacatgtttctgttttaatttgtcttgtttgtaaacgtatgcaaatacatcacatagatt

SEQ ID NO: 5325 - protein, 320 aa, Homo sapiens; identical to SEQ ID NO: 5323

SEQ ID NO: 5326 - DNA, 4015 bp, Homo sapiens
tgagtctgtttatttcccagataacaacttagcatgcccaggttgcgtgttcatggagcatgcctgcctaccaaaagtgttttgtttttgttttaccataggctaacaatgctaagagaggcctctgatgaaattgtggctgaaaaagaggctgaagttaaattgccagaggacagtagctgtacagaagatttaagttcatgcactagtgtgcctgagatgaatgaagacgggaacaggaaagaaagcaactgtgccaaagacctcagaagtcagccacctactagaataccaacactggttgacaaagagacaaacactgatgaagccgctaatgacaatatggcagttcgccccaaagagcgcagcagcctgagctctagacagcatccgtttgtgaggagcagtgtgatagtgcgctcacagaccttttctccaggagagcggaaccagtacatctgcaggttaaatcggagtgacagtgacagttcaaccctggctaaaaaatcactgtttgtgagaaactccaccgaacgccgcagtttgagggtcaaaaggacggtttgccagtcagtccttagaagaacaacacaggaatgcccagtgcggacatctctagacttagaactggaccttcaggcatctctgacccggcagagccgcctcaatgatgagctgcaggcgctgagggacttgcggcagaagctggaggaactgaaagctcagggagagactgaccttccaccaggcgtgctggaggatgagaggttccagaggcttctgaagcaagctgagaagcaggctgaacagtccaaagaagagcagaagcaaggtctgaatgcagagaagttgatgaggcaagtctccaaggacgtgtgtcggctccgggagcagagccagaaggtgcctcggcaggtgcagtccttcagggagaagattgcctacttcaccagagcaaagataagcatcccatccctgccagctgatgatgtgtgattacatgacttaagaaattattttttcatctgttcactttcttagggagggtaaaagactgaagatttgtgtttttgttttggtgtttggttttttttggtaacgtaactgtcaactcttgaagaacttttatttcacatcagattttcaacacattaatttgtaaagtaccttgagtgtaatttttatatgcttaaaaaagaaaaaatcatataagaaagatgggataacctggtacacaaatgttgcccagtatgtgcgcattgccagtggacttcattttgtaaaaatggaatagaggcagtaccccacatgtgtactgttgagccggctgttgagaaacaacttggttcagccggtggttttgcttctcctttgtgttcctgtgagtaggctgtgccgatggcagcagcgccacgtggtatctgtgcgctggcgaggagaggagcgctttccatttggaggcagtgtgagcacacgctggagtgcagcgttccaaagtccgcccgaaatggatgctgcgtccacggccatcacctgtgcgggaacacctggtttccttaagacaatttcctttttgtccttttatatttttctaaagaaaactaagatataaactaccaagtgctcttaagaataaaaataagaataagaatacaaaggagcactactcttggctacacgaaagatcttgggattcatgacactgagggcagggagaagaaagaacaccagccacgcagagatacaaataagctcatcaaatgagcagctggtttgtctcactcagcctgaatttgcattaagtgttcaaaagtgagtttctggcttgcactagtgttttgccctaaatctaaggatggtgcctagtggtggccctgtgttctgaggacagagagagctggaggggtggagggaaatgcatcggcactcatttggtgtaaccaagaagagggggaaagatgtcttgatagaatcaaagttgccaaaaacaaagaagagtttatcaagcagatttctaacatttagtagaaactacttcatagctctcatttttagggggttctatctataatttatggtaaatagttgggaggcaaagggaagaatgtgtgtggggggattattaatttgaagtataagctaaattgtttattaaaaagcctattttggatgaacaagtttagagagataaactgactaatgtgtcctccagtttagaatttcaccttacccgacccaggcacttcttaaaaacacagatcctcagtgcagctctgccagcatcaaggcttttaaaatatgtagtatttaggccatttaaaccatacttattactcaataacccaagaaacaattttgggttagccatctaatatagcaaataaaatagattttttaaagaaatccaaaattgtcttaaaggaatggaccccttgaagaaaaaaaaaaaaagttttgttcctcagttagaatgctcactagctcactagcaagaatttttattttcttgaaagcaattatatatattttggaaagttcatgttattggaattgaagttcaaattaagcaacttctgagcctagaactttaattactttttcctaaatgtcccaacacttacatacaaatttctttgaagacataactggacatggcagacactgctttgaacaaaaaccagcctagtgaattgactgagtacagtcctttaaggctgcccagttcattctattagatgactaaggaaaactagaaaaagaatacagttcacccttgtcaaggtcaaatgtgaaagacagaagtttatttaatgtagaggtaaatgaaggtgagctgttttcagcatcttagtttgaccatgaaaatgtctatagaattatgtgtagttgttccgtacgattttattttcttcatttatttatttacagtcttatttatgttctgtttaatatatagtttgattctggccattttaaatatttgacacagaagagactatattggaatatttacagctttataagtctttcatcagattagctgttgactttttgtaatacaaaaagtttcagacaagtattaaagaataaaatctgtctcaggctggtagttagcagttgtgaccaagatgcttttggttgttgtatttcacaaaatttcctcatttctaacatgagagatgaacttattttaatataatcctttttctacactttaaaagtcagcaatagtgttatgtatttataggcagcttttaataatcttgtcatatttgtactaacccaaatgattcacagtgacaaaacattttaataacttgatcacaaaaccatatggacaaatatgaattttaatattataaatactatttttaaaaggtagaatttattcgcacagggtaaaaagaatgtaatatttagttctcaagtttgaattatcagtatattattacaattttgtatatcagaatcttaagtgttacaggtacaaaaagaatattgctagccaaatgaacaaagtttagctaaatctctgtagcatgcaaatcaaataaattaaaattttttgctattgctttatctatattgtcttaaatatcaaaagctcaggactgaacttaatatttaatcaggttaaattctgaacatgtttctgttttaatttgtcttgtttgtaaacgtatgcaaatacatcacatagattaactggtttctgcactttccatgtgtttgtgggtggaaaaaaattcagtggttttttttaaaaaaaaaagcaaaaacaaagctacatattgcctaatactctatttcagtgtcgtttattgttcagtttatttccctgattggcacaaacacaagagtttccttgaaccatgtaccaagcaaatacaaaatatttcatgaagaaatccccaggctggcagtttgtgatgaatagttcttgttggaactatatgtattgctgataaaaaaggacgaagtattttcattgagcaaataaaatgaagggctccag

SEQ ID NO: 5327 - protein, 320 aa, Homo sapiens; identical to SEQ ID NO: 5323

SEQ ID NO: 5328 - DNA, 6041 bp, Homo sapiens
tgagtctgtttatttcccagataacaacttagcatgcccaggttgcgtgttcatggagcatgcctgcctaccaaaagtgttttgtttttgttttaccataggctaacaatgctaagagaggcctctgatgaaattgtggctgaaaaagaggctgaagttaaattgccagaggacagtagctgtacagaagatttaagttcatgcactagtgtgcctgagatgaatgaagacgggaacaggaaagaaagcaactgtgccaaagacctcagaagtcagccacctactagaataccaacactggttgacaaagagacaaacactgatgaagccgctaatgacaatatggcagttcgccccaaagagcgcagcagcctgagctctagacagcatccgtttgtgaggagcagtgtgatagtgcgctcacagaccttttctccaggagagcggaaccagtacatctgcaggttaaatcggagtgacagtgacagttcaaccctggctaaaaaatcactgtttgtgagaaactccaccgaacgccgcagtttgagggtcaaaaggacggtttgccagtcagtccttagaagaacaacacaggaatgcccagtgcggacatctctagacttagaactggaccttcaggcatctctgacccggcagagccgcctcaatgatgagctgcaggcgctgagggacttgcggcagaagctggaggaactgaaagctcagggagagactgaccttccaccaggcgtgctggaggatgagaggttccagaggcttctgaagcaagctgagaagcaggctgaacagtccaaagaagagcagaagcaaggtctgaatgcagagaagttgatgaggcaagtctccaaggacgtgtgtcggctccgggagcagagccagaaggtgcctcggcaggtgcagtccttcagggagaagattgcctacttcaccagagcaaagataagcatcccatccctgccagctgatgatgtgtgattacatgacttaagaaattattttttcatctgttcactttcttagggagggtaaaagactgaagatttgtgtttttgttttggtgtttggttttttttggtaacgtaactgtcaactcttgaagaacttttatttcacatcagattttcaacacattaatttgtaaagtaccttgagtgtaatttttatatgcttaaaaaagaaaaaatcatataagaaagatgggataacctggtacacaaatgttgcccagtatgtgcgcattgccagtggacttcattttgtaaaaatggaatagaggcagtaccccacatgtgtactgttgagccggctgttgagaaacaacttggttcagccggtggttttgcttctcctttgtgttcctgtgagtaggctgtgccgatggcagcagcgccacgtggtatctgtgcgctggcgaggagaggagcgctttccatttggaggcagtgtgagcacacgctggagtgcagcgttccaaagtccgcccgaaatggatgctgcgtccacggccatcacctgtgcgggaacacctggtttccttaagacaatttcctttttgtccttttatatttttctaaagaaaactaagatataaactaccaagtgctcttaagaataaaaataagaataagaatacaaaggagcactactcttggctacacgaaagatcttgggattcatgacactgagggcagggagaagaaagaacaccagccacgcagagatacaaataagctcatcaaatgagcagctggtttgtctcactcagcctgaatttgcattaagtgttcaaaagtgagtttctggcttgcactagtgttttgccctaaatctaaggatggtgcctagtggtggccctgtgttctgaggacagagagagctggaggggtggagggaaatgcatcggcactcatttggtgtaaccaagaagagggggaaagatgtcttgatagaatcaaagttgccaaaaacaaagaagagtttatcaagcagatttctaacatttagtagaaactacttcatagctctcatttttagggggttctatctataatttatggtaaatagttgggaggcaaagggaagaatgtgtgtggggggattattaatttgaagtataagctaaattgtttattaaaaagcctattttggatgaacaagtttagagagataaactgactaatgtgtcctccagtttagaatttcaccttacccgacccaggcacttcttaaaaacacagatcctcagtgcagctctgccagcatcaaggcttttaaaatatgtagtatttaggccatttaaaccatacttattactcaataacccaagaaacaattttgggttagccatctaatatagcaaataaaatagattttttaaagaaatccaaaattgtcttaaaggaatggaccccttgaagaaaaaaaaaaaaagttttgttcctcagttagaatgctcactagctcactagcaagaatttttattttcttgaaagcaattatatatattttggaaagttcatgttattggaattgaagttcaaattaagcaacttctgagcctagaactttaattactttttcctaaatgtcccaacacttacatacaaatttctttgaagacataactggacatggcagacactgctttgaacaaaaaccagcctagtgaattgactgagtacagtcctttaaggctgcccagttcattctattagatgactaaggaaaactagaaaaagaatacagttcacccttgtcaaggtcaaatgtgaaagacagaagtttatttaatgtagaggtaaatgaaggtgagctgttttcagcatcttagtttgaccatgaaaatgtctatagaattatgtgtagttgttccgtacgattttattttcttcatttatttatttacagtcttatttatgttctgtttaatatatagtttgattctggccattttaaatatttgacacagaagagactatattggaatatttacagctttataagtctttcatcagattagctgttgactttttgtaatacaaaaagtttcagacaagtattaaagaataaaatctgtctcaggctggtagttagcagttgtgaccaagatgcttttggttgttgtatttcacaaaatttcctcatttctaacatgagagatgaacttattttaatataatcctttttctacactttaaaagtcagcaatagtgttatgtatttataggcagcttttaataatcttgtcatatttgtactaacccaaatgattcacagtgacaaaacattttaataacttgatcacaaaaccatatggacaaatatgaattttaatattataaatactatttttaaaaggtagaatttattcgcacagggtaaaaagaatgtaatatttagttctcaagtttgaattatcagtatattattacaattttgtatatcagaatcttaagtgttacaggtacaaaaagaatattgctagccaaatgaacaaagtttagctaaatctctgtagcatgcaaatcaaataaattaaaattttttgctattgctttatctatattgtcttaaatatcaaaagctcaggactgaacttaatatttaatcaggttaaattctgaacatgtttctgttttaatttgtcttgtttgtaaacgtatgcaaatacatcacatagattaactggtttctgcactttccatgtgtttgtgggtggaaaaaaattcagtggttttttttaaaaaaaaaagcaaaaacaaagctacatattgcctaatactctatttcagtgtcgtttattgttcagtttatttccctgattggcacaaacacaagagtttccttgaaccatgtaccaagcaaatacaaaatatttcatgaagaaatccccaggctggcagtttgtgatgaatagttcttgttggaactatatgtattgctgataaaaaaggacgaagtattttcattgagcaaataaaatgaagggctccagaatatgtgctctgtggtcgctgcgcctgggctggcagtgtgctccacagagaggcagccgtcccaggaggttatctacccacacaccccagtcctgccctgccgtgccccccacaggctgctcagtgcctgggaagccagaaacgctgcccgtgaaatacagaacacaggatgcagaagcacgtttgtgtggcagagtctacttgaatcatccaaaacccaagatcgccctcctgcctctgacagtatagaaggcgtgactgaatgtggctgccttttgaaaaaggttccatagagacactgaggtctctgattcagaaggagatgatgtgtctacacctttcacctctgaagcttctaaagagctagtaattattttatataataagacgtcatgcattttaaataaatatgcaacaagacctcaggcttattatactaggttatcttaaacacctgaaataagtaaatgatttgccaaatgattccgctccatatgaataataccttcaaagatacatagagattaatgttttatttaccacttctgtgcaatcgctattttaaaattgagaaaactcatccacagtaatgggtgtcattactattcagtcttgattgattttggtctcagactagaagataaaaatggtttaccagtcttggaaagaaactatagtttaatagccacaggaaaagatgcattttcaaaaatcaaaagcacagtgagatgactagagcgggacatcctaccaaatccagtgttgagcaagcgtctcctgaacagcagacgcttgtcctttctggcttagtgtttcaggttggtgtttctcgtctccagttcttgatgatgatcttgtgtttgtgccactgcgtagtggcccgaagctaggggagcgtggctggagcaggctgcacagtggagcagacaccctcctagcagaagagaaagtccagcaaaccagcccagaaacagggcctccccaaactcccacctggggacaaagtctgggacgttctcatcccagaactcctgaaccgtcttgtgggcaacccaagagacgggaaccagggctgtgactcccgaggcccaggacagaattcctcccaggatcagcagtcgcctcttgagatctctctgactctctccaattctcaaacagtccaggccaaacccagagaccagcaggcccagaaatcccagcccatttgacagaaacattaagatcctggagaccctgagttcagcaggcaaagccaggaaggagtcaaagtccttgcattgcatccccacttcctcttggatgacacaggtttgccagagtcccatggtccagttttccatttcatttaagtccaggttgaggttcttccagtgtggcaggtagtttgtaagacaggataaaacccatcccagcaaagataatgaaactccagctagttgagctacagttctaaatactaaagccattataatgtcctgagagctttagccaaactaactcctgcccttcggttgctgtgaaaagaagtgtgacacttgtgttataacttatgaaactcagaaatatttcttcattgtgtatataggaggattcttgccagagttgctattgtttgattccatgttgaatgggtttcacaaaaggatagggaaataatgccgccaaccagtaatgccaaggtgtggccaagattgtgtttgtgtcctgtgggctggatttgacagaaagcagtttgtcactgaaatataattaagtgataatctcctttcattgtcaaggttaaaatggctttcatgttattcccaacctttctaacaaagaattaagtctaaatgcaaaatgtttaactgatggttttggttcaactcctcctgctttgtgtttcactaactgcacctgtcagattttcatctcttatagttctcacatttcaaatgtgcatgttatggtaatactgagtgttattttttaaaaataggtttaagaaaagtatttcttaaccaaataaatcaatcttatcag

SEQ ID NO: 5329 - protein, 320 aa, Homo sapiens; identical to SEQ ID NO: 5323

SEQ ID NO: 5330 - DNA, 2456 bp, Homo sapiens
gaattgaagttcaaattaagcaacttctgagcctagaactttaattactttttcctaaatgtcccaacacttacatacaaatttctttgaagacataactggacatggcagacactgctttgaacaaaaaccagcctagtgaattgactgagtacagtcctttaaggctgcccagttcattctattagatgactaaggaaaactagaaaaagaatacagttcacccttgtcaaggtcaaatgtgaaagacagaagtttatttaatgtagaggtaaatgaaggtgagctgttttcagcatcttagtttgaccatgaaaatgtctatagaattatgtgtagttgttccgtacgattttattttcttcatttatttatttacagtcttatttatgttctgtttaatatatagtttgattctggccattttaaatatttgacacagaagagactatattggaatatttacagctttataagtctttcatcagattagctgttgactttttgtaatacaaaaagtttcagacaagtattaaagaataaaatctgtctcaggctggtagttagcagttgtgaccaagatgcttttggttgttgtatttcacaaaatttcctcatttctaacatgagagatgaacttattttaatataatcctttttctacactttaaaagtcagcaatagtgttatgtatttataggcagcttttaataatcttgtcatatttgtactaacccaaatgattcacagtgacaaaacattttaataacttgatcacaaaaccatatggacaaatatgaattttctcaagtttgaattatcagtatattattacaattttgtatatcagaatcttaagtgttacaggtacaaaaagaatattgctagccaaatgaacaaagtttagctaaatctctgtagcatgcaaatcaaataaattaaaattttttgctattgctttatctatattgtcttaaatatcaaaagctcaggactgaacttaatatttaatcaggttaaattctgaacatgtttctgttttaatttgtcttgtttgtaaacgtatgcaaatacatcacatagattaactggtttctgcactttccatgtgtttgtgggtggaaaaaaattcagtggttttttttaaaaaaaaaagcaaaaacaaagctacatattgcctaatactctatttcagtgtcgtttattgttcagtttatttccctgattggcacaaacacaagagtttccttgaaccatgtaccaagcaaatacaaaatatttcatgaagaaatccccaggctggcagtttgtgatgaatagttcttgttggaactatatgtattgctgataaaaaaggacgaagtattttcattgagcaaataaaatgaagggctccagaatatgtgctctgtggtcgctgcgcctgggctggcagtgtgctccacagagaggcagccgtcccaggaggttatctacccacacaccccagtcctgccctgccgtgccccccacaggctgctcagtgcctgggaagccagaaacgctgcccgtgaaatacagaacacaggatgcagaagcacgtttgtgtggcagagtctacttgaatcatccaaaacccaagatcgccctcctgcctctgacagtatagaaggcgtgactgaatgtggctgccttttgaaaaaggttccatagagacactgaggtctctgattcagaaggagatgatgtgtctacacctttcacctctgaagcttctaaagagctagtaattattttatataataagacgtcatgcattttaaataaatatgcaacaagacctcaggcttattatactaggttatcttaaacacctgaaataagtaaatgatttgccaaatgattccgctccatatgaataataccttcaaagatacatagagattaatgttttatttaccacttctgtgcaatcgctattttaaaattgagaaaactcatccacagtaatgggtgtcattactattcagtcttgattgattttggtctcagactagaagataaaaatggtttaccagtcttggaaagaaactatagtttaatagccacaggaaaagatgcattttcaaaaatcaaaagcacagtgagatgactagagcgggacatcctaccaaatccagtgttgagcaagcgtctcctgaacagcagacgcttgtcctttctggcttagtgtttcaggttggtgtttctcgtctccagttcttgatgatgatcttgtgtttgtgccactgcgtagtggcccgaagctaggggagcgtggctggagcaggctgcacagtggagcagacaccctcctagcagaagagaaagtccagcaaaccagcccagaaacagggcctccccaaactcccacctggggacaaagtctgggacgttctcatcccagaactcctgaaccgtcttgtgggcaacccaag

SEQ ID NO: 5331 - protein, 36 aa, Homo sapiens
MNFLKFELSVYYYNFVYQNLKCYRYKKNIASQMNKV

SEQ ID NO: 5332 - DNA, 2708 bp, Homo sapiens
ctgataagattgatttatttggttaagaaatacttttcttaaacctatttttaaaaaataacactcagtattaccataacatgcacatttgaaatgtgagaactataagagatgaaaatctgacaggtgcagttagtgaaacacaaagcaggaggagttgaaccaaaaccatcagttaaacattttgcatttagacttaattctttgttagaaaggttgggaataacatgaaagccattttaaccttgacaatgaaaggagattatcacttaattatatttcagtgacaaactgctttctgtcaaatccagcccacaggacacaaacacaatcttggccacaccttggcattactggttggcggcattatttccctatccttttgtgaaacccattcaacatggaatcaaacaatagcaactctggcaagaatcctcctatatacacaatgaagaaatatttctgagtttcataagttataacacaagtgtcacacttcttttcacagcaaccgaagggcaggagttagtttggctaaagctctcaggacattataatggctttagtatttagaactgtagctcaactagctggagtttcattatctttgctgggatgggttttatcctgtcttacaaactacctgccacactggaagaacctcaacctggacttaaatgaaatggaaaactggaccatgggactctggcaaacctgtgtcatccaagaggaagtggggatgcaatgcaaggactttgactccttcctggctttgcctgctgaactcagggtctccaggatcttaatgtttctgtcaaatgggctgggatttctgggcctgctggtctctgggtttggcctggactgtttgagaattggagagagtcagagagatctcaagaggcgactgctgatcctgggaggaattctgtcctgggcctcgggagtcacagccctggttcccgtctcttgggttgcccacaagacggttcaggagttctgggatgagaacgtcccagactttgtccccaggtgggagtttggggaggccctgtttctgggctggtttgctggactttctcttctgctaggagggtgtctgctccactgtgcagcctgctccagccacgctcccctagcttcgggccactacgcagtggcacaaacacaagatcatcatcaagaactggagacgagaaacaccaacctgaaacactaagccagaaaggacaagcgtctgctgttcaggagacgcttgctcaacactggatttggtaggatgtcccgctctagtcatctcactgtgcttttgatttttgaaaatgcatcttttcctgtggctattaaactatagtttctttccaagactggtaaaccatttttatcttctagtctgagaccaaaatcaatcaagactgaatagtaatgacacccattactgtggatgagttttctcaattttaaaatagcgattgcacagaagtggtaaataaaacattaatctctatgtatctttgaaggtattattcatatggagcggaatcatttggcaaatcatttacttatttcaggtgtttaagataacctagtataataagcctgaggtcttgttgcatatttatttaaaatgcatgacgtcttattatataaaataattactagctctttagaagcttcagaggtgaaaggtgtagacacatcatctccttctgaatcagagacctcagtgtctctatggaacctttttcaaaaggcagccacattcagtcacgccttctatactgtcagaggcaggagggcgatcttgggttttggatgattcaagtagactctgccacacaaacgtgcttctgcatcctgtgttctgtatttcacgggcagcgtttctggcttcccaggcactgagcagcctgtggggggcacggcagggcaggactggggtgtgtgggtagataacctcctgggacggctgcctctctgtggagcacactgccagcccaggcgcagcgaccacagagcacatattctggagcccttcattttatttgctcaatgaaaatacttcgtccttttttatcagcaatacatatagttccaacaagaactattcatcacaaactgccagcctggggatttcttcatgaaatattttgtatttgcttggtacatggttcaaggaaactcttgtgtttgtgccaatcagggaaataaactgaacaataaacgacactgaaatagagtattaggcaatatgtagctttgtttttgcttttttttttaaaaaaaaccactgaatttttttccacccacaaacacatggaaagtgcagaaaccagttaatctatgtgatgtatttgcatacgtttacaaacaagacaaattaaaacagaaacatgttcagaatttaacctgattaaatattaagttcagtcctgagcttttgatatttaagacaatatagataaagcaatagcaaaaaattttaatttatttgatttgcatgctacagagatttagctaaactttgttcatttggctagcaatattctttttgtacctgtaacacttaagattctgatatacaaaattgtaataatatactgataattcaaacttgagaactaaatattacattctttttaccctgtgcgaataaattctaccttttaaaaatagtatttataatattaaaattcatatttgtccat

SEQ ID NO: 5333 - protein, 220 aa, Homo sapiens
MALVFRTVAQLAGVSLSLLGWVLSCLTNYLPHWKNLNLDLNEMENWTMGLWQTCVIQEEVGMQCKDFDSFLALPAELRVSRILMFLSNGLGFLGLLVSGFGLDCLRIGESQRDLKRRLLILGGILSWASGVTALVPVSWVAHKTVQEFWDENVPDFVPRWEFGEALFLGWFAGLSLLLGGCLLHCAACSSHAPLASGHYAVAQTQDHHQELETRNTNLKH

SEQ ID NO: 5334 - DNA, 663 bp, Homo sapiens
atggctttaatctttagaacagcaatgcaatctgttggacttttactatctctcctgggatggattttatccattattacaacttatttgccacactggaagaacctcaacctggacttaaatgaaatggaaaactggaccatgggactctggcaaacctgtgtcatccaagaggaagtggggatgcaatgcaaggactttgactccttcctggctttgcctgctgaactcagggtctccaggatcttaatgtttctgtcaaatgggctgggatttctgggcctgctggtctctgggtttggcctggactgtttgagaattggagagagtcagagagatctcaagaggcgactgctcattctgggaggaattctgtcctgggcctcgggaatcacagccctggttcccgtctcttgggttgcccacaagacggttcaggagttctgggatgagaacgtcccagactttgtccccaggtgggagtttggggaggccctgtttctgggctggtttgctggactttctcttctgctaggagggtgtctgctcaactgcgcagcctgctccagccacgctcccctagctttgggccactatgcagtggcgcaaatgcaaactcagtgtccctacctggaagatgggacagcagatcctcaagtgtaa

SEQ ID NO: 5335 - protein, 220 aa, Homo sapiens
MALIFRTAMQSVGLLLSLLGWILSIITTYLPHWKNLNLDLNEMENWTMGLWQTCVIQEEVGMQCKDFDSFLALPAELRVSRILMFLSNGLGFLGLLVSGFGLDCLRIGESQRDLKRRLLILGGILSWASGITALVPVSWVAHKTVQEFWDENVPDFVPRWEFGEALFLGWFAGLSLLLGGCLLNCAACSSHAPLALGHYAVAQMQTQCPYLEDGTADPQV

SEQ ID NO: 5336 - DNA, 469 bp, Homo sapiens
ccgagacttctgatgcataaagcatgcaacttcgcgcacggatgtactttccatttgaagtactgctagagatttgtgccctcaaacacgggaattttggatttgagggaaacttggcaagaaacactgcctctgaatccagcctccctgccgcagccccaggtcgagcaggtggaccggaaccacggtcactgaccagggtatctgatcctctcagtctgaaggaaagtgagaactcagcacaaacgccatggacggtacagtgtgggagggagcagcctagagagagaagcacgaagcactcgctcatgtcggaggaggaggaagagcgatccatgggcaggggaatttgagagagagacctccttcagacccggttagcgcactgttttcaaaaaacctgaatggaacaacctgttgagagagcaaagagcgcttgtgtttgtggcacacgggagcctggcggccg

SEQ ID NO: 5337 - protein, 109 aa, Homo sapiens
MQLRARMYFPFEVLLEICALKHGNFGFEGNLARNTASESSLPAAAPGRAGGPEPRSLTRVSDPLSLKESENSAQTPWTVQCGREQPRERSTKHSLMSEEEEERSMGRGI

SEQ ID NO: 5338 - DNA, 720 bp, Homo sapiens
gagcagggtgggccccggggccgggccgcgtggggttctccgtcctccgggtgcagccagacctggcggtgcagcggcagcaccagtgagaggcgaagggggcctgtgaggcaagggggacttccaggccctgagcatctcaagaaaacagccatgaagccccacacccaggtgccaggtgcagaggccaaggggtcctggggacaggagcggctgatctccctcagggtagagcagcagcgcgcccagggacagaaccgcctgccctgccgcgggagggggacagggacccaccctggcctggggcccacagagtccagaggaccaggagctcgcccctgctcccagcaggaggaagggagcggaggaacacccctcctggggacttgaagctggaattgactgagtacttactggatagagaccggtttaaactgagagagactgttcaaactggagcaaagtgaaaagctgttacccagataatcaggtcttaaaattggccaagaaggtgttttttcttttctttgccacaggatcatggttttttccattgttattaaagattcagttgcctcacctgagccacaatagatgcggtagaaacgggacacctcagagatttgattttgtcacgctctgaaattcatagtaaatctcatcatgccactccaatctctacccccaaatccctgtccaaagtccacaatccttggtgtg

SEQ ID NO: 5339 - protein, 78 aa, Homo sapiens
MKPHTQVPGAEAKGSWGQERLISLRVEQQRAQGQNRLPCRGRGTGTHPGLGPTESRGPGARPCSQQEEGSGGTPLLGT

SEQ ID NO: 5340 - DNA, 334 bp, Homo sapiens
acttcatctggacaacagatgcatcagctacactaaggcccgatccgagacttctgatgcataaagcatgcaacttcgcgcacggatgtactttccatttgaagtactgctagagatttgtgccctcaaacacgggaattttgcaaatgccagcccagacggaccaattgtcccagagaaggtaggggacatcttagccttctaattcaaatggaaaatttcctgctcccctgttgtcaattcctgcccggcactacgtgcagcggagatgagaaaagccacttcctttgcattcatctggactgctgtgcttggagaacagaggagcatgcat

SEQ ID NO: 5341 - protein, 45 aa, Homo sapiens
MQLRARMYFPFEVLLEICALKHGNFANASPDGPIVPEKVGDILAF

SEQ ID NO: 5342 - DNA, 2267 bp, Homo sapiens
gcctgacatacgctggcgtatgctacagaggtctctcctcattcctgacttccttggcaggtgtcagagtgatatcgacgagtgctctggaaacccttgcctgcacggggccctctgtgagaacacgcacggctcctatcactgcaactgcagccacgagtacaggggacgtcactgcgaggatgctgcgcccaaccagtatgtgtccacgccgtggaacattgggttggcggaaggaattggaatcgttgtgtttgttgcagggatatttttactggtggtggtgtttgttctctgccgtaagatgattagtcggaaaaagaagcatcaggctgaacctaaagacaagcacctgggacccgctacggctttcttgcaaagaccgtattttgattccaagctaaataagaacatttactcagacataccaccccaggtgcctgtccggcctatttcctacaccccgagtattccaagtgactcaagaaacaatctggaccgaaattccttcgaaggatctgctatcccagagcatcccgaattcagcacttttaaccccgagtctgtgcacgggcaccgaaaagcagtggcggtctgcagcgtggcgccaaacctgcctcccccacccccttcaaactccccttctgacagcgactccatccagaagcctagctgggactttgactatgacacaaaagtggtggatcttgatccctgtctttccaagaagcctctagaggaaaagccttcccagccatacagtgcccgggaaagcctgtctgaagtgcagtctctgagctccttccagtccgaatcgtgcgatgacaatgggtatcactgggatacatcagattggatgccaagcgttcctctgccggacatacaagagttccccaactatgaggtgattgatgagcagacacccctgtactcagcagatccaaacgccatcgatacggactattaccctggaggctacgacatcgaaagtgattttcctccacccccagaagacttccccgcagctgatgagctaccaccgttaccgcccgaattcagcaatcagtttgaatccatccaccctcctagagacatgcctgccgcgggtagcttgggttcttcatcaagaaaccggcagaggttcaacttgaatcagtatttgcccaatttttatcccctcgatatgtctgaacctcaaacaaaaggcactggtgagaatagtacttgtagagaaccccatgccccttacccgccagggtatcaaagacacttcgaggcgcccgctgtcgagagcatgcccatgtctgtgtacgcctccaccgcctcctgctctgacgtgtcagcctgctgcgaagtggagtccgaggtcatgatgagtgactatgagagcggggacgacggccacttcgaagaggtgacgatcccgcccctggattcccagcagcacacggaagtctgactctcaactccccccaaagtgcctgactttagtgaacctagaggtgatgtgagtaatccgcgctgttctttgcagcagtgcttccaagctttttttggtgagccgaatgggcatggctgcgctggatcctgcgcctctggacgtgctagccatttccagtgtcccaactactgtcatcgtgaggttttcatcggctgtgccatttcccaacgtcttttgggatttacatctgtctgtgttaaaataatcaaacgaaaaatcagtcctgtgttgtcagcatgattcatgtatttatatagatttgattattttaattttcctgtctcttttttttgtaaattttatgtacagatttgatttttcatagttttaactagatttccaagatattttgtgcatttgtttcaactgaattttggtggtgtcagtgccattatctagcaccctgatttttttttttttactataaccagggtttcattctgtctttttccactgaagtgtgacattttgttagtacatttcagtgtagtcattcatttctagctgtacataggatgaaggagagatcagatacatgaacatgtcttacatgggttgctgtatttagaattataaacatttttcattattggaaagtgtaacggggaccttctgcatacctgtttagaaccaaaaccaccatgacacagtttttatagtgtctgtatatttgtgatgcaatggtcttgtaaaggtttttaatgaaaactaccattagccagtctttcttactgacaataaattattaataaaatacttgagcttt

SEQ ID NO: 5343 - protein, 479 aa, Homo sapiens
MLQRSLLIPDFLGRCQSDIDECSGNPCLHGALCENTHGSYHCNCSHEYRGRHCEDAAPNQYVSTPWNIGLAEGIGIVVFVAGIFLLVVVFVLCRKMISRKKKHQAEPKDKHLGPATAFLQRPYFDSKLNKNIYSDIPPQVPVRPISYTPSIPSDSRNNLDRNSFEGSAIPEHPEFSTFNPESVHGHRKAVAVCSVAPNLPPPPPSNSPSDSDSIQKPSWDFDYDTKVVDLDPCLSKKPLEEKPSQPYSARESLSEVQSLSSFQSESCDDNGYHWDTSDWMPSVPLPDIQEFPNYEVIDEQTPLYSADPNAIDTDYYPGGYDIESDFPPPPEDFPAADELPPLPPEFSNQFESIHPPRDMPAAGSLGSSSRNRQRFNLNQYLPNFYPLDMSEPQTKGTGENSTCREPHAPYPPGYQRHFEAPAVESMPMSVYASTASCSDVSACCEVESEVMMSDYESGDDGHFEEVTIPPLDSQQHTEV

SEQ ID NO: 5344 - DNA, 14774 bp, Homo sapiens
ctgggcggccgggcgcggggagagggcgcgggagcggctcgtgcggcaggtaccatgcggacgcgcgagcccggcgagggccccggcaggcccggtccctgctcgggggcgcgctgagacggcgggtgagctccacgagagcgccgtcgccacttcgggccaactttgcgattcccgacagttaagcaatggggagacatttggctttgctcctgcttctgctccttctcttccaacattttggagacagtgatggcagccaacgacttgaacagactcctctgcagtttacacacctcgagtacaacgtcaccgtgcaggagaactctgcagctaagacttatgtggggcatcctgtcaagatgggtgtttacattacacatccagcgtgggaagtaaggtacaaaattgtttccggagacagtgaaaacctgttcaaagctgaagagtacattctcggagacttttgctttctaagaataaggaccaaaggaggaaatacagctattcttaatagagaagtgaaggatcactacacattgatagtgaaagcacttgaaaaaaatactaatgtggaggcgcgaacaaaggtcagggtgcaggtgctggatacaaatgacttgagaccgttattctcacccacctcatacagcgtttctttacctgaaaacacagctataaggaccagtatcgcaagagtcagcgccacggatgcagacataggaaccaacggggaattttactacagttttaaagatcgaacagatatgtttgctattcacccaaccagtggtgtgatagtgttaactggtagacttgattacctagagaccaagctctatgagatggaaatcctcgctgcggaccgtggcatgaagttgtatgggagcagtggcatcagcagcatggccaagctaacggtgcacatcgaacaggccaatgaatgtgctccggtgataacagcagtgacattgtcaccatcagaactggacagggacccagcatatgcaattgtgacagtggatgactgcgatcagggtgccaatggtgacatagcatctttaagcatcgtggcaggtgaccttctccagcagtttagaacagtgaggtcctttccagggagtaaggagtataaagtcaaagccatcggtggcattgattgggacagtcatcctttcggctacaatctcacactacaggctaaagataaaggaactccgccccagttctcttctgttaaagtcattcacgtgacttctccacagttcaaagccgggccagtcaagtttgaaaaggatgtttacagagcagaaataagtgaatttgctcctcccaacacacctgtggtcatggtaaaggccattcctgcttattcccatttgaggtatgtttttaaaagtacacctggaaaagctaaattcagtttaaattacaacactggtctcatttctattttagaaccagttaaaagacagcaggcagcccattttgaacttgaagtaacaacaagtgacagaaaagcgtccaccaaggtcttggtgaaagtcttaggtgcaaatagcaatccccctgaatttacccagacagcgtacaaagctgcttttgatgagaacgtgcccattggtactactgtcatgagcctgagtgccgtagaccctgatgagggtgagaacgggtacgtgacatacagtatcgcaaatttaaatcatgtgccgtttgcgattgaccatttcactggtgccgtgagtacgtcagaaaacctggactacgaactgatgcctcgggtttatactctgaggattcgtgcatcagactggggcttgccgtaccgccgggaagtcgaagtccttgctacaattactctcaataacttgaatgacaacacacctttgtttgagaaaataaattgtgaagggacaattcccagagatctaggcgtgggagagcaaataaccactgtttctgctattgatgcagatgaacttcagttggtacagtatcagattgaagctggaaatgaactggatttctttagtttaaaccccaactcgggggtattgtcattaaagcgatcgctaatggatggcttaggtgcaaaggtgtctttccacagtctgagaatcacagctacagatggagaaaattttgccacaccattatatatcaacataacagtggctgccagtcacaagctggtaaacttgcagtgtgaagagactggtgttgccaaaatgctggcagagaagctcctgcaggcaaataaattacacaaccagggagaggtggaggatattttcttcgattctcactctgtcaatgctcacataccgcagtttagaagcactcttccgactggtattcaggtaaaggaaaaccagcctgtgggttccagtgtaattttcatgaactccactgaccttgacactggcttcaatggaaaactggtctatgctgtttctggaggaaatgaggatagttgcttcatgattgatatggaaacaggaatgctgaaaattttatctcctcttgaccgtgaaacaacagacaaatacaccctgaatattaccgtctatgaccttgggataccccagaaggctgcgtggcgtcttctacatgtcgtggttgtcgatgccaatgataatccacccgagtttttacaggagagctattttgtggaagtgagtgaagacaaggaggtacatagtgaaatcatccaggttgaagccacagataaagacctggggcccaacggacacgtgacgtactcaattgttacagacacagacacattttcaattgacagcgtgacgggtgttgttaacatcgcacgccctctggatcgagagctgcagcatgagcactccttaaagattgaggccagggaccaagccagagaagagcctcagctgttctccactgtcgttgtgaaagtatcactagaagatgttaatgacaacccacctacatttattccacctaattatcgtgtgaaagtccgagaggatcttccagaaggaaccgtcatcatgtggttagaagcccacgatcctgatttaggtcagtctggtcaggtgagatacagccttctggaccacggagaaggaaacttcgatgtggataaactcagtggagcagttaggatcgtccagcagttggactttgagaagaagcaagtgtataatctcactgtgagggccaaagacaagggaaagccagtttctctgtcttctacttgctatgttgaagttgaggtggttgatgtgaatgagaacctgcacccacccgtgttttccagctttgtggaaaaggggacagtgaaagaagatgcacctgttggttcattggtaatgacggtgtcggctcatgatgaggacgccagaagagatggggagatccgatactccattagagatggctctggcgttggtgttttcaaaataggtgaagagacaggtgtcatagagacgtcagatcgactggaccgtgaatcgacctcccattattggctaacagtctttgcaaccgatcagggtgtcgtgcctctttcatcgttcatagagatctacatagaggttgaggatgtcaatgacaatgcaccacagacatcagagcctgtttattacccagaaatcatggaaaattctcctaaagatgtatctgtggtccagatcgaggcatttgatccagattcgagctctaatgacaagctcatgtacaaaattacaagtggaaatccacaaggattcttttcaatacatcctaaaacaggtctcatcacaactacgtcaaggaagctagaccgagaacagcaagatgaacacatattagaggttactgtgacagacaatggtagtccccccaaatcaaccattgcaagagtcattgtgaaaatccttgatgaaaatgacaacaaacctcagtttctgcaaaagttctacaaaatcagactccctgagcgggaaaagccagaccgagaaagaaatgccagacgggagccgctctatcacgtcatagccaccgacaaggatgagggccccaatgcagaaatctcctacagcatcgaagacgggaatgagcatggcaaatttttcatcgaaccgaaaactggagtggtttcgtccaagaggttttcagcagctggagaatatgatattctttcaattaaggcagttgacaatggtcgccctcaaaagtcatcaaccaccagactccatattgaatggatctccaagcccaaaccgtccctggagcccatttcatttgaagaatcattttttacctttactgtgatggaaagtgaccccgttgctcacatgattggagtaatatctgtggagcctcctggcatacccctttggtttgacatcactggtggcaactacgacagtcacttcgatgtggacaagggaactggaaccatcattgttgccaaacctcttgatgcagaacagaagtcaaactacaacctcacagtcgaggctacagatggaaccaccactatcctcactcaggtattcatcaaagtaatagacacaaatgaccatcgtcctcagttttctacatcaaagtatgaagttgttattcctgaagatacagcgccagaaacagaaattttgcaaatcagtgctgtggatcaggatgagaaaaacaaactaatctacactctgcagagcagtagagatccactgagtctcaagaaatttcgtcttgatcctgcaaccggctctctctatacttctgagaaactggatcatgaagctgttcaccagcacaccctcacggtcatggtacgagatcaagatgtgcctgtaaaacgcaactttgcaaggattgtggtcaatgtcagcgacacgaatgaccacgccccgtggttcaccgcttcctcctacaaagggcgggtttatgaatcggcagccgttggctcagttgtgttgcaggtgacggctctggacaaggacaaagggaaaaatgctgaagtgctgtactcgatcgagtcaggtacttttggagaaatattggaaattcttttatgattgatcctgtcttgggctctattaaaactgccaaagaattagatcgaagtaaccaagcggagtatgatttaatggtaaaagctacagataagggcagtccaccaatgagtgaaataacttctgtgcgtatctttgtcacaattgctgacaacgcctctccgaagtttacatcaaaagaatattctgttgaacttagtgaaactgtcagcattgggagtttcgttgggatggttacagcccatagtcaatcatcagtggtgtatgaaataaaagatggaaatacaggtgatgcttttgatattaatccacattctggaactatcatcactcagaaagccctggactttgaaactttgcccatttacacattgataatacaaggaactaacatggctggtttgtccactaatacaacggttctagttcacttgcaggatgagaatgacaacgcgccagtttttatgcaggcagaatatacaggactcattagtgaatcagcctcaattaacagcgtggtcctaacagacaggaatgtcccactggtgattcgagcagctgatgctgataaagactcaaatgctttgcttgtatatcacattgttgaaccatctgtacacacatattttgctattgattctagcactggtgctattcatacagtactaagtctggactatgaagaaacaagtatttttcactttaccgtccaagtgcatgacatgggaaccccacgtttatttgctgagtatgcagcgaatgtaacagtacatgtaattgacattaatgactgcccccctgtgtttgccaagccattatatgaagcatctcttttgttaccaacatacaaaggagtaaaagtcatcacagtaaatgctacagatgctgattcaagtgcattctcacagttgatttactccatcaccgaaggcaacatcggggagaagttttctatggactacaagactggtgctctcactgtccaaaacacaactcagttaagaagccgctacgagctaaccgttagagcttccgatggcagatttgccggccttacctctgtcaaaattaatgtgaaagaaagcaaagaaagtcacctaaagtttacccaggatgtctactctgcggtagtgaaagagaattccaccgaggccgaaacattagctgtcattactgctattgggaatccaatcaatgagcctttgttttatcacatcctcaacccagatcgcagatttaaaataagccgcacttcaggagttctgtcaaccactggcacgcccttcgatcgtgagcagcaggaggcgtttgatgtggttgtagaagtgacagaggaacataagccttctgcagtggcccacgttgtcgtgaaggtcattgtagaagaccaaaatgataatgcgccggtgtttgtcaaccttccctactacgccgttgttaaagtggacactgaggtgggccatgtcattcgctatgtcactgctgtagacagagacagtggcagaaacggggaagtgcattactacctcaaggaacatcatgaacactttcaaattggacccttgggtgaaatttcactgaaaaagcaatttgagcttgacaccttaaataaagaatatcttgttacagtggttgcaaaagatggagggaacccggccttttcagcggaagttatcgttccgatcactgtcatgaataaagccatgcctgtgtttgaaaaacctttctacagtgcagagattgcagagagcatccaggtgcacagccctgtggtccacgtgcaggctaacagcccggaaggcctgaaagtgttctacagcatcacagacggagaccctttcagccagttcactattaacttcaatactggagttatcaatgtcatagctcctctggactttgaggcccacccggcatataagctgagcatacgcgcaactgactccttgacgggcgctcatgctgaagtatttgtggacatcatagtagacgacatcaatgataaccctcctgtgtttgctcagcagtcttatgcggtgaccctgtctgaggcatctgtaattggaacgtctgttgttcaagttagagccaccgattctgattcagaaccaaatagaggaatctcataccagatgtttgggaatcacagcaagagtcatgatcattttcatgtagacagcagcactggcctcatctcactactcagaaccctggattacgagcagtcccggcagcacacgatttttgtgagggcagttgatggtggtatgcccacgctgagcagtgatgtgattgtcacggtggacgttaccgacctcaatgataatccaccactctttgaacaacagatttatgaagccagaattagcgagcacgcccctcatgggcatttcgtgacctgtgtaaaagcctatgatgcagacagttcagacatagacaagttgcagtattccattctgtctggcaatgatcataaacattttgtcattgacagtgcaacagggattatcaccctctcaaacctgcaccggcacgccctgaagccattttacagtcttaacctgtcagtgtctgatggagtttttagaagttccacccaggttcatgtaactgtaattggaggcaatttgcacagtcctgctttccttcagaacgaatatgaagtggaactagctgaaaacgctcccctacataccctggtgatggaggtgaaaactacggatggggattctggtatttatggtcacgttacttaccatattgtaaatgactttgccaaagacagattttacataaatgagagaggacagatatttactttggaaaaacttgatcgagaaaccccggcggagaaagtgatctcagtccgtttaatggctaaggatgctggaggaaaagttgctttctgcaccgtgaatgtcatccttacagatgacaatgacaatgcaccacaatttcgagcaaccaaatacgaagtgaatatcgggtccagtgctgctaaagggacttcagtcgttaaagttcttgcaagtgatgccgatgagggctccaatgccgacatcacctatgccattgaagcagactctgaaagtgtaaaagagaatttggaaattaacaaactgtccggcgtaatcactacaaaggagagcctcattggcttggaaaatgaattcttcactttctttgttagagctgtggataatgggtctccatcaaaagaatctgttgttcttgtctatgttaaaatccttccaccggaaatgcagcttccaaaattttcagaacctttctatacctttacagtgtcagaggacgtgcctattggaacagagatagatctcatccgagcagaacatagtgggactgttctttacagcctggtcaaagggaatactccagaaagcaatagggatgagtcctttgtgattgacagacagagcgggagactgaagttggagaagagtcttgatcatgagacaactaagtggtatcagttttccatactggccaggtgcactcaagatgaccatgagatggtggcttctgtagatgttagtatccaagtgaaagatgcaaatgacaacagcccggtctttgaatctagtccatatgaggcattcattgttgaaaacctgccagggggaagtagagtaattcagatcagggcatctgatgctgactcaggaaccaacggccaagttatgtatagcctggatcagtcacaaagtgtggaagtcattgaatcctttgccattaacatggaaacaggctggattacaactttaaaggaacttgaccatgaaaagagagacaattaccagattaaagtggttgcatcagatcatggtgaaaagatccagctatcctccacagccattgtggatgttaccgtcaccgatgtcaacgatagtccaccacgattcacggccgagatctataaagggactgtgagtgaggatgacccccaaggtggggtgattgccatcttaagtaccacggatgctgattctgaagagatcaacagacaagttacatatttcataacaggaggggatcctttaggacagtttgccgttgaaactatacagaatgaatggaaggtatatgtgaagaaacctctagacagggaaaaaagggacaattaccttcttactatcacggcaactgatggcaccttctcatcaaaagcgatagttgaagtgaaagttctggatgcaaatgacaacagtccagtttgtgaaaagactttatattcagacactattcctgaagacgtccttcctggaaaattgatcatgcagatctctgctacagacgcagacatccgctctaacgctgaaattacttacacgttattgggttcaggtgcagaaaaattcaaactaaatccagacacaggtgaactgaaaacgtcaaccccccttgatcgtgaggagcaagctgtttatcatcttctcgtcagggccacagatggaggaggaagattctgccaagccagtattgtgctcacgctagaagatgtgaacgataacgcccccgaattctctgccgatccttatgccatcaccgtgtttgaaaacacagagccgggaacgctgctgacaagagtgcaggccacagatgccgacgcaggattaaatcggaagattttatactcactgattgactctgctgatgggcagttctccattaacgaattatctggaattattcagttagaaaaacctttggacagagaactccaggcagtatacaccctctctttgaaagctgtggatcaaggcttgccaaggaggctgactgccactggcactgtgattgtatcagttcttgacataaatgacaacccccctgtgtttgagtaccgtgaatatggtgccaccgtgtctgaggacattcttgttggaactgaagttcttcaagtgtatgcagcaagtcgggatattgaagcaaatgcagaaatcacctactcaataataagtggaaatgaacatgggaaattcagcatagattctaaaacaggggccgtatttatcattgagaatctggattatgagagctctcatgagtattacctaacagtagaggccactgatggaggcacgccttcactgagcgacgttgccactgtgaacgttaatgtaacagatatcaacgataatacccctgtgttcagccaagacacctacacgacagtcatcagtgaagatgccgttcttgagcagtctgtcatcacggttatggccgatgatgccgatggaccttccaacagccacatccactactcaattatagatggcaaccaaggaagctcgttcacaattgaccccgtcaggggagaagtcaaagtgaccaaacttctcgaccgagaaacgatttcaggttacacgctcacggttcaagcttctgataatggcagtccacccagagtcaacacgacgaccgtgaacatcgatgtgtccgatgtcaatgacaacgcgcccgtcttctccaggggaaactacagtgtcattatccaggaaaataagccagtgggcttcagcgtgctgcagctggtagtaacagatgaggattcttcccataacggtccacccttcttctttactattgtaactggaaatgatgagaaggcttttgaagttaacccgcaaggagtcctcctgacatcatctgccatcaagaggaaggagaaagatcattacttactgcaggtgaaggtggcagataatggaaagcctcagttgtcatctttgacatacattgacattagggtaattgaggagagcatctatccgcctgcgattttgcccctggagattttcatcacctcttctggagaagaatactcaggtggcgtcattgggaagatccatgccacagaccaggacgtgtatgatactctaacctacagtctcgaccctcagatggacaacctgttctctgtttccagcacagggggcaagctgatagcacacaaaaagctagacatagggcaataccttctcaatgtcagcgtaacagatgggaagttcacgacggtggccgacatcacagtgcatatcagacaagtcacacaggagatgttgaaccacaccatcgcgatccgctttgccaacctcactccggaagaattcgttggtgactactggcgcaacttccagcgagctttacggaacatcctgggtgtgaggaggaacgacatacagattgttagtttgcagtcctctgaacctcacccacatctggacgtcttactttttgtagagaaaccaggtagtgctcagatctcaacaaaacaacttctgcacaagattaactcttccgtgactgacattgaggaaatcattggagttaggatactgaatgtattccagaaactctgcgcgggactggactgcccctggaagttctgcgatgaaaaggtgtctgtggatgaaagtgtgatgtcaacacacagcacagccagactgagttttgtgactccccgccaccacagggcagcggtgtgtctctgcaaagagggaaggtgcccacctgtccaccatggctgtgaagatgatccgtgccctgagggatccgaatgtgtgtctgatccctgggaggagaaacacacctgtgtctgtcccagcggcaggtttggtcagtgcccagggagttcatctatgacactgactggaaacagctacgtgaaataccgtctgacggaaaatgaaaacaaattagagatgaaactgaccatgaggctcagaacatattccacgcatgcggttgtcatgtatgctcgaggaactgactatagcatcttggagattcatcatggaaggctgcagtacaagtttgactgtggaagtggccctggaattgtctctgttcagagcattcaggtcaatgatgggcagtggcacgcagtggccctggaagtgaatggaaactatgctcgcttggttctagaccaagttcatactgcatcgggcacagccccagggactctgaaaaccctgaacctggataactatgtgttttttggtggccacatccgtcagcagggaacaaggcatggaagaagtcctcaagttggtaatggtttcaggggttgtatggactccatttatttgaatgggcaggagctccctttaaacagcaaacccagaagctatgcacacatcgaagagtcggtggatgtatctccaggctgcttcctgacggccacggaagactgcgccagcaacccttgccagaatggaggcgtttgcaatccgtcacctgctggaggttattactgcaaatgcagtgccttgtacatagggacccactgtgagataagcgtcaatccgtgttcctccaagccatgcctctatgggggcacgtgtgttgtcgacaacggaggctttgtttgccagtgtagaggattatatactggtcagaggtgtcagcttagtccatactgcaaagatgaaccctgtaagaatggcggaacatgctttgacagtttggatggcgccgtttgtcagtgtgattcgggttttaggggagaaaggtgtcagagtgatatcgacgagtgctctggaaacccttgcctgcacggggccctctgtgagaacacgcacggctcctatcactgcaactgcagccacgagtacaggggacgtcactgcgaggatgctgcgcccaaccagtatgtgtccacgccgtggaacattgggttggcggaaggaattggaatcgttgtgtttgttgcagggatatttttactggtggtggtgtttgttctctgccgtaagatgattagtcggaaaaagaagcatcaggctgaacctaaagacaagcacctgggacccgctacggctttcttgcaaagaccgtattttgattccaagctaaataagaacatttactcagacataccaccccaggtgcctgtccggcctatttcctacaccccgagtattccaagtgactcaagaaacaatctggaccgaaattccttcgaaggatctgctatcccagagcatcccgaattcagcacttttaaccccgagtctgtgcacgggcaccgaaaagcagtggcggtctgcagcgtggcgccaaacctgcctcccccacccccttcaaactccccttctgacagcgactccatccagaagcctagctgggactttgactatgacacaaaagtggtggatcttgatccctgtctttccaagaagcctctagaggaaaagccttcccagccatacagtgcccgggaaagcctgtctgaagtgcagtctctgagctccttccagtccgaatcgtgcgatgacaatgggtatcactgggatacatcagattggatgccaagcgttcctctgccggacatacaagagttccccaactatgaggtgattgatgagcagacacccctgtactcagcagatccaaacgccatcgatacggactattaccctggaggctacgacatcgaaagtgattttcctccacccccagaagacttccccgcagctgatgagctaccaccgttaccgcccgaattcagcaatcagtttgaatccatccaccctcctagagacatgcctgccgcgggtagcttgggttcttcatcaagaaaccggcagaggttcaacttgaatcagtatttgcccaatttttatcccctcgatatgtctgaacctcaaacaaaaggcactggtgagaatagtacttgtagagaaccccatgccccttacccgccagggtatcaaagacacttcgaggcgcccgctgtcgagagcatgcccatgtctgtgtacgcctccaccgcctcctgctctgacgtgtcagcctgctgcgaagtggagtccgaggtcatgatgagtgactatgagagcggggacgacggccacttcgaagaggtgacgatcccgcccctggattcccagcagcacacggaagtctgactctcaactccccccaaagtgcctgactttagtgaacctagaggtgatgtgagtaatccgcgctgttctttgcagcagtgcttccaagctttttttggtgagccgaatgggcatggctgcgctggatcctgcgcctctggacgtgctagccatttccagtgtcccaactactgtcatcgtgaggttttcatcggctgtgccatttcccaacgtcttttgggatttacatctgtctgtgttaaaataatcaaacgaaaaatcagtcctgtgttgtcagcatgattcatgtatttatatagatttgattattttaattttcctgtctcttttttttgtaaattttatgtacagatttgatttttcatagttttaactagatttccaagatattttgtgcatttgtttcaactgaattttggtggtgtcagtgccattatctagcaccctgatttttttttttttactataaccagggtttcattctgtctttttccactgaagtgtgacattttgttagtacatttcagtgtagtcattcatttctagctgtacataggatgaaggagagatcagatacatgaacatgtcttacatgggttgctgtatttagaattataaacatttttcattattggaaagtgtaacggggaccttctgcatacctgtttagaaccaaaaccaccatgacacagtttttatagtgtctgtatatttgtgatgcaatggtcttgtaaaggtttttaatgaaaactaccattagccagtctttcttactgacaataaattattaataaaatacttgagcttt

SEQ ID NO: 5345 - protein, 2978 aa, Homo sapiens
MIDPVLGSIKTAKELDRSNQAEYDLMVKATDKGSPPMSEITSVRIFVTIADNASPKFTSKEYSVELSETVSIGSFVGMVTAHSQSSVVYEIKDGNTGDAFDINPHSGTIITQKALDFETLPIYTLIIQGTNMAGLSTNTTVLVHLQDENDNAPVFMQAEYTGLISESASINSVVLTDRNVPLVIRAADADKDSNALLVYHIVEPSVHTYFAIDSSTGAIHTVLSLDYEETSIFHFTVQVHDMGTPRLFAEYAANVTVHVIDINDCPPVFAKPLYEASLLLPTYKGVKVITVNATDADSSAFSQLIYSITEGNIGEKFSMDYKTGALTVQNTTQLRSRYELTVRASDGRFAGLTSVKINVKESKESHLKFTQDVYSAVVKENSTEAETLAVITAIGNPINEPLFYHILNPDRRFKISRTSGVLSTTGTPFDREQQEAFDVVVEVTEEHKPSAVAHVVVKVIVEDQNDNAPVFVNLPYYAVVKVDTEVGHVIRYVTAVDRDSGRNGEVHYYLKEHHEHFQIGPLGEISLKKQFELDTLNKEYLVTVVAKDGGNPAFSAEVIVPITVMNKAMPVFEKPFYSAEIAESIQVHSPVVHVQANSPEGLKVFYSITDGDPFSQFTINFNTGVINVIAPLDFEAHPAYKLSIRATDSLTGAHAEVFVDIIVDDINDNPPVFAQQSYAVTLSEASVIGTSVVQVRATDSDSEPNRGISYQMFGNHSKSHDHFHVDSSTGLISLLRTLDYEQSRQHTIFVRAVDGGMPTLSSDVIVTVDVTDLNDNPPLFEQQIYEARISEHAPHGHFVTCVKAYDADSSDIDKLQYSILSGNDHKHFVIDSATGIITLSNLHRHALKPFYSLNLSVSDGVFRSSTQVHVTVIGGNLHSPAFLQNEYEVELAENAPLHTLVMEVKTTDGDSGIYGHVTYHIVNDFAKDRFYINERGQIFTLEKLDRETPAEKVISVRLMAKDAGGKVAFCTVNVILTDDNDNAPQFRATKYEVNIGSSAAKGTSVVKVLASDADEGSNADITYAIEADSESVKENLEINKLSGVITTKESLIGLENEFFTFFVRAVDNGSPSKESVVLVYVKILPPEMQLPKFSEPFYTFTVSEDVPIGTEIDLIRAEHSGTVLYSLVKGNTPESNRDESFVIDRQSGRLKLEKSLDHETTKWYQFSILARCTQDDHEMVASVDVSIQVKDANDNSPVFESSPYEAFIVENLPGGSRVIQIRASDADSGTNGQVMYSLDQSQSVEVIESFAINMETGWITTLKELDHEKRDNYQIKVVASDHGEKIQLSSTAIVDVTVTDVNDSPPRFTAEIYKGTVSEDDPQGGVIAILSTTDADSEEINRQVTYFITGGDPLGQFAVETIQNEWKVYVKKPLDREKRDNYLLTITATDGTFSSKAIVEVKVLDANDNSPVCEKTLYSDTIPEDVLPGKLIMQISATDADIRSNAEITYTLLGSGAEKFKLNPDTGELKTSTPLDREEQAVYHLLVRATDGGGRFCQASIVLTLEDVNDNAPEFSADPYAITVFENTEPGTLLTRVQATDADAGLNRKILYSLIDSADGQFSINELSGIIQLEKPLDRELQAVYTLSLKAVDQGLPRRLTATGTVIVSVLDINDNPPVFEYREYGATVSEDILVGTEVLQVYAASRDIEANAEITYSIISGNEHGKFSIDSKTGAVFIIENLDYESSHEYYLTVEATDGGTPSLSDVATVNVNVTDINDNTPVFSQDTYTTVISEDAVLEQSVITVMADDADGPSNSHIHYSIIDGNQGSSFTIDPVRGEVKVTKLLDRETISGYTLTVQASDNGSPPRVNTTTVNIDVSDVNDNAPVFSRGNYSVIIQENKPVGFSVLQLVVTDEDSSHNGPPFFFTIVTGNDEKAFEVNPQGVLLTSSAIKRKEKDHYLLQVKVADNGKPQLSSLTYIDIRVIEESIYPPAILPLEIFITSSGEEYSGGVIGKIHATDQDVYDTLTYSLDPQMDNLFSVSSTGGKLIAHKKLDIGQYLLNVSVTDGKFTTVADITVHIRQVTQEMLNHTIAIRFANLTPEEFVGDYWRNFQRALRNILGVRRNDIQIVSLQSSEPHPHLDVLLFVEKPGSAQISTKQLLHKINSSVTDIEEIIGVRILNVFQKLCAGLDCPWKFCDEKVSVDESVMSTHSTARLSFVTPRHHRAAVCLCKEGRCPPVHHGCEDDPCPEGSECVSDPWEEKHTCVCPSGRFGQCPGSSSMTLTGNSYVKYRLTENENKLEMKLTMRLRTYSTHAVVMYARGTDYSILEIHHGRLQYKFDCGSGPGIVSVQSIQVNDGQWHAVALEVNGNYARLVLDQVHTASGTAPGTLKTLNLDNYVFFGGHIRQQGTRHGRSPQVGNGFRGCMDSIYLNGQELPLNSKPRSYAHIEESVDVSPGCFLTATEDCASNPCQNGGVCNPSPAGGYYCKCSALYIGTHCEISVNPCSSKPCLYGGTCVVDNGGFVCQCRGLYTGQRCQLSPYCKDEPCKNGGTCFDSLDGAVCQCDSGFRGERCQSDIDECSGNPCLHGALCENTHGSYHCNCSHEYRGRHCEDAAPNQYVSTPWNIGLAEGIGIVVFVAGIFLLVVVFVLCRKMISRKKKHQAEPKDKHLGPATAFLQRPYFDSKLNKNIYSDIPPQVPVRPISYTPSIPSDSRNNLDRNSFEGSAIPEHPEFSTFNPESVHGHRKAVAVCSVAPNLPPPPPSNSPSDSDSIQKPSWDFDYDTKVVDLDPCLSKKPLEEKPSQPYSARESLSEVQSLSSFQSESCDDNGYHWDTSDWMPSVPLPDIQEFPNYEVIDEQTPLYSADPNAIDTDYYPGGYDIESDFPPPPEDFPAADELPPLPPEFSNQFESIHPPRDMPAAGSLGSSSRNRQRFNLNQYLPNFYPLDMSEPQTKGTGENSTCREPHAPYPPGYQRHFEAPAVESMPMSVYASTASCSDVSACCEVESEVMMSDYESGDDGHFEEVTIPPLDSQQHTEV

SEQ ID NO: 5346 - DNA, 1235 bp, Homo sapiens
ccgaaggaggagggcgggcgtttcacccgcgccacagctgcggccggccagagagaccgcagaggccgggacccccgcagcctccacggccgctgctgccactgtcggggtggcgcgcccagccggagaatcccgtccgcgcccggggcggggggcgaggcggggcgctgacgtcacctcccctcccccaccgcctccaagggggagggagtggggaaagaggcagcgagtcgccgcagccggcggccgcaactcctcaactcggcggctggctgcctgggcacgtcctgacaaacttggctgctcccgggccctcgttccggccccgcgcactctcttttcgcctgcgtttggtgcttaagtttgccctggtcggaagcctccggagatgcggccgcctgggtcccggcggcacggacgttggcactctggttagggacatgctgaagatcccggggaggcaaagttggtacttcaaacccggctcttaacacatatctacaccgcgaggggatcacggagctgccgaggactttagagcccagggccgaggactcggctagactgattcccgacagttaagcaatggggagacatttggctttgctcctgcttctgctccttctcttccaacattttggagacagtgatggcagccaacgacttgaacagactcctctgcagtttacacacctcgagtacaacgtcaccgtgcaggagaactctgcagctaagacttatgtggggcatcctgtcaagatgggtgtttacattacacatccagcgtgggaagtaaggtacaaaattgtttccggagacagtgaaaacctgttcaaagctgaagagtacattctcggagacttttgctttctaagaataaggaccaaaggaggaaatacagctattcttaatagagaagtgaaggatcactacacattgatagtgaaagcacttgaaaaaaatactaatgtggaggcgcgaacaaaggtcagggtgcaggtgctggatacaaatgacttgagaccgttattctcacccacctcatacagcgtttctttacctgaaaacacagctataaggaccagtatcgcaagagtcagcgccacggatgcagacataggaaccaacggggaattttactacagttttaaagatcgaacagatatgtttgctattcacccaaccagtggtgtgatagtgttaactggtagacttgattacctagagaccaagct

SEQ ID NO: 5347 - protein, 215 aa, Homo sapiens
MGRHLALLLLLLLLFQHFGDSDGSQRLEQTPLQFTHLEYNVTVQENSAAKTYVGHPVKMGVYITHPAWEVRYKIVSGDSENLFKAEEYILGDFCFLRIRTKGGNTAILNREVKDHYTLIVKALEKNTNVEARTKVRVQVLDTNDLRPLFSPTSYSVSLPENTAIRTSIARVSATDADIGTNGEFYYSFKDRTDMFAIHPTSGVIVLTGRLDYLET

SEQ ID NO: 5348 - DNA, 575 bp, Homo sapiens
aggtcatgagggcggaaccctggtacatgaaattcgttctcttatttaagagacaaagaacgcccttgttttttccaccacgtgatggcgcagacagaagacaaccagcatctatgaaccaggaagcccccaccaggcactgaatctgcccctgcgtggatcttagacttgcagactccagaactgtccaaattttggtctggagccagagacaatataggatgaagtttgatttgttccaaaacccacagaaatctctaaaatggaagaattttcttagaaccaaaaggcatggaattgatgacatgaaactgttctctctcctgccaccatttgaagaagggtgtgtttgcttccccttccaccatgattctaagtttcctgaggcctccccagctatgcagaactagttttgctcggtcactcacggcaacctccgcctcctgggttcaagcagttctcctgcctcagtctcccgagtagctgggactctacaggcatcccccatcagggcttgaaaacagaaatcctgccaagtcccacgttttcttcggttccaagcacagagagacatt

SEQ ID NO: 5349 - protein, 62 aa, Homo sapiens
MKFDLFQNPQKSLKWKNFLRTKRHGIDDMKLFSLLPPFEEGCVCFPFHHDSKFPEASPAMQN

SEQ ID NO: 5350 - DNA, 12440 bp, Homo sapiens
ctgctctccctgagcccgctcccgagcgctgctttcccgccgcgggtgggcttcgcagcctcaggccagccgcggcccttggcccgctgcagccccggccctccaccttccccgtgcaggggcggcccggccagtgtcgctcatcccgggacgctcccttctcccacccaggactgccccgcggagctggcttggacacccaactttgccacctcgagggtcgtctctgctgggcgcgaacctgcccacccaccggttggccgcgcgctcggggaccgtgctcgtggcccccaagccggtgcccccattctggaactcagcgagtagggggcggctctggggaagtggcagggggcggctgcagctgctgcctccacttccctagccaggtgctgaagaggatcctcggagccgctctggcccccaggcgctggatgactggcaccagcgctcctcgcacctgtgttggtgtgtgagacttgggctggagtgcccacgtggctgtggagtcagtgtgattcatgattgaggaaacgcgtcctccatcctctctctccttggcactttccacacatgaggagaagaagagcttctgtttagaagacacgtgcccagagtcagaggccccttgcccaccatgaagggaacctgtgttatagcatggctgttctcaagcctggggctgtggagactcgcccacccagaggcccagggtacgactcagtgccagagaaccgagcatccagtcatctcctataaagaaattggcccctggttacgggagttcagagcgaagaatgctgtggatttctcgcagttaacatttgacccaggacagaaagaacttgttgtaggagcaagaaactacctcttcaggttacagcttgaggatctgtctcttatccaggctgtggaatgggagtgtgatgaagctaccaaaaaggcctgttacagcaaaggcaaatcaaaggaggaatgtcagaactacatccgggtgcttctggtgggtggcgaccggttattcacctgtgggaccaatgcattcacgcctgtctgcaccaaccgctcgttgagcaacctgactgagatccatgatcagatcagtggcatggcccgctgtccctacagtccccagcacaattccacagcgctcctcacagctggtggggagctctatgctgctacagccatggattttccaggacgtgatcctgccatttaccgaagcctaggcattttacctcctctccgcacggcgcagtacaactccaaatggctcaatgagccaaactttgtgtcatcttatgacatcggaaattttacctacttctttttccgagaaaatgcagtagagcatgactgtgggaaaacagtgttctccagagctgcccgggtgtgcaagaacgatattggtgggcgcttcctgctggaagacacctggaccacattcatgaaggctcgcctgaactgctcccgtcctggggaagtccccttttactacaacgaattgcagagtactttcttcctgcctgagctggatttgatctatggcatctttaccaccaatgtgaacagcattgcggcctcagctgtgtgcgtcttcaacctgagcgccatcgcgcaggccttctctgggcccttcaagtaccaagaaaactcgcgctcggcctggctaccgtatcccaacccaaacccccacttccagtgtggcaccgtggaccagggcctgtacgtgaacctgaccgagagaaatctgcaggatgctcagaagttcattctgatgcatgaggtggtacagccagtgaccacagtgccctccttcatggaggacaatagccgcttttcccacgtggcagtcgacgtggtgcagggcagagaagcgctcgtccacatcatctatttggccacagattacggaaccattaagaaagtgcgggtacccctgaatcagacctcaagcagctgtttgctggaagagattgagctcttccctgagaggcggagggagcccatcaggagcctgcagatcctgcacagccagagtgtcctgttcgtgggcctgcgggagcacgtggtcaagatccccctgaagaggtgccagttctaccgcacacgcagcacctgcattggggcccaggacccttactgtggctgggatgtggtaatgaagaaatgcacaagcctggaggagagcctgagcatgacgcagtgggaacagagcatctctgcgtgtccgaccaggaatctcaccgtggatgggcactttggtgtgtggtctccgtggacgccttgcacgcacacagatggcagcgccgtgggatcctgcctctgtcgaacccgctcctgcgacagcccggccccgcagtgtggtggctggcagtgcgagggccctggcatggagatcgccaactgttccaggaacggaggctggactccctggacctcgtggtctccctgcagcactacctgtgggatcggcttccaggtgcggcagcgctcctgcagcaaccccactcccaggcacgggggccgggtgtgcgtgggacagaaccgcgaggaaagatactgcaatgaacatttgctatgtcccccacacatgttctggacaggctggggtccttgggaacggtgcacagcccaatgcgggggtggcattcaagctcgccgcaggatctgtgagaatgggcctgactgtgcaggctgcaatgtggagtaccagtcttgcaacaccaacccgtgtcctgagctgaagaagaccacgccctggacaccctggacacctgtcaacatctctgacaacggcggccactatgagcaacgattccgatacacatgcaaagcccgcctggctgatccgaatttgctggaagtgggaagacagagaatcgaaatgcggtactgttctagcgacggcaccagtggctgctccacagatgggctttctggggatttcctgcgtgctgggagatactctgcccacacggtcaacggggcttggtcagcctggacgtcgtggtcacagtgcagccgtgactgcagcaggggcattcggaaccggaagcgtgtttgcaacaaccccgaacccaagtatgggggaatgccttgccttggcccatctctggaataccaggaatgcaacattttgccctgcccagtggatggcgtgtggtcttgctggtccccctggacaaaatgttcagcaacatgcggcggtggacactatatgaggacccgctcttgctccaatccagccccggcctatggaggggacatctgcctggggctgcacacagaagaggcactctgcaacacgcagccctgcccagagagctggtcggagtggtcggactggtctgagtgtgaagcctctggcgtccaagtccgcgcccgccagtgcatcctcctgttccccatgggcagccagtgctccgggaacaccacggagagccggccgtgtgtgtttgactctaatttcatcccagaagtatctgtggcaagatccagtagcgtagaagagaaaaggtgtggagagttcaacatgttccacatgatcgccgtggggctgagcagctccatcctcggctgcctcctcaccctgctcgtctatacttactgccagcggtaccagcagcaatcccacgatgcgactgtcatccaccccgtctcacctgccccccttaataccagcataaccaaccacatcaacaaactggacaagtacgactcggtggaggccatcaaggcatttaacaaaaacaacttgatcctagaggaaagaaacaaatacttcaacccacatctcactgggaagacctattctaatgcctactttacagatctcaataattatgatgagtactaacagctttcatgtttttggcttcttgtaaatccccagttcctcaaggcctgtgccccatgactgcccatgtttctgaggcttcagagtcgaagtttggatacatttcaagtgcatttcaagccaccagagtgtcccattgctgccaaaaatacacgtctttaaaagcaacaaaaattgaaataagacatcgtgaaaatcttgaccattgttgaatgagccagggtgtgaagtttttaattgtgttcatcctatttttctgacaagtccattggtttgttttttgagcattattttataaatgtgccacccacattggaaggagtctttctttagaactttggagtgtaaatcttcatgatgttgtaattcaagaaaataggcactttctctgaaagacctgctccttccacaagaagtgcataggtccataatatttcataaaatgaagaaaaagaatgtggccaaacaattattcaccatggattgcccaactttccaaatctggataaagctgtgggattcttggaagcagcttgagtgttttcatcttgcctgggaagcccaggaattccacctggtccacaccggcagaagttacagtagactgtgaggcaccccaccttgctcctgatgcagtttctgtgccattgctggtgctggtggaggcagcggagcagaggctcaggcacaatgaagcgtggatgtgttctgcaggttgctgcaaaactcaccttattctgacttttggatttcatggcattccaggaagctccttgccatgctgttggcctggaagtccacctgtctggtccatagtgacgtcctgaagagccagtctgtaaaataaccaaccacttacttagcgtttggatagactccatgccttctctctccctgcaaagaaaaatcttgaacatttatgatgtcaattagtgaaagtattgaaaatactaaattataactaaaagcaactttttatgttattgaaaatattgaaagaactgatattaatgataatcattttatttttcatctctctgatatacccaatgtgtggcaatcagcccctaccacgagcattaataccatgtaaagctggctttctggagtctgccaggtccacacgaagtgctacccccagtttctgctgttacttgctgcctccaggccaggggagcaggagatgctcagctctggtgccttttcttttatttcagtgctgccttcccacccacccagtccattcaccctcacctctccctgcatggaggcaacagcatttcaagatgtaccttgggaagtcaggatagctggaagtaagggtttttgggatccctgtggtctcttcactgatcatcgataagcatttaagagtgtgctaacaccattcacagaggtccctggaaaaaaatatataattttctcacaaacaaccaatacataacctatggcagttggttgaataattattgaaaaaaagaacacgactgaaaaagttcatctgatgcctctgagcatgtgataaagtcctgggtagacacggaaacgtgttcttacaaatgaaccttcggatctatgaaagaaaatatagtagggggactaaggaacatagaattttattagcatatgtgattttacccttatctttgtttctaatttaaagaaacaatttcagaaagtgttagaagaattctatgtttaataatgaatattgttgagttcaaaatattctcatatacccagatttacagagatgacacagtattgaaatggcaggtgggctctgtaagttattttggattaatgacattcagggtctttgcagtggggacttcatgttgcctctcactcattcctcatatgtcagagtcttctgtctatatgcacatgctcaaagtccatactcagtaggggaaatctagccggatggttctccaattgttcctcggctggattttcatcatcagatatttcaactcatctcatcagtttcttgtaagaaaaaaacattttcactttgtagcacattttagttatttttgagtcttcttccctaatagtttgtaagcttaaagggacattttattttccctggtaaagaggattctaatatttcaagaatgtttcactggaattgatgggaaatggtttctaaatggcatcgaagctggtctttaatgagtcttttgcaatgacttgggaaaaacaccctccctcactacaggatcttcatgttgttaataatataaacaaacctttgaaattagcattgcaaaagaatcccatttttgtttcgtaccacactgttcaaaggaaaattgtttatctctcttcctttctctctctctcttatttgacagaatagcaagtgtttagataatttcagatatattctaagtattttaccagctgtggaataagttgtgtttgtccatcactgtgtagctaccgttcacatgttctggctctgtactccacgcttatcgcgtgaaccctcacatgttggactttcacagtgtgatctctcacctgtcttggaaactccttcataaagccgctcttccttaggcctgggctgtttggaagtcctggtgaaactttgcggttcacattttaaattcctgaatgaccttttcattctctctttctttatctttgtttttgtccttcattccctccttttgttcttccttcctgccttcttttcttctttcctttcttctttctttaattcttcctttcttcctattttcttggtacaagtggaacaaaaaccaacacatagttttaagctacacctttctgcacctgatgtaaaatgacattaatcactatttaacttctaaaattatttctgaatacagttggagataggctggttttcatgaggaagctggcttggctttagtcttacatttaaattctttgaaagtggctcccagtgctattcagggtcctttcttgaggccagactcatcaccatctactattgattttacagtgcactgacagtttacaggaaggagaagaacagaatttctgcacactacacaacatgtgggcttcctgtagctccagggacatgtagctttggtgaaactggggttttgtaacctctgaatgatatggacttagtgaattctaaggaactcagggggcacgtggtcaggctccaccgcacagaagagccacagtctccagactcatggcgttccctccagaactccccattcccctctgagcatatttctatgctgctgcttcttgtgacttacatgaggcatctcagcttcttcatgtttgtagggatggttccctaagcctgttcaagtaggctctcactagagttaccattcatatttgagaagaaaagaacatttaataaatgtatgtgtggggctgaggttctaaaggaattgaaaagagacgataaacattgaatgagggtgagggcatccctgctggggagaaacctctgtccctaggaagagtccgttcatgtcatgtggtttgggatgaaccaggggtctggccccatcgggtcacaggtgatggcaaatagaaaagaagcaaatggaggaaatagtcggataagtaggtgacgtgaaaggcaggacctggtcaccccagcaagtgctatggacagttcccggaaacggttgcccacttcacaggtccatgggtctgacccttggactctgccaggatcaactgcccagagtgccagagttttagccaaaggtgtacttacttccttatttatctgcaaaaggatggaaactgtgggagtcaaagcctattttgctgagtgttcccactggagtctctggtagaattagcaggtcatgctgtcaaaatcatggacaaaggctgggtgcagtggctcatgcctataatcccagcactttgggaggccaaggtgggcggatcacctgagctcaggagtttgagaccagcctgggcaacatggggaaactccatctctacaaaatatacaaaatattagccagccatcgtggtgcgtgcctgtggtcccagtttcttgggaggctgaggcgggagtatcatttgagccaggaggttgaggttgcagtgagctgagatcacatcactgcactccatcctgggtgacagagagagaccctgtctcaaaaaaaaaaaaaaagaacaaagtcttagcggggggtctctatgtccccaagtggctctctaaggggatccattagcgtataattgaatatcaaagggaattttaccttaaacatatatcaagtctatactcagctaatcgttttgtctaaacacagccttgttagcatttgaatttacaaatattcatttgcttatttgcagtgttccttttgcttttagaataaatcataaatatttccccaatactgtcaagatacttcttcaactttgtccctgaaccatcagctttctttagggtccgggtatcctttacacttcaatggggttttcttgtgtgtgtcattgggggtaactccattgacctcagcatttctatctcaagagatggctctggaacacagaaccagaggcaacaggtactaatggttgataaaattaacagcgactgcataaccattttccacatggcagggctgtgcttaagccccacacctccaataatcaatttctatgacggtactaataaccttaactatatgcaaattcttcaccacttatgatatggtacaaactggagtttacagatggccttggccttgcctagcccatttgttcatcctaacttcttcatcacttcctgatgcacttggggaagcatgttgacacaacgttaccaatatttgattacctatggttatctgcaattacctacgcttatcttatcagaccctagatgccatttgagccccttacttctttgggcagtgggtgaaatgggagaacatagagaaatgttcactttgacctaagaaacgcataaaagggaatgccatgcacaatgtaagataaaatgtttggggacaggggatcatcgtgaaatttatttctgctattctgccctattgaggtcattaattataatggatttaaagatttttttttaaactctacaaacactaagccaaggaattcaggttatctgctatgttaacctaataaagcaaaggaaaataagttgctttaatccttgcttgttaacctaataaagcaaaggaaaatatgttgctttaatccttgcttcttttctcttttggtaatagaaaaggtaaataagatgtaatgttgaactgctggtgatgatttctaaaacgactctttaaatactcctttcctatggacttatattaaagatgcattgtacacattgttttagcagatagatcaaagatatactcagtggtcatctgttgcattatcagaaatttgatacatgttacagaagcatgaggaagggaatcctatccacttttgaaaatagagttcacattgcaagcgacatagggcattatcaaaaccaattcagagcctggcacaaaatgtatacttcctagtgaaagctgtctcaaaacacagcctttttgatggatcatattagctcatatctgccatagaaaggcaatcaagcttactccctgcaatcggagtcaatatcaattcttgctcaagcaaacatgttttacagtgttggcgcaatggcaggaactagtcaagggcactttcagatctggaaagaggaaagaggaggtagaaaatcactcttttgtgtttcttaaactgtcaatcaagcaagaaaatttattccaccccttcatatttgctctaaaatctggggccagtagttgaaatgtgatcttgttctttctcagccttttggcaatttaatgccaaatattccaaatgttagatgaatggcagtaataaaatgattcaaatgtttgataaatacaagctgagagcaaaatctggactctgaaaaatcggaactattttatcatgttgctaaaatgagagcatcattttcttccctctctgtaagtgcggtagtttaatttcctagaaaaagttgctagtgccttgtttaagatgatcatttatcatttcatgtggatattattggtctaattagaaggagaagattgattggatttactttaaagaaaattattctcctatgtctctttgaactcaggaatagaaaatgaccaagaagcacatcatcttcagatgtgatttttgccctcactggggatgtagaaccagaataggtacaacatatgctcagaagagaggtgacttcagtattagccttctagaaactaacatcactttaatttttacatgttccaaaaaaaatcatagtgattgttctgtaataagaatgttaacgtgatgcctatagaagttagaggtttttgtttctgtttctcttcaggcaagtccatagatagaggaaaatcagacacaggctggtgacaactggtatagatacagtgagcatggaatgagaaccacctacaacattgcctgattatttttaagtttatatcaaaactgcttcacaagttcacaaaagttgtcactcttaatttgggttaagaaaagtaatagtattatctctgctgaagttgattgtttttctcttttaccatgactgttggccaaaagcaagctgaacctctgcactttgaaacaaagcacagtatgaatctttaacccaagcacttagtttcaccactgagattctacatcatctgcaagaaaatgcacaaacttttggtccaatgttggattcttcaaaagtgcatagcaaaacttttgtgctatgccgcttgatgtaacttttaaagatgttatcaaatgttaaatgcctcattctgcgttaatttgctgttggctgttttgtgaacacaaaataaacttgagatttttttttttttttttttttgtgaaactcctccaaagccaatttcagcccttggtaagcttgcagacagttactgatcttaaatttaattttaaaagacaatgtatcttaattataatttagctttttaaaacaatgagatagctttacatttcccctttgtttgaatgagaaaatggatcttgggttgctatgctagaacacttgtagattgctgggtcctttgtaagggggccatggacacaccacactttctttcaatccttacatttgaagcattgatattcttcaaaaccttcttgttacatgtgcgcaatagaaatttctaatgttcatgacttttatctttcctgtccatcaattcactggttgtaaatgcttcctgagagctgtctaggtctgtatcccagattgttgcttaatgacatctgacagatgcattgttttctgaaatcagcttaagacaccaattgtggcaactggaaactcattacctgctgcattggatcaactatggaagttggagcaggggtgggcggaggtcacctaaccaatcaatggaaggcaactcacacctgctccaagcctcagctttgagaaacaaacacgtttataagaaaaaatatatagctattattacagaagtgaatatgttgtgctctcttactgctcttggtgcattgacagtttctgtatctcaaccctattcatctttatgaaaaagcattctgaagatctatcctcagcactgctgagtgtgcagtcacactttcctaccaacccccttcttaccatctctagctgccatttgtggggggaacaaaacaagggaatcctgattgtgtacagtataaattgtattatattttttgtacttatgttttatgtaaatagtttgtctcattcaattgtatgtgagcattgaaataaatcctaccatttaggggacaatttagtggcatttttctttgtattgcctctgagtgtgcggtctccccagaggtgctaagcaatggccactgctcaaaggaatgaatttcatcagagtgaagtgcagaccacttcctgctgaggaaaactcataacactcctgtttatcttcaggccttttgaatggtggccaggacatgacataaggatgtattaaagcacttttagaaatatttccatgggcaacaggaaatatgtgataaggaaggccaattaggctttctgtttacaaagagttggtatcaggttgagctgatgaatgatgcattgagttgtattatacttaccctctctccaacacaccctattccattcttctttgcataaaacaaggtttttcttgaatgaactgctgtcagtcagcatgaacacaaagataagaagcttgacccaggaagaccaccctatttagtgaaagccatatttcaatgttcatgatcccattaaaggaaaaaatatacatgcatatgtatgtatttatatatgtcatatatacacatatatgtatacataaaagtatatgtgtataattattttatatatatttttcagttgaccaaaaagctgaaaaagcccacttaatatggggccaaaaattaacataatacaactatataaatatatgaactagtgaagcatgttataaagattaaactgttttaacccccaaat

SEQ ID NO: 5351 - protein, 1074 aa, Homo sapiens
MKGTCVIAWLFSSLGLWRLAHPEAQGTTQCQRTEHPVISYKEIGPWLREFRAKNAVDFSQLTFDPGQKELVVGARNYLFRLQLEDLSLIQAVEWECDEATKKACYSKGKSKEECQNYIRVLLVGGDRLFTCGTNAFTPVCTNRSLSNLTEIHDQISGMARCPYSPQHNSTALLTAGGELYAATAMDFPGRDPAIYRSLGILPPLRTAQYNSKWLNEPNFVSSYDIGNFTYFFFRENAVEHDCGKTVFSRAARVCKNDIGGRFLLEDTWTTFMKARLNCSRPGEVPFYYNELQSTFFLPELDLIYGIFTTNVNSIAASAVCVFNLSAIAQAFSGPFKYQENSRSAWLPYPNPNPHFQCGTVDQGLYVNLTERNLQDAQKFILMHEVVQPVTTVPSFMEDNSRFSHVAVDVVQGREALVHIIYLATDYGTIKKVRVPLNQTSSSCLLEEIELFPERRREPIRSLQILHSQSVLFVGLREHVVKIPLKRCQFYRTRSTCIGAQDPYCGWDVVMKKCTSLEESLSMTQWEQSISACPTRNLTVDGHFGVWSPWTPCTHTDGSAVGSCLCRTRSCDSPAPQCGGWQCEGPGMEIANCSRNGGWTPWTSWSPCSTTCGIGFQVRQRSCSNPTPRHGGRVCVGQNREERYCNEHLLCPPHMFWTGWGPWERCTAQCGGGIQARRRICENGPDCAGCNVEYQSCNTNPCPELKKTTPWTPWTPVNISDNGGHYEQRFRYTCKARLADPNLLEVGRQRIEMRYCSSDGTSGCSTDGLSGDFLRAGRYSAHTVNGAWSAWTSWSQCSRDCSRGIRNRKRVCNNPEPKYGGMPCLGPSLEYQECNILPCPVDGVWSCWSPWTKCSATCGGGHYMRTRSCSNPAPAYGGDICLGLHTEEALCNTQPCPESWSEWSDWSECEASGVQVRARQCILLFPMGSQCSGNTTESRPCVFDSNFIPEVSVARSSSVEEKRCGEFNMFHMIAVGLSSSILGCLLTLLVYTYCQRYQQQSHDATVIHPVSPAPLNTSITNHINKLDKYDSVEAIKAFNKNNLILEERNKYFNPHLTGKTYSNAYFTDLNNYDEY

SEQ ID NO: 5352 - DNA, 11732 bp, Homo sapiens
ctgctctccctgagcccgctcccgagcgctgctttcccgccgcgggtgggcttcgcagcctcaggccagccgcggcccttggcccgctgcagccccggccctccaccttccccgtgcaggggcggcccggccagtgtcgctcatcccgggacgctcccttctcccacccaggactgccccgcggagctggcttggacacccaactttgccacctcgagggtcgtctctgctgggcgcgaacctgcccacccaccggttggccgcgcgctcggggaccgtgctcgtggcccccaagccggtgcccccattctggaactcagcgagtagggggcggctctggggaagtggcagggggcggctgcagctgctgcctccacttccctagccaggtgctgaagaggatcctcggagccgctctggcccccaggcgctggatgactggcaccagcgctcctcgcacctgtgttggtgtgtgagacttgggctggagtgcccacgtggctgtggagtcagtgtgattcatgattgaggaaacgcgtcctccatcctctctctccttggcactttccacacatgaggagaagaagagcttctgtttagaagacacgtgcccagagtcagaggccccttgcccaccatgaagggaacctgtgttatagcatggctgttctcaagcctggggctgtggagactcgcccacccagaggcccagggtacgactcagtgccagagaaccgagcatccagtcatctcctataaagaaattggcccctggttacgggagttcagagcgaagaatgctgtggatttctcgcagttaacatttgacccaggacagaaagaacttgttgtaggagcaagaaactacctcttcaggttacagcttgaggatctgtctcttatccaggctgtggaatgggagtgtgatgaagctaccaaaaaggcctgttacagcaaaggcaaatcaaaggaggaatgtcagaactacatccgggtgcttctggtgggtggcgaccggttattcacctgtgggaccaatgcattcacgcctgtctgcaccaaccgctcgttgagcaacctgactgagatccatgatcagatcagtggcatggcccgctgtccctacagtccccagcacaattccacagcgctcctcacagctggtggggagctctatgctgctacagccatggattttccaggacgtgatcctgccatttaccgaagcctaggcattttacctcctctccgcacggcgcagtacaactccaaatggctcaatgagccaaactttgtgtcatcttatgacatcggaaattttacctacttctttttccgagaaaatgcagtagagcatgactgtgggaaaacagtgttctccagagctgcccgggtgtgcaagaacgatattggtgggcgcttcctgctggaagacacctggaccacattcatgaaggctcgcctgaactgctcccgtcctggggaagtccccttttactacaacgaattgcagagtactttcttcctgcctgagctggatttgatctatggcatctttaccaccaatgtgaacagcattgcggcctcagctgtgtgcgtcttcaacctgagcgccatcgcgcaggccttctctgggcccttcaagtaccaagaaaactcgcgctcggcctggctaccgtatcccaacccaaacccccacttccagtgtggcaccgtggaccagggcctgtacgtgaacctgaccgagagaaatctgcaggatgctcagaagttcattctgatgcatgaggtggtacagccagtgaccacagtgccctccttcatggaggacaatagccgcttttcccacgtggcagtcgacgtggtgcagggcagagaagcgctcgtccacatcatctatttggccacagattacggaaccattaagaaagtgcgggtacccctgaatcagacctcaagcagctgtttgctggaagagattgagctcttccctgagaggcggagggagcccatcaggagcctgcagatcctgcacagccagagtgtcctgttcgtgggcctgcgggagcacgtggtcaagatccccctgaagaggtgccagttctaccgcacacgcagcacctgcattggggcccaggacccttactgtggctgggatgtggtaatgaagaaatgcacaagcctggaggagagcctgagcatgacgcagtgggaacagagcatctctgcgtgtccgaccaggaatctcaccgtggatgggcactttggtgtgtggtctccgtggacgccttgcacgcacacagatggcagcgccgtgggatcctgcctctgtcgaacccgctcctgcgacagcccggccccgcagtgtggtggctggcagtgcgagggccctggcatggagatcgccaactgttccaggaacggaggctggactccctggacctcgtggtctccctgcagcactacctgtgggatcggcttccaggtgcggcagcgctcctgcagcaaccccactcccaggcacgggggccgggtgtgcgtgggacagaaccgcgaggaaagatactgcaatgaacatttgctatgtcccccacacatgttctggacaggctggggtccttgggaacggtgcacagcccaatgcgggggtggcattcaagctcgccgcaggatctgtgagaatgggcctgactgtgcaggctgcaatgtggagtaccagtcttgcaacaccaacccgtgtcctgagctgaagaagaccacgccctggacaccctggacacctgtcaacatctctgacaacggcggccactatgagcaacgattccgatacacatgcaaagcccgcctggctgatccgaatttgctggaagtgggaagacagagaatcgaaatgcggtactgttctagcgacggcaccagtggctgctccacagatgggctttctggggatttcctgcgtgctgggagatactctgcccacacggtcaacggggcttggtcagcctggacgtcgtggtcacagtgcagccgtgactgcagcaggggcattcggaaccggaagcgtgtttgcaacaaccccgaacccaagtatgggggaatgccttgccttggcccatctctggaataccaggaatgcaacattttgccctgcccagtggatggcgtgtggtcttgctggtccccctggacaaaatgttcagcaacatgcggcggtggacactatatgaggacccgctcttgctccaatccagccccggcctatggaggggacatctgcctggggctgcacacagaagaggcactctgcaacacgcagccctgcccagagagctggtcggagtggtcggactggtctgagtgtgaagcctctggcgtccaagtccgcgcccgccagtgcatcctcctgttccccatgggcagccagtgctccgggaacaccacggagagccggccgtgtgtgtttgactctaatttcatcccagaagtatctgtggcaagatccagtagcgtagaagagaaaaggtgtggagagttcaacatgttccacatgatcgccgtggggctgagcagctccatcctcggctgcctcctcaccctgctcgtctatacttactgccagcggtaccagcagcaatcccacgatgcgactgtcatccaccccgtctcacctgccccccttaataccagcataaccaaccacatcaacaaactggacaagtacgactcggtggaggccatcaaggcatttaacaaaaacaacttgatcctagaggaaagaaacaaatacttcaacccacatctcactgggaagacctattctaatgcctactttacagatctcaataattatgatgagtactaacagctttcatgtttttggcttcttgtaaatccccagttcctcaaggcctgtgccccatgactgcccatgtttctgaggcttcagagtcgaagtttggatacatttcaagtgcatttcaagccaccagagtgtcccattgctgccaaaaatacacgtctttaaaagcaacaaaaattgaaataagacatcgtgaaaatcttgaccattgttgaatgagccagggtgtgaagtttttaattgtgttcatcctatttttctgacaagtccattggtttgttttttgagcattattttataaatgtgccacccacattggaaggagtctttctttagaactttggagtgtaaatcttcatgatgttgtaattcaagaaaataggcactttctctgaaagacctgctccttccacaagaagtgcataggtccataatatttcataaaatgaagaaaaagaatgtggccaaacaattattcaccatggattgcccaactttccaaatctggataaagctgtgggattcttggaagcagcttgagtgttttcatcttgcctgggaagcccaggaattccacctggtccacaccggcagaagttacagtagactgtgaggcaccccaccttgctcctgatgcagtttctgtgccattgctggtgctggtggaggcagcggagcagaggctcaggcacaatgaagcgtggatgtgttctgcaggttgctgcaaaactcaccttattctgacttttggatttcatggcattccaggaagctccttgccatgctgttggcctggaagtccacctgtctggtccatagtgacgtcctgaagagccagtctgtaaaataaccaaccacttacttagcgtttggatagactccatgccttctctctccctgcaaagaaaaatcttgaacatttatgatgtcaattagtgaaagtattgaaaatactaaattataactaaaagcaactttttatgttattgaaaatattgaaagaactgatattaatgataatcattttatttttcatctctctgatatacccaatgtgtggcaatcagcccctaccacgagcattaataccatgtaaagctggctttctggagtctgccaggtccacacgaagtgctacccccagtttctgctgttacttgctgcctccaggccaggggagcaggagatgctcagctctggtgccttttcttttatttcagtgctgccttcccacccacccagtccattcaccctcacctctccctgcatggaggcaacagcatttcaagatgtaccttgggaagtcaggatagctggaagtaagggtttttgggatccctgtggtctcttcactgatcatcgataagcatttaagagtgtgctaacaccattcacagaggtccctggaaaaaaatatataattttctcacaaacaaccaatacataacctatggcagttggttgaataattattgaaaaaaagaacacgactgaaaaagttcatctgatgcctctgagcatgtgataaagtcctgggtagacacggaaacgtgttcttacaaatgaaccttcggatctatgaaagaaaatatagtagggggactaaggaacatagaattttattagcatatgtgattttacccttatctttgtttctaatttaaagaaacaatttcagaaagtgttagaagaattctatgtttaataatgaatattgttgagttcaaaatattctcatatacccagatttacagagatgacacagtattgaaatggcaggtgggctctgtaagttattttggattaatgacattcagggtctttgcagtggggacttcatgttgcctctcactcattcctcatatgtcagagtcttctgtctatatgcacatgctcaaagtccatactcagtaggggaaatctagccggatggttctccaattgttcctcggctggattttcatcatcagatatttcaactcatctcatcagtttcttgtaagaaaaaaacattttcactttgtagcacattttagttatttttgagtcttcttccctaatagtttgtaagcttaaagggacattttattttccctggtaaagaggattctaatatttcaagaatgtttcactggaattgatgggaaatggtttctaaatggcatcgaagctggtctttaatgagtcttttgcaatgacttgggaaaaacaccctccctcactacaggatcttcatgttgttaataatataaacaaacctttgaaattagcattgcaaaagaatcccatttttgtttcgtaccacactgttcaaaggaaaattgtttatctctcttcctttctctctctctcttatttgacagaatagcaagtgtttagataatttcagatatattctaagtattttaccagctgtggaataagttgtgtttgtccatcactgtgtagctaccgttcacatgttctggctctgtactccacgcttatcgcgtgaaccctcacatgttggactttcacagtgtgatctctcacctgtcttggaaactccttcataaagccgctcttccttaggcctgggctgtttggaagtcctggtgaaactttgcggttcacattttaaattcctgaatgaccttttcattctctctttctttatctttgtttttgtccttcattccctccttttgttcttccttcctgccttcttttcttctttcctttcttctttctttaattcttcctttcttcctattttcttggtacaagtggaacaaaaaccaacacatagttttaagctacacctttctgcacctgatgtaaaatgacattaatcactatttaacttctaaaattatttctgaatacagttggagataggctggttttcatgaggaagctggcttggctttagtcttacatttaaattctttgaaagtggctcccagtgctattcagggtcctttcttgaggccagactcatcaccatctactattgattttacagtgcactgacagtttacaggaaggagaagaacagaatttctgcacactacacaacatgtgggcttcctgtagctccagggacatgtagctttggtgaaactggggttttgtaacctctgaatgatatggacttagtgaattctaaggaactcagggggcacgtggtcaggctccaccgcacagaagagccacagtctccagactcatggcgttccctccagaactccccattcccctctgagcatatttctatgctgctgcttcttgtgacttacatgaggcatctcagcttcttcatgtttgtagggatggttccctaagcctgttcaagtaggctctcactagagttaccattcatatttgagaagaaaagaacatttaataaatgtatgtgtggggctgaggttctaaaggaattgaaaagagacgataaacattgaatgagggtgagggcatccctgctggggagaaacctctgtccctaggaagagtccgttcatgtcatgtggtttgggatgaaccaggggtctggccccatcgggtcacaggtgatggcaaatagaaaagaagcaaatggaggaaatagtcggataagtaggtgacgtgaaaggcaggacctggtcaccccagcaagtgctatggacagttcccggaaacggttgcccacttcacaggtccatgggtctgacccttggactctgccaggatcaactgcccagagtgccagagttttagccaaaggtgtacttacttccttatttatctgcaaaaggatggaaactgtgggagtcaaagcctattttgctgagtgttcccactggagtctctggtagaattagcaggtcatgctgtcaaaatcatggacaaaggctgggtgcagtggctcatgcctataatcccagcactttgggaggccaaggtgggcggatcacctgagctcaggagtttgagaccagcctgggcaacatggggaaactccatctctacaaaatatacaaaatattagccagccatcgtggtgcgtgcctgtggtcccagtttcttgggaggctgaggcgggagtatcatttgagccaggaggttgaggttgcagtgagctgagatcacatcactgcactccatcctgggtgacagagagagaccctgtctcaaaaaaaaaaaaaaagaacaaagtcttagcggggggtctctatgtccccaagtggctctctaaggggatccattagcgtataattgaatatcaaagggaattttaccttaaacatatatcaagtctatactcagctaatcgttttgtctaaacacagccttgttagcatttgaatttacaaatattcatttgcttatttgcagtgttccttttgcttttagaataaatcataaatatttccccaatactgtcaagatacttcttcaactttgtccctgaaccatcagctttctttagggtccgggtatcctttacacttcaatggggttttcttgtgtgtgtcattgggggtaactccattgacctcagcatttctatctcaagagatggctctggaacacagaaccagaggcaacaggtactaatggttgataaaattaacagcgactgcataaccattttccacatggcagggctgtgcttaagccccacacctccaataatcaatttctatgacggtactaataaccttaactatatgcaaattcttcaccacttatgatatggtacaaactggagtttacagatggccttggccttgcctagcccatttgttcatcctaacttcttcatcacttcctgatgcacttggggaagcatgttgacacaacgttaccaatatttgattacctatggttatctgcaattacctacgcttatcttatcagaccctagatgccatttgagccccttacttctttgggcagtgggtgaaatgggagaacatagagaaatgttcactttgacctaagaaacgcataaaagggaatgccatgcacaatgtaagataaaatgtttggggacaggggatcatcgtgaaatttatttctgctattctgccctattgaggtcattaattataatggatttaaagatttttttttaaactctacaaacactaagccaaggaattcaggttatctgctatgttaacctaataaagcaaaggaaaataagttgctttaatccttgcttgttaacctaataaagcaaaggaaaatatgttgctttaatccttgcttcttttctcttttggtaatagaaaaggtaaataagatgtaatgttgaactgctggtgatgatttctaaaacgactctttaaatactcctttcctatggacttatattaaagatgcattgtacacattgttttagcagatagatcaaagatatactcagtggtcatctgttgcattatcagaaatttgatacatgttacagaagcatgaggaagggaatcctatccacttttgaaaatagagttcacattgcaagcgacatagggcattatcaaaaccaattcagagcctggcacaaaatgtatacttcctagtgaaagctgtctcaaaacacagcctttttgatggatcatattagctcatatctgccatagaaaggcaatcaagcttactccctgcaatcggagtcaatatcaattcttgctcaagcaaacatgttttacagtgttggcgcaatggcaggaactagtcaagggcactttcagatctggaaagaggaaagaggaggtagaaaatcactcttttgtgtttcttaaactgtcaatcaagcaagaaaatttattccaccccttcatatttgctctaaaatctggggccagtagttgaaatgtgatcttgttctttctcagccttttggcaatttaatgccaaatattccaaatgttagatgaatggcagtaataaaatgattcaaatgtttgataaatacaagctgagagcaaaatctggactctgaaaaatcggaactattttatcatgttgctaaaatgagagcatcattttcttccctctctgtaagtgcggtagtttaatttcctagaaaaagttgctagtgccttgtttaagatgatcatttatcatttcatgtggatattattggtctaattagaaggagaagattgattggatttactttaaagaaaattattctcctatgtctctttgaactcaggaatagaaaatgaccaagaagcacatcatcttcagatgtgatttttgccctcactggggatgtagaaccagaataggtacaacatatgctcagaagagaggtgacttcagtattagccttctagaaactaacatcactttaatttttacatgttccaaaaaaaatcatagtgattgttctgtaataagaatgttaacgtgatgcctatagaagttagaggtttttgtttctgtttctcttcaggcaagtccatagatagaggaaaatcagacacaggctggtgacaactggtatagatacagtgagcatggaatgagaaccacctacaacattgcctgattatttttaagtttatatcaaaactgcttcacaagttcacaaaagttgtcactcttaatttgggttaagaaaagtaatagtattatctctgctgaagttgattgtttttctcttttaccatgactgttggccaaaagcaagctgaacctctgcactttgaaacaaagcacagtatgaatctttaacccaagcacttagtttcaccactgagattctacatcatctgcaagaaaatgcacaaacttttggtccaatgttggattcttcaaaagtgcatagcaaaacttttgtgctatgccgcttgatgtaacttttaaagatgttatcaaatgttaaatgcctcattctgcgttaatttgctgttggctgttttgtgaacacaaaataaacttgagatttttttttttttttttttttgtgaaactcctccaaagccaatttcagcccttggtaagcttgcagacagttactgatcttaaatttaattttaaaagacaatgtatcttaattataatttagctttttaaaacaatgagatagctttacatttcccctttgtttgaatgagaaaatggatcttgggttgctatgctagaacacttgtagattgctgggtcctttgtaagggggccatggacacaccacactttctttcaatccttacatttgaagcattgatattcttcaaaaccttcttgttacatgtgcgcaatagaaatttctaatgttcatgacttttatctttcctgtccatcaattcactggttgtaaatgcttcctgagagctgtctaggtctgtatcccagattgttgcttaatgacatctgacagatgcattgttttctgaaatcagcttaagacaccaattgtggcaactggaaactcattacctgctgcattggatcaactatggaagttggagcaggggtgggcggaggtcacctaaccaatcaatggaaggcaactcacacctgctccaagcctcagctttgagaaacaaacacgtttataagaaaaaatatatagctattattacagaagtgaatatgttgtgctctcttactgctcttggtgcattgacagtttctgtatctcaaccctattcatctttatgaaaaagcattctgaagatctatcctcagcactgctgagtgtgcagtcacactttcctaccaacccccttcttaccatctctagctgccatttgtggggggaacaaaacaagggaatcctgattgtgtacagtataaattgtattatattttttgtacttatgttttatgtaaatagtttgtctcattcaattgtatgtgagcattgaaataaatcctaccatttaggggacaattt

SEQ ID NO: 5353 - protein, 1074 aa, Homo sapiens; identical to SEQ ID NO: 5351

SEQ ID NO: 5354 - DNA, 9083 bp, Homo sapiens
ctgctctccctgagcccgctcccgagcgctgctttcccgccgcgggtgggcttcgcagcctcaggccagccgcggcccttggcccgctgcagccccggccctccaccttccccgtgcaggggcggcccggccagtgtcgctcatcccgggacgctcccttctcccacccaggactgccccgcggagctggcttggacacccaactttgccacctcgagggtcgtctctgctgggcgcgaacctgcccacccaccggttggccgcgcgctcggggaccgtgctcgtggcccccaagccggtgcccccattctggaactcagcgagtagggggcggctctggggaagtggcagggggcggctgcagctgctgcctccacttccctagccaggtgctgaagaggatcctcggagccgctctggcccccaggcgctggatgactggcaccagcgctcctcgcacctgtgttggtgtgtgagacttgggctggagtgcccacgtggctgtggagtcagtgtgattcatgattgaggaaacgcgtcctccatcctctctctccttggcactttccacacatgaggagaagaagagcttctgtttagaagacacgtgcccagagtcagaggccccttgcccaccatgaagggaacctgtgttatagcatggctgttctcaagcctggggctgtggagactcgcccacccagaggcccagggtacgactcagtgccagagaaccgagcatccagtcatctcctataaagaaattggcccctggttacgggagttcagagcgaagaatgctgtggatttctcgcagttaacatttgacccaggacagaaagaacttgttgtaggagcaagaaactacctcttcaggttacagcttgaggatctgtctcttatccaggctgtggaatgggagtgtgatgaagctaccaaaaaggcctgttacagcaaaggcaaatcaaaggaggaatgtcagaactacatccgggtgcttctggtgggtggcgaccggttattcacctgtgggaccaatgcattcacgcctgtctgcaccaaccgctcgttgagcaacctgactgagatccatgatcagatcagtggcatggcccgctgtccctacagtccccagcacaattccacagcgctcctcacagctggtggggagctctatgctgctacagccatggattttccaggacgtgatcctgccatttaccgaagcctaggcattttacctcctctccgcacggcgcagtacaactccaaatggctcaatgagccaaactttgtgtcatcttatgacatcggaaattttacctacttctttttccgagaaaatgcagtagagcatgactgtgggaaaacagtgttctccagagctgcccgggtgtgcaagaacgatattggtgggcgcttcctgctggaagacacctggaccacattcatgaaggctcgcctgaactgctcccgtcctggggaagtccccttttactacaacgaattgcagagtactttcttcctgcctgagctggatttgatctatggcatctttaccaccaatgtgaacagcattgcggcctcagctgtgtgcgtcttcaacctgagcgccatcgcgcaggccttctctgggcccttcaagtaccaagaaaactcgcgctcggcctggctaccgtatcccaacccaaacccccacttccagtgtggcaccgtggaccagggcctgtacgtgaacctgaccgagagaaatctgcaggatgctcagaagttcattctgatgcatgaggtggtacagccagtgaccacagtgccctccttcatggaggacaatagccgcttttcccacgtggcagtcgacgtggtgcagggcagagaagcgctcgtccacatcatctatttggccacagattacggaaccattaagaaagtgcgggtacccctgaatcagacctcaagcagctgtttgctggaagagattgagctcttccctgagaggcggagggagcccatcaggagcctgcagatcctgcacagccagagtgtcctgttcgtgggcctgcgggagcacgtggtcaagatccccctgaagaggtgccagttctaccgcacacgcagcacctgcattggggcccaggacccttactgtggctgggatgtggtaatgaagaaatgcacaagcctggaggagagcctgagcatgacgcagtgggaacagagcatctctgcgtgtccgaccaggaatctcaccgtggatgggcactttggtgtgtggtctccgtggacgccttgcacgcacacagatggcagcgccgtgggatcctgcctctgtcgaacccgctcctgcgacagcccggccccgcagtgtggtggctggcagtgcgagggccctggcatggagatcgccaactgttccaggaacggaggctggactccctggacctcgtggtctccctgcagcactacctgtgggatcggcttccaggtgcggcagcgctcctgcagcaaccccactcccaggcacgggggccgggtgtgcgtgggacagaaccgcgaggaaagatactgcaatgaacatttgctatgtcccccacacatgttctggacaggctggggtccttgggaacggtgcacagcccaatgcgggggtggcattcaagctcgccgcaggatctgtgagaatgggcctgactgtgcaggctgcaatgtggagtaccagtcttgcaacaccaacccgtgtcctgagctgaagaagaccacgccctggacaccctggacacctgtcaacatctctgacaacggcggccactatgagcaacgattccgatacacatgcaaagcccgcctggctgatccgaatttgctggaagtgggaagacagagaatcgaaatgcggtactgttctagcgacggcaccagtggctgctccacagatgggctttctggggatttcctgcgtgctgggagatactctgcccacacggtcaacggggcttggtcagcctggacgtcgtggtcacagtgcagccgtgactgcagcaggggcattcggaaccggaagcgtgtttgcaacaaccccgaacccaagtatgggggaatgccttgccttggcccatctctggaataccaggaatgcaacattttgccctgcccagtggatggcgtgtggtcttgctggtccccctggacaaaatgttcagcaacatgcggcggtggacactatatgaggacccgctcttgctccaatccagccccggcctatggaggggacatctgcctggggctgcacacagaagaggcactctgcaacacgcagccctgcccagagagctggtcggagtggtcggactggtctgagtgtgaagcctctggcgtccaagtccgcgcccgccagtgcatcctcctgttccccatgggcagccagtgctccgggaacaccacggagagccggccgtgtgtgtttgactctaatttcatcccagaagtatctgtggcaagatccagtagcgtagaagagaaaaggtgtggagagttcaacatgttccacatgatcgccgtggggctgagcagctccatcctcggctgcctcctcaccctgctcgtctatacttactgccagcggtaccagcagcaatcccacgatgcgactgtcatccaccccgtctcacctgccccccttaataccagcataaccaaccacatcaacaaactggacaagtacgactcggtggaggccatcaaggcatttaacaaaaacaacttgatcctagaggaaagaaacaaatacttcaacccacatctcactgggaagacctattctaatgcctactttacagatctcaataattatgatgagtactaacagctttcatgtttttggcttcttgtaaatccccagttcctcaaggcctgtgccccatgactgcccatgtttctgaggcttcagagtcgaagtttggatacatttcaagtgcatttcaagccaccagagtgtcccattgctgccaaaaatacacgtctttaaaagcaacaaaaattgaaataagacatcgtgaaaatcttgaccattgttgaatgagccagggtgtgaagtttttaattgtgttcatcctatttttctgacaagtccattggtttgttttttgagcattattttataaatgtgccacccacattggaaggagtctttctttagaactttggagtgtaaatcttcatgatgttgtaattcaagaaaataggcactttctctgaaagacctgctccttccacaagaagtgcataggtccataatatttcataaaatgaagaaaaagaatgtggccaaacaattattcaccatggattgcccaactttccaaatctggataaagctgtgggattcttggaagcagcttgagtgttttcatcttgcctgggaagcccaggaattccacctggtccacaccggcagaagttacagtagactgtgaggcaccccaccttgctcctgatgcagtttctgtgccattgctggtgctggtggaggcagcggagcagaggctcaggcacaatgaagcgtggatgtgttctgcaggttgctgcaaaactcaccttattctgacttttggatttcatggcattccaggaagctccttgccatgctgttggcctggaagtccacctgtctggtccatagtgacgtcctgaagagccagtctgtaaaataaccaaccacttacttagcgtttggatagactccatgccttctctctccctgcaaagaaaaatcttgaacatttatgatgtcaattagtgaaagtattgaaaatactaaattataactaaaagcaactttttatgttattgaaaatattgaaagaactgatattaatgataatcattttatttttcatctctctgatatacccaatgtgtggcaatcagcccctaccacgagcattaataccatgtaaagctggctttctggagtctgccaggtccacacgaagtgctacccccagtttctgctgttacttgctgcctccaggccaggggagcaggagatgctcagctctggtgccttttcttttatttcagtgctgccttcccacccacccagtccattcaccctcacctctccctgcatggaggcaacagcatttcaagatgtaccttgggaagtcaggatagctggaagtaagggtttttgggatccctgtggtctcttcactgatcatcgataagcatttaagagtgtgctaacaccattcacagaggtccctggaaaaaaatatataattttctcacaaacaaccaatacataacctatggcagttggttgaataattattgaaaaaaagaacacgactgaaaaagttcatctgatgcctctgagcatgtgataaagtcctgggtagacacggaaacgtgttcttacaaatgaaccttcggatctatgaaagaaaatatagtagggggactaaggaacatagaattttattagcatatgtgattttacccttatctttgtttctaatttaaagaaacaatttcagaaagtgttagaagaattctatgtttaataatgaatattgttgagttcaaaatattctcatatacccagatttacagagatgacacagtattgaaatggcaggtgggctctgtaagttattttggattaatgacattcagggtctttgcagtggggacttcatgttgcctctcactcattcctcatatgtcagagtcttctgtctatatgcacatgctcaaagtccatactcagtaggggaaatctagccggatggttctccaattgttcctcggctggattttcatcatcagatatttcaactcatctcatcagtttcttgtaagaaaaaaacattttcactttgtagcacattttagttatttttgagtcttcttccctaatagtttgtaagcttaaagggacattttattttccctggtaaagaggattctaatatttcaagaatgtttcactggaattgatgggaaatggtttctaaatggcatcgaagctggtctttaatgagtcttttgcaatgacttgggaaaaacaccctccctcactacaggatcttcatgttgttaataatataaacaaacctttgaaattagcattgcaaaagaatcccatttttgtttcgtaccacactgttcaaaggaaaattgtttatctctcttcctttctctctctctcttatttgacagaatagcaagtgtttagataatttcagatatattctaagtattttaccagctgtggaataagttgtgtttgtccatcactgtgtagctaccgttcacatgttctggctctgtactccacgcttatcgcgtgaaccctcacatgttggactttcacagtgtgatctctcacctgtcttggaaactccttcataaagccgctcttccttaggcctgggctgtttggaagtcctggtgaaactttgcggttcacattttaaattcctgaatgaccttttcattctctctttctttatctttgtttttgtccttcattccctccttttgttcttccttcctgccttcttttcttctttcctttcttctttctttaattcttcctttcttcctattttcttggtacaagtggaacaaaaaccaacacatagttttaagctacacctttctgcacctgatgtaaaatgacattaatcactatttaacttctaaaattatttctgaatacagttggagataggctggttttcatgaggaagctggcttggctttagtcttacatttaaattctttgaaagtggctcccagtgctattcagggtcctttcttgaggccagactcatcaccatctactattgattttacagtgcactgacagtttacaggaaggagaagaacagaatttctgcacactacacaacatgtgggcttcctgtagctccagggacatgtagctttggtgaaactggggttttgtaacctctgaatgatatggacttagtgaattctaaggaactcagggggcacgtggtcaggctccaccgcacagaagagccacagtctccagactcatggcgttccctccagaactccccattcccctctgagcatatttctatgctgctgcttcttgtgacttacatgaggcatctcagcttcttcatgtttgtagggatggttccctaagcctgttcaagtaggctctcactagagttaccattcatatttgagaagaaaagaacatttaataaatgtatgtgtggggctgaggttctaaaggaattgaaaagagacgataaacattgaatgagggtgagggcatccctgctggggagaaacctctgtccctaggaagagtccgttcatgtcatgtggtttgggatgaaccaggggtctggccccatcgggtcacaggtgatggcaaatagaaaagaagcaaatggaggaaatagtcggataagtaggtgacgtgaaaggcaggacctggtcaccccagcaagtgctatggacagttcccggaaacggttgcccacttcacaggtccatgggtctgacccttggactctgccaggatcaactgcccagagtgccagagttttagccaaaggtgtacttacttccttatttatctgcaaaaggatggaaactgtgggagtcaaagcctattttgctgagtgttcccactggagtctctggtagaattagcaggtcatgctgtcaaaatcatggacaaaggctgggtgcagtggctcatgcctataatcccagcactttgggaggccaaggtgggcggatcacctgagctcaggagtttgagaccagcctgggcaacatggggaaactccatctctacaaaatatacaaaatattagccagccatcgtggtgcgtgcctgtggtcccagtttcttgggaggctgaggcgggagtatcatttgagccaggaggttgaggttgcagtgagctgagatcacatcactgcactccatcctgggtgacagagagagaccctgtctcaaaaaaaaaaaaaaagaacaaagtcttagcggggggtctctatgtccccaagtggctctctaaggggatccattagcgtataattgaatatcaaagggaattttaccttaaacatatatcaagtctatactcagctaatcgttttgtctaaacacagccttgttagcatttgaatttacaaatattcatttgcttatttgcagtgttccttttgcttttagaataaatcataaatatttccccaatactgtcaagatacttcttcaactttgtccctgaaccatcagctttctttagggtccgggtatcctttacacttcaatggggttttcttgtgtgtgtcattgggggtaactccattgacctcagcatttctatctcaagagatggctctggaacacagaaccagaggcaacaggtactaatggttgataaaattaacagcgactgcataaccattttccacatggcagggctgtgcttaagccccacacctccaataatcaatttctatgacggtactaataaccttaactatatgcaaattcttcaccacttatgatatggtacaaactggagtttacagatggccttggccttgcctagcccatttgttcatcctaacttcttcatcacttcctgatgcacttggggaagcatgttgacacaacgttaccaatatttgattacctatggttatctgcaattacctacgcttatcttatcagaccctagatgccatttgagccccttacttctttgggcagtgggtgaaatgggagaacatagagaaatgttcactttgacctaagaaacgcataaaagggaatgccatgcacaatgtaagataaaatgtttggggacaggggatcatcgtgaaatttatttctgctattctgccctattgaggtcattaattataatggatttaaagatttttttttaaactctacaaacactaagccaaggaattcaggttatctgctatgttaacctaataaagcaaaggaaaataagttgctttaatccttgcttgttaacctaataaagcaaaggaaaatatgttgcttt

SEQ ID NO: 5355 - protein, 1074 aa, Homo sapiens; identical to SEQ ID NO: 5351

SEQ ID NO: 5356 - DNA, 536 bp, Homo sapiens
tgcccaccatgaagggaacctgtgttatagcatggctgttctcaagcctggggctgtggagactcgcccacccagaggcccagggtacgactcagtgccagagaaccgagcatccagtcatctcctataaagaaattggcccctggttacgggagttcagagcgaagaatgctgtggatttctcgcagttaacatttgacccaggacagaaagaacttgttgtaggagcaagaaactacctcttcaggttacagcttgaggatctgtctcttatccaggtggccctgtttgttccgtggatgtgatcctgatttgtccttccttagatgacagaccattcaaggaacattgcttcaaagcctggacacattccttcccccacagttacagcaatcatcgattatttagtttgatgcatccgggcatcaatttcttgtaaaacagctttgtttcctctttataatttatattaacataaatatgaatacttgggttaaaagctatctataacaaagaataaagggaaatagatcaaa

SEQ ID NO: 5357 - protein, 98 aa, Homo sapiens
MKGTCVIAWLFSSLGLWRLAHPEAQGTTQCQRTEHPVISYKEIGPWLREFRAKNAVDFSQLTFDPGQKELVVGARNYLFRLQLEDLSLIQVALFVPWM

SEQ ID NO: 5358 - DNA, 740 bp, Homo sapiens
ctgaagatggttcctgcctgaaccatgcacactaatcatttaatgttctacagaagaaaagaacaaacagagcagggaggcagatgtggccacatactggatctacacttaaaacagtgaatggctgctacccccacctcctgcagtaggaacaggaagaaaggaaggatcacctatagaaaactcaccctgaaaagatgtggagacaggactcaaggaggtcccatttccaaatggaagaagtaaaattttaacaggatgaagtctttgacccgaacctaaatacagaccagaattctgagcccaaaaactatctccagcatccggagaagaagcatcatgaaaggggaggagagagctgtttatatataaaataagttgaatttgcaagaaagaaccgactgtctttttctttaaaaattgtaggtagtatcaaagtttttctcctctttacagataaaaacaaaaaggctaacggaatgcagtcgaccgagaactagtttcttacatttccattgagggtatctttctctagatctgtcatttttcagaattttccaagtaataaagtcacaggcttttttgttaggtggctggaaagagaaatgtatttgtcattctgtctgatcttccaaagcatttttcagtgttgtttttgttgctgttatcttgttgaattttttatcagactattattggtatcaccaataaagaggatgttgaattatgtttctcattcc

SEQ ID NO: 5359 - protein, 41 aa, Homo sapiens
MAATPTSCSRNRKKGRITYRKLTLKRCGDRTQGGPISKWKK

SEQ ID NO: 5360 - DNA, 321 bp, Homo sapiens
cagtgcccaactagaagaggctgagcacttccctcctgtcatttgtagactgatagtccagtcccatcattaccaggtctcacccactgccagaaggatggctcgtcctcagtcccatgaactcagctgtgctcatgagttaccaatgaggaagggatgaaaggagaaaataaaaattaatcttgtatccacaaaacataaaaactcacattaagtatcccatcatgattataaaatatcaccactcatcacctataggaggataaactaaggctagttaagggtaaatgatattgtgactgtcaggactagggcatttgt

SEQ ID NO: 5361 - DNA, 1672 bp, Homo sapiens
agttcacactcccttaagttaaagagatacattctttttacaacagagccttatgttttcatctggctaattcagaagatatcttgttctcttttgaccagagacaaaagaagaaaagtcttggaaacatccttcacagtttggggatgaatgaaggcagagaaggaaccagtgtgaagagacacgacagtttgtgtggagaaaggggttgaccatttacaaggagagagccatttcctaagacgttgcttcatcaaagcatcctggaaccccagaagagggaagagtatcaaaccgcatctgtgtgcaagaagcctggctcccctccccatgcaactggaagaccaatgagaatcagaaaagcagtgaccacgggccatcctggagccacatgggggcagcgtcttctgggacacaggggaagcactgagaggcatttaggaaccagggatccatggtcattcttacttaaagaacacacccattatttacatcctatcccaatggtggcaaaataataccactgagctgaaaaggatctctacattctaccaaatcctgttattctcacatgggcttcttcaaaagtatagaaggttgtcaatgtgaacacagtgcacttcatgactatcatatcaatccctgagtgtttactttcttctcagtgacattaacactggaacatccatgtcaaggaagtacgatctgttcttttcaaactaaaacatgtccagtccggagtgggtgggagcaagcccaccttgtggccactactgaactaccaaaactccaacagagaaaccaattctgtgaagcctatggggaatgccacattttttctaaagaaccataaattaagtttaaattcatgtggtctgttcactaaatgtctttgcagaaggaaaagggaattggctccaaggattgcagttgctctgaaagtgcatgtggcatcaatactcacttctctaagtggggtcccaggacctgtggcatcagtattatctggaaacagaaatgcagactctcaggttccacctcagaacccctggaccagcttctgcatctccacagaatccccaggtcctctgtgcctttaggttggagaatcagtggaataaacaccaggagtgcaaacaagatcaaagaagttacctgttgtagttcactttttcaaataattgactgaaattaatttttataattaatgaagctagtgatgatttggaatcccttgactaagagaagggttttaatgtaattaatctgcaaaatgatcagtttttgtgcatcactaaacctatgaagtttataaagattattttcctagctggttatgaagaaaataatgtcacaaaagcatctaagggctgtgccttaccaatgagccgaccctctccagtctgctttcctgtaatcatagtgactcaatttctagacttagaaagaaaaaacacagaaaactaacatagaggattgttctcccttctggtcacggtttatggtagcaacaggtgaaaaaggccaacagaagcaacgatttgcctcatcacattaaaagaaacatttgctttctcttccaaaagcgtaagtagtaactatggaaaccagacaaaaacgttgaaaatgacttgcaattcacaaagagcagaacaactctatttcacccacc

SEQ ID NO: 5362 - protein, 100 aa, Homo sapiens [sequence omitted]

SEQ ID NO: 5363 - DNA, 375 bp, Homo sapiens
ggagttaagaccccaacatgtaaatctggagggatgcaattcaacacgtaatattccctaacacaatatttccataacagtctgtagcgtcttcttcaggctaagggattggggcctcatctatcagagttgtaataaggaacaaaggttgttgaaggtatccaaagggcaatgtaacccaaaaatgtgaacaactggtatatatggagcatcaggaagagtagctaatggatgtggagcttaataccaaggcgatgggttgatttgtgcagcaaaccaccatggttcacgtttacctgtgtagcatacctgtacatcctgcacatatacccgagcttaaaagttgaaggaaaataaataaatttaatataaata

SEQ ID NO: 5364 - protein, 41 aa, Homo sapiens
MWSLIPRRWVDLCSKPPWFTFTCVAYLYILHIYPSLKVEGK

SEQ ID NO: 5365 - DNA, 404 bp, Homo sapiens
ggaagatgcaacaggaaggtcctcacaagatggctgaacagatgcaggtgctgtgcctctggactgcctagcctccagaactgatacatatgcaggatgtgcagctttgttacacagatacttttggctcggtgaatggtgcttatcagttaacagcagaaaccctcctgaaatggaaaatggttcattgtttccatcatgtactctatggaatacaaagctctgaaacctgttggctactggaagtgtacaagaaaaagactctcaagctagaggtggggtagagctggagccagccatgtcaagatctttcgaggacatgaacattttttatgcttattaaaagatgatgtggttttaaaataaatctaaggctgggcgcagtggctcatgcctggaatccc

SEQ ID NO: 5366 - protein, 64 aa, Homo sapiens
MQDVQLCYTDTFGSVNGAYQLTAETLLKWKMVHCFHHVLYGIQSSETCWLLEVYKKKTLKLEVG

SEQ ID NO: 5367 - DNA, 380 bp, Homo sapiens
atgcaacaggaaggtcctcacaagatggctgaacagatgcaggtgctgtgcctctggactgcctagcctccagaactgaggtgttggaagctgtgaatgtggatgaaagtaccaatatagagagaacagagtgagaatagaagacagcccaagaatctaaagtcatgcacttgcaagggagtcagaggaagagagggaaaatggttcattgtttccatcatgtactctatggaatacaaagctctgaaacctgttggctactggaagtgtacaagaaaaagactctcaagctagaggtggggtagagctggagccagccatgtcaagatctttcgaggacatgaacattttttatgcttattaaaagatgatgtggtttt

SEQ ID NO: 5368 - protein, 46 aa, Homo sapiens
MHLQGSQRKRGKMVHCFHHVLYGIQSSETCWLLEVYKKKTLKLEVG

SEQ ID NO: 5369 - DNA, 1148 bp, Homo sapiens
atgaccaacctggagaacctggaagcatacatggatttcgtacacatcaagaatttggtaacagttattggagagtttgagcacctgaggaatatatcactaatatttaaagatatcacgggcaaagcatgccaagatattacagttgacacctgggagcaggatctctcccagaggtctctgctcacagacaaactccaccccagtggggcagtcataattccaaggattaggatggggacatgtctttggagccaccattcagcccgctacaggaaagatgtgtcaaaatctctccaggattgtcaatttctccttgtaattcaaaggaatggctgtatttcaaaggtttcctttcctcatatcttccctaaatctgaccagcggaagccacggcctggggtgttttctggttcagtcacaatttccagggtaggactgtattgtaagaagaatgcggtcactctccccaagcgcacattatcacacttcttttaagcaggagatcttaggactgtgtgagtggccagtcacatttccattttgccagaactaccattattcccacagcctctggaacaaaacctcttgctcgagaaggtgcttcagatgaactcactatttgaaaatgcatcttgttacgctgtttttttgttttttgttttgttataaataattaagttttgagggattctgcagatgcgccaaaaaacacgtgtccggggtaaaagctgtggaaggtgctcggttctaaggagagggaaggaaagccaagtggaccctgtcatctgaaattgttttgtcatccactgacttttacaaataaaacagccgggcgcagtggctcacgcctgtaatctcagcactttgggaggccaaggcgggcggatcacgaggtcaggagatcgagaccatcctggctaacacggtgaaaccccatctctacttaaaaaaatacaaaaaattagccgggcgtggtggcgggcgcctgtagtaccagctactcgggaggctgaggcaggagaatggcgtgaacctgggaggcgcagcttgcagtgaaccgagattgcgccactgcactccagcctgggcgacagagcgagactccatctcaaaaaaataaataaataaaaataaaaaaataaaac

SEQ ID NO: 5370 - protein, 165 aa, Homo sapiens
MTNLENLEAYMDFVHIKNLVTVIGEFEHLRNISLIFKDITGKACQDITVDTWEQDLSQRSLLTDKLHPSGAVIIPRIRMGTCLWSHHSARYRKDVSKSLQDCQFLLVIQRNGCISKVSFPHIFPKSDQRKPRPGVFSGSVTISRVGLYCKKNAVTLPKRTLSHFF

SEQ ID NO: 5371 - DNA, 704 bp, Homo sapiens
gcacaattattttttaaaagaatccaaatgtcagaataatttcacaaaatgcatgtgcatcccacactgggtggtacatgaaagtgcacggtaaggtagggtttgctgtgaagtggctttgtagtgtttctcgcatggactgtgagagttaaaggagcgacggggtgacgtgatgcattaggctaaatccaggtaaagcacagctagcagttagcaggatcgtgaggcaggtaaagctgccaccttgcaggggattttccctttctgctttcctatgcctcatcccaggcacttaatctttgtgattttatcccatggcttttttttttttcccacatgcccactgatctttgatttaagtgttagattacatattgctatttttattttattatatttaatatattatattaattatatctttattattttatttttattttttgtgggacagagtctcagttgcactccagcctgggtgaaagagcaaaactccatctcaaaaaaaacaaacaaaaataaataaagaaataatctatgcatagattaatacaagaaattggtcatcacttgtgcctttggggaaggtggatggggattgggacctgagaggaagacttcttcttcattatatattttaaaatattttctgcattttttactgtgtttatgacttttcaataaaaagttttgaaggcttgcac

SEQ ID NO: 5372 - protein, 83 aa, Homo sapiens
MPHPRHLIFVILSHGFFFFPTCPLIFDLSVRLHIAIFILLYLIYYINYIFIILFLFFVGQSLSCTPAWVKEQNSISKKTNKNK

SEQ ID NO: 5373 - DNA, 2724 bp, Homo sapiens
aaaacgctgttggaaatctcgcgatggagggaggaggaggctggtctcaaattcccgggctcaagcgatcttctggcctcagcctcctgagtagctgagattacaggtatacccctagaaacacttaaagaagaaagtcagtcaagacatgttctacctgcaagttttgaagtcaacagtttgcagaaaagcaactgggggttcttacttactgggcttgtgggtggcaccctggtggctgtgtacgctgtagccacgccgtttgtaacgccagcccttcgaaaagtctgtttgccgtttgtacctgcaactacgaagcagattgaaaatgttgtgaaaatgttgcgatgccgaagaggatcccttgtggacatcggtagtggggacggacgcattgtcatagcggctgcgaagaaagggttcacagcagttggttatgaattaaacccatggctagtttggtattccagataccgcgcttggcgagaaggtgtgcatggatctgccaaattttatatttcagatttgtggaaggttactttttcgcagtactcgaacgttgttattttcggtgtgcctcagatgatgctgcagttggagaagaaacttgaacgtgaacttgaggatgatgcacgagttattgcttgccggttccctttcccacattggactccagaccacgtcacgggggaggggatagacacagtgtgggcatatgatgcaagcacttttagaggccgtgaaaagaggccctgtacatcgatgcatttccagctgcccattcaagcataaacttgactgggagtgtttttctgaaatattgtagtcttccctgatcttgtagagacttacagctgtgtccttagcaaaggagcataattgtctttggtttggaatgagaaattactattactttccttaactgttggagaaaacaaacgaagaaaaacaggtagatttaaaatctgcttttgatgctattttcttaaaaattgtacttactgcctttccatgcacctggatgcatgaaaagatgaataagtgatggtcatggttatgggtaggaaaataagatgccaatagctcttcacattataaacaatatggcttaatgcctcgataaggagaaatgatttttaaagacagtatatattaccaactgtttgtagtatcctataactttgttcatacttaagttgtatctctttcctttttgtacttcatggcaaaattaattttctaaaggattcagagaggcgtttatattttataacatttattagaaataatttgttccaccactagattactgtattttatggaatctaagctgtatatgtgtacatttgtatacatgtatgtgtaaatgtaagcctgacgtgggttcagattccagttttgtcatcagcaagaggcctcggacccatgacttactgcctctgagccttggctttctgtgtatctctgccactgggataatggtacacataacagtggagtggggaccaatttctaaaactcatggcacctagtctttggtccataaatggtgtttgttattttagacactgagaaaaatcttattcacagaagttgcagattatttctgctagtcacttttttatttcttgagagctgccactcatttaatatttctcatttatgagaagagacttgactgatttagataaaagacgaattaaggaaaacctttgaacgtgagtagacaagcttcatatatctgtaaagtgaatattgaatggtagcttgagtcattcgtacttatcacagaaaagaattgaactcccagtcatacacctgtaactgaaataccaaactgtcttaatggagatgtaatgaagtaagatggtcacatctttaactaaacttataaaaattggtcagtttgatcattttcatttaaatgagaaacatctggggacacattcattcattcaacaaatatgtattcagtatctactgtagaagaagctctgagattctgcggtaaatagacatgcaaagcccctggcctcatggaattcctattctggaaaggagagacaaacaaataagcaagggaatcttagtgtgtgtggagttctctgaagtaaacagtgtgatggtgtagagagcacctgtgtgagtctgagatgaggggatgtgatgttgtggacttcagccaggtttttggcagctagtgtctgtccctttttcagtagctccagtcttcttatgaagaatgagttctttctgtggtgtgtgactttagtgggagggcagctcttgctctatgcctctcagttgccttccactgtaaccagtcctgtaactggtctgggcacactcggagggggatccatggtagctccttgccatgaagatgtgggtagaggagggttctgtggggcctcggaggtgttcaacattttctagaagtgttcctggtgggtttatagaggcattgatatggtttggctgtgtccctacccaaatctcatcttgaattcccacgtgttgtgggaaggacctggtgggaggtgattgaattatgggggcaggtctttcctgtgctgttctcatgatagtgagtaagtttaatgagatctgatggttattttaggggggagttttcctgcacaagctctttttgcctactaccattcacgtaagatattccagccacatggaactgtaagtccaattaaagctctttcttttgta

SEQ ID NO: 5374 - protein, 150 aa, Homo sapiens
MLRCRRGSLVDIGSGDGRIVIAAAKKGFTAVGYELNPWLVWYSRYRAWREGVHGSAKFYISDLWKVTFSQYSNVVIFGVPQMMLQLEKKLERELEDDARVIACRFPFPHWTPDHVTGEGIDTVWAYDASTFRGREKRPCTSMHFQLPIQA

SEQ ID NO: 5375 - DNA, 2607 bp, Homo sapiens
aaaaacgctgttggaaatctcgcgatggagggaggaggaggtatacccctagaaacacttaaagaagaaagtcagtcaagacatgttctacctgcaagttttgaagtcaacagtttgcagaaaagcaactgggggttcttacttactgggcttgtgggtggcaccctggtggctgtgtacgctgtagccacgccgtttgtaacgccagcccttcgaaaagtctgtttgccgtttgtacctgcaactacgaagcagattgaaaatgttgtgaaaatgttgcgatgccgaagaggatcccttgtggacatcggtagtggggacggacgcattgtcatagcggctgcgaagaaagggttcacagcagttggttatgaattaaacccatggctagtttggtattccagataccgcgcttggcgagaaggtgtgcatggatctgccaaattttatatttcagatttgtggaagatgctgcagttggagaagaaacttgaacgtgaacttgaggatgatgcacgagttattgcttgccggttccctttcccacattggactccagaccacgtcacgggggaggggatagacacagtgtgggcatatgatgcaagcacttttagaggccgtgaaaagaggccctgtacatcgatgcatttccagctgcccattcaagcataaacttgactgggagtgtttttctgaaatattgtagtcttccctgatcttgtagagacttacagctgtgtccttagcaaaggagcataattgtctttggtttggaatgagaaattactattactttccttaactgttggagaaaacaaacgaagaaaaacaggtagatttaaaatctgcttttgatgctattttcttaaaaattgtacttactgcctttccatgcacctggatgcatgaaaagatgaataagtgatggtcatggttatgggtaggaaaataagatgccaatagctcttcacattataaacaatatggcttaatgcctcgataaggagaaatgatttttaaagacagtatatattaccaactgtttgtagtatcctataactttgttcatacttaagttgtatctctttcctttttgtacttcatggcaaaattaattttctaaaggattcagagaggcgtttatattttataacatttattagaaataatttgttccaccactagattactgtattttatggaatctaagctgtatatgtgtacatttgtatacatgtatgtgtaaatgtaagcctgacgtgggttcagattccagttttgtcatcagcaagaggcctcggacccatgacttactgcctctgagccttggctttctgtgtatctctgccactgggataatggtacacataacagtggagtggggaccaatttctaaaactcatggcacctagtctttggtccataaatggtgtttgttattttagacactgagaaaaatcttattcacagaagttgcagattatttctgctagtcacttttttatttcttgagagctgccactcatttaatatttctcatttatgagaagagacttgactgatttagataaaagacgaattaaggaaaacctttgaacgtgagtagacaagcttcatatatctgtaaagtgaatattgaatggtagcttgagtcattcgtacttatcacagaaaagaattgaactcccagtcatacacctgtaactgaaataccaaactgtcttaatggagatgtaatgaagtaagatggtcacatctttaactaaacttataaaaattggtcagtttgatcattttcatttaaatgagaaacatctggggacacattcattcattcaacaaatatgtattcagtatctactgtagaagaagctctgagattctgcggtaaatagacatgcaaagcccctggcctcatggaattcctattctggaaaggagagacaaacaaataagcaagggaatcttagtgtgtgtggagttctctgaagtaaacagtgtgatggtgtagagagcacctgtgtgagtctgagatgaggggatgtgatgttgtggacttcagccaggtttttggcagctagtgtctgtccctttttcagtagctccagtcttcttatgaagaatgagttctttctgtggtgtgtgactttagtgggagggcagctcttgctctatgcctctcagttgccttccactgtaaccagtcctgtaactggtctgggcacactcggagggggatccatggtagctccttgccatgaagatgtgggtagaggagggttctgtggggcctcggaggtgttcaacattttctagaagtgttcctggtgggtttatagaggcattgatatggtttggctgtgtccctacccaaatctcatcttgaattcccacgtgttgtgggaaggacctggtgggaggtgattgaattatgggggcaggtctttcctgtgctgttctcatgatagtgagtaagtttaatgagatctgatggttattttaggggggagttttcctgcacaagctctttttgcctactaccattcacgtaagatattccagccacatggaactgtaagtccaattaaagctctttcttttgta

SEQ ID NO: 5376 - protein, 216 aa, Homo sapiens
MEGGGGIPLETLKEESQSRHVLPASFEVNSLQKSNWGFLLTGLVGGTLVAVYAVATPFVTPALRKVCLPFVPATTKQIENVVKMLRCRRGSLVDIGSGDGRIVIAAAKKGFTAVGYELNPWLVWYSRYRAWREGVHGSAKFYISDLWKMLQLEKKLERELEDDARVIACRFPFPHWTPDHVTGEGIDTVWAYDASTFRGREKRPCTSMHFQLPIQA

SEQ ID NO: 5377 - DNA, 2861 bp, Homo sapiens
aaaaacgctgttggaaatctcgcgatggagggaggaggaggtatacccctagaaacacttaaagaagaaagtcagtcaagacatgttctacctgcaagttttgaagtcaacagtttgcagaaaagcaactgggggttcttacttactgggcttgtgggtggcaccctggtggctgtgtacgctgtagccacgccgtttgtaacgccagcccttcgaaaagtctgtttgccgtttgtacctgcaactacgaagcagattgaaaatgttgtgaaaatgttgcgatgccgaagaggatcccttgtggacatcggtagtggggacggacgcattgttatttttattgcatattattacttgttcacaaaaccatcctcccagacactttcatttcactgctgctgtgctagcccactgatggagagatgcagtggattttcagcaatgttttgttcgacctccccgggggttggctgacctagaatcaattatggaggtgttccaagtgaacctgaatgtctattctgatacttgaggtcatagcggctgcgaagaaagggttcacagcagttggttatgaattaaacccatggctagtttggtattccagataccgcgcttggcgagaaggtgtgcatggatctgccaaattttatatttcagatttgtggaaggttactttttcgcagtactcgaacgttgttattttcggtgtgcctcagatgatgctgcagttggagaagaaacttgaacgtgaacttgaggatgatgcacgagttattgcttgccggttccctttcccacattggactccagaccacgtcacgggggaggggatagacacagtgtgggcatatgatgcaagcacttttagaggccgtgaaaagaggccctgtacatcgatgcatttccagctgcccattcaagcataaacttgactgggagtgtttttctgaaatattgtagtcttccctgatcttgtagagacttacagctgtgtccttagcaaaggagcataattgtctttggtttggaatgagaaattactattactttccttaactgttggagaaaacaaacgaagaaaaacaggtagatttaaaatctgcttttgatgctattttcttaaaaattgtacttactgcctttccatgcacctggatgcatgaaaagatgaataagtgatggtcatggttatgggtaggaaaataagatgccaatagctcttcacattataaacaatatggcttaatgcctcgataaggagaaatgatttttaaagacagtatatattaccaactgtttgtagtatcctataactttgttcatacttaagttgtatctctttcctttttgtacttcatggcaaaattaattttctaaaggattcagagaggcgtttatattttataacatttattagaaataatttgttccaccactagattactgtattttatggaatctaagctgtatatgtgtacatttgtatacatgtatgtgtaaatgtaagcctgacgtgggttcagattccagttttgtcatcagcaagaggcctcggacccatgacttactgcctctgagccttggctttctgtgtatctctgccactgggataatggtacacataacagtggagtggggaccaatttctaaaactcatggcacctagtctttggtccataaatggtgtttgttattttagacactgagaaaaatcttattcacagaagttgcagattatttctgctagtcacttttttatttcttgagagctgccactcatttaatatttctcatttatgagaagagacttgactgatttagataaaagacgaattaaggaaaacctttgaacgtgagtagacaagcttcatatatctgtaaagtgaatattgaatggtagcttgagtcattcgtacttatcacagaaaagaattgaactcccagtcatacacctgtaactgaaataccaaactgtcttaatggagatgtaatgaagtaagatggtcacatctttaactaaacttataaaaattggtcagtttgatcattttcatttaaatgagaaacatctggggacacattcattcattcaacaaatatgtattcagtatctactgtagaagaagctctgagattctgcggtaaatagacatgcaaagcccctggcctcatggaattcctattctggaaaggagagacaaacaaataagcaagggaatcttagtgtgtgtggagttctctgaagtaaacagtgtgatggtgtagagagcacctgtgtgagtctgagatgaggggatgtgatgttgtggacttcagccaggtttttggcagctagtgtctgtccctttttcagtagctccagtcttcttatgaagaatgagttctttctgtggtgtgtgactttagtgggagggcagctcttgctctatgcctctcagttgccttccactgtaaccagtcctgtaactggtctgggcacactcggagggggatccatggtagctccttgccatgaagatgtgggtagaggagggttctgtggggcctcggaggtgttcaacattttctagaagtgttcctggtgggtttatagaggcattgatatggtttggctgtgtccctacccaaatctcatcttgaattcccacgtgttgtgggaaggacctggtgggaggtgattgaattatgggggcaggtctttcctgtgctgttctcatgatagtgagtaagtttaatgagatctgatggttattttaggggggagttttcctgcacaagctctttttgcctactaccattcacgtaagatattccagccacatggaactgtaagtccaattaaagctctttcttttgta

SEQ ID NO: 5378 - protein, 149 aa, Homo sapiens
MEGGGGIPLETLKEESQSRHVLPASFEVNSLQKSNWGFLLTGLVGGTLVAVYAVATPFVTPALRKVCLPFVPATTKQIENVVKMLRCRRGSLVDIGSGDGRIVIFIAYYYLFTKPSSQTLSFHCCCASPLMERCSGFSAMFCSTSPGVG

SEQ ID NO: 5379 - DNA, 2658 bp, Homo sapiens
aaaaacgctgttggaaatctcgcgatggagggaggaggaggtatacccctagaaacacttaaagaagaaagtcagtcaagacatgttctacctgcaagttttgaagtcaacagtttgcagaaaagcaactgggggttcttacttactgggcttgtgggtggcaccctggtggctgtgtacgctgtagccacgccgtttgtaacgccagcccttcgaaaagtctgtttgccgtttgtacctgcaactacgaagcagattgaaaatgttgtgaaaatgttgcgatgccgaagaggatcccttgtggacatcggtagtggggacggacgcattgtcatagcggctgcgaagaaagggttcacagcagttggttatgaattaaacccatggctagtttggtattccagataccgcgcttggcgagaaggtgtgcatggatctgccaaattttatatttcagatttgtggaaggttactttttcgcagtactcgaacgttgttattttcggtgtgcctcagatgatgctgcagttggagaagaaacttgaacgtgaacttgaggatgatgcacgagttattgcttgccggttccctttcccacattggactccagaccacgtcacgggggaggggatagacacagtgtgggcatatgatgcaagcacttttagaggccgtgaaaagaggccctgtacatcgatgcatttccagctgcccattcaagcataaacttgactgggagtgtttttctgaaatattgtagtcttccctgatcttgtagagacttacagctgtgtccttagcaaaggagcataattgtctttggtttggaatgagaaattactattactttccttaactgttggagaaaacaaacgaagaaaaacaggtagatttaaaatctgcttttgatgctattttcttaaaaattgtacttactgcctttccatgcacctggatgcatgaaaagatgaataagtgatggtcatggttatgggtaggaaaataagatgccaatagctcttcacattataaacaatatggcttaatgcctcgataaggagaaatgatttttaaagacagtatatattaccaactgtttgtagtatcctataactttgttcatacttaagttgtatctctttcctttttgtacttcatggcaaaattaattttctaaaggattcagagaggcgtttatattttataacatttattagaaataatttgttccaccactagattactgtattttatggaatctaagctgtatatgtgtacatttgtatacatgtatgtgtaaatgtaagcctgacgtgggttcagattccagttttgtcatcagcaagaggcctcggacccatgacttactgcctctgagccttggctttctgtgtatctctgccactgggataatggtacacataacagtggagtggggaccaatttctaaaactcatggcacctagtctttggtccataaatggtgtttgttattttagacactgagaaaaatcttattcacagaagttgcagattatttctgctagtcacttttttatttcttgagagctgccactcatttaatatttctcatttatgagaagagacttgactgatttagataaaagacgaattaaggaaaacctttgaacgtgagtagacaagcttcatatatctgtaaagtgaatattgaatggtagcttgagtcattcgtacttatcacagaaaagaattgaactcccagtcatacacctgtaactgaaataccaaactgtcttaatggagatgtaatgaagtaagatggtcacatctttaactaaacttataaaaattggtcagtttgatcattttcatttaaatgagaaacatctggggacacattcattcattcaacaaatatgtattcagtatctactgtagaagaagctctgagattctgcggtaaatagacatgcaaagcccctggcctcatggaattcctattctggaaaggagagacaaacaaataagcaagggaatcttagtgtgtgtggagttctctgaagtaaacagtgtgatggtgtagagagcacctgtgtgagtctgagatgaggggatgtgatgttgtggacttcagccaggtttttggcagctagtgtctgtccctttttcagtagctccagtcttcttatgaagaatgagttctttctgtggtgtgtgactttagtgggagggcagctcttgctctatgcctctcagttgccttccactgtaaccagtcctgtaactggtctgggcacactcggagggggatccatggtagctccttgccatgaagatgtgggtagaggagggttctgtggggcctcggaggtgttcaacattttctagaagtgttcctggtgggtttatagaggcattgatatggtttggctgtgtccctacccaaatctcatcttgaattcccacgtgttgtgggaaggacctggtgggaggtgattgaattatgggggcaggtctttcctgtgctgttctcatgatagtgagtaagtttaatgagatctgatggttattttaggggggagttttcctgcacaagctctttttgcctactaccattcacgtaagatattccagccacatggaactgtaagtccaattaaagctctttcttttgta

SEQ ID NO: 5380 - protein, 233 aa, Homo sapiens
MEGGGGIPLETLKEESQSRHVLPASFEVNSLQKSNWGFLLTGLVGGTLVAVYAVATPFVTPALRKVCLPFVPATTKQIENVVKMLRCRRGSLVDIGSGDGRIVIAAAKKGFTAVGYELNPWLVWYSRYRAWREGVHGSAKFYISDLWKVTFSQYSNVVIFGVPQMMLQLEKKLERELEDDARVIACRFPFPHWTPDHVTGEGIDTVWAYDASTFRGREKRPCTSMHFQLPIQA

SEQ ID NO: 5381 - DNA, 1907 bp, Homo sapiens
aaaacgctgttggaaatctcgcgatggagggaggaggaggctggtctcaaattcccgggctcaagcgatcttctggcctcagcctcctgagtagctgagattacaggtatacccctagaaacacttaaagaagaaagtcagtcaagacatgttctacctgcaagttttgaagtcaacagtttgcagaaaagcaactgggggttcttacttactgggcttgtgggtggcaccctggtggctgtgtacgctgtagccacgccgtttgtaacgccagcccttcgaaaagtctgtttgccgtttgtacctgcaactacgaagcagattgaaaatgttgtgaaaatgttgcgatgccgaagaggatcccttgtggacatcggtagtggggacggacgcattgtcatagcggctgcgaagaaagggttcacagcagttggttatgaattaaacccatggctagtttggtattccagataccgcgcttggcgagaaggtgtgcatggatctgccaaattttatatttcagatttgtggaaggttactttttcgcagtactcgaacgttgttattttcggtgtgcctcagatgatgctgcagttggagaagaaacttgaacgtgaacttgaggatgatgcacgagttattgcttgccggttccctttcccacattggactccagaccacgtcacgggggaggggatagacacagtgtgggcatatgatgcaagcacttttagaggccgtgaaaagaggccctgtacatcgatgcatttccagctgcccattcaagcataaacttgactgggagtgtttttctgaaatattgtagtcttccctgatcttgtagagacttacagctgtgtccttagcaaaggagcataattgtctttggtttggaatgagaaattactattactttccttaactgttggagaaaacaaacgaagaaaaacaggtagatttaaaatctgcttttgatgctattttcttaaaaattgtacttactgcctttccatgcacctggatgcatgaaaagatgaataagtgatggtcatggttatgggtaggaaaataagatgccaatagctcttcacattataaacaatatggcttaatgcctcgataaggagaaatgatttttaaagacagtatatattaccaactgtttgtagtatcctataactttgttcatacttaagttgtatctctttcctttttgtacttcatggcaaaattaattttctaaaggattcagagaggcgtttatattttataacatttattagaaataatttgttccaccactagattactgtattttatggaatctaagctgtatatgtgtacatttgtatacatgtatgtgtaaatgtaagcctgacgtgggttcagattccagttttgtcatcagcaagaggcctcggacccatgacttactgcctctgagccttggctttctgtgtatctctgccactgggataatggtacacataacagtggagtggggaccaatttctaaaactcatggcacctagtctttggtccataaatggtgtttgttattttagacactgagaaaaatcttattcacagaagttgcagattatttctgctagtcacttttttatttcttgagagctgccactcatttaatatttctcatttatgagaagagacttgactgatttagataaaagacgaattaaggaaaacctttgaacgtgagtagacaagcttcatatatctgtaaagtgaatattgaatggtagcttgagtcattcgtacttatcacagaaaagaattgaactcccagtcatacacctgtaactgaaataccaaactgtcttaatggagatgtaatgaagtaagatggtcacatctttaactaaacttataaaaattggtcagtt

SEQ ID NO: 5382 - protein, 150 aa, Homo sapiens; identical to SEQ ID NO: 5374

SEQ ID NO: 5383 - DNA, 1790 bp, Homo sapiens
aaaaacgctgttggaaatctcgcgatggagggaggaggaggtatacccctagaaacacttaaagaagaaagtcagtcaagacatgttctacctgcaagttttgaagtcaacagtttgcagaaaagcaactgggggttcttacttactgggcttgtgggtggcaccctggtggctgtgtacgctgtagccacgccgtttgtaacgccagcccttcgaaaagtctgtttgccgtttgtacctgcaactacgaagcagattgaaaatgttgtgaaaatgttgcgatgccgaagaggatcccttgtggacatcggtagtggggacggacgcattgtcatagcggctgcgaagaaagggttcacagcagttggttatgaattaaacccatggctagtttggtattccagataccgcgcttggcgagaaggtgtgcatggatctgccaaattttatatttcagatttgtggaagatgctgcagttggagaagaaacttgaacgtgaacttgaggatgatgcacgagttattgcttgccggttccctttcccacattggactccagaccacgtcacgggggaggggatagacacagtgtgggcatatgatgcaagcacttttagaggccgtgaaaagaggccctgtacatcgatgcatttccagctgcccattcaagcataaacttgactgggagtgtttttctgaaatattgtagtcttccctgatcttgtagagacttacagctgtgtccttagcaaaggagcataattgtctttggtttggaatgagaaattactattactttccttaactgttggagaaaacaaacgaagaaaaacaggtagatttaaaatctgcttttgatgctattttcttaaaaattgtacttactgcctttccatgcacctggatgcatgaaaagatgaataagtgatggtcatggttatgggtaggaaaataagatgccaatagctcttcacattataaacaatatggcttaatgcctcgataaggagaaatgatttttaaagacagtatatattaccaactgtttgtagtatcctataactttgttcatacttaagttgtatctctttcctttttgtacttcatggcaaaattaattttctaaaggattcagagaggcgtttatattttataacatttattagaaataatttgttccaccactagattactgtattttatggaatctaagctgtatatgtgtacatttgtatacatgtatgtgtaaatgtaagcctgacgtgggttcagattccagttttgtcatcagcaagaggcctcggacccatgacttactgcctctgagccttggctttctgtgtatctctgccactgggataatggtacacataacagtggagtggggaccaatttctaaaactcatggcacctagtctttggtccataaatggtgtttgttattttagacactgagaaaaatcttattcacagaagttgcagattatttctgctagtcacttttttatttcttgagagctgccactcatttaatatttctcatttatgagaagagacttgactgatttagataaaagacgaattaaggaaaacctttgaacgtgagtagacaagcttcatatatctgtaaagtgaatattgaatggtagcttgagtcattcgtacttatcacagaaaagaattgaactcccagtcatacacctgtaactgaaataccaaactgtcttaatggagatgtaatgaagtaagatggtcacatctttaactaaacttataaaaattggtcagtt

SEQ ID NO: 5384 - protein, 216 aa, Homo sapiens; identical to SEQ ID NO: 5376

SEQ ID NO: 5385 - DNA, 1841 bp, Homo sapiens
aaaaacgctgttggaaatctcgcgatggagggaggaggaggtatacccctagaaacacttaaagaagaaagtcagtcaagacatgttctacctgcaagttttgaagtcaacagtttgcagaaaagcaactgggggttcttacttactgggcttgtgggtggcaccctggtggctgtgtacgctgtagccacgccgtttgtaacgccagcccttcgaaaagtctgtttgccgtttgtacctgcaactacgaagcagattgaaaatgttgtgaaaatgttgcgatgccgaagaggatcccttgtggacatcggtagtggggacggacgcattgtcatagcggctgcgaagaaagggttcacagcagttggttatgaattaaacccatggctagtttggtattccagataccgcgcttggcgagaaggtgtgcatggatctgccaaattttatatttcagatttgtggaaggttactttttcgcagtactcgaacgttgttattttcggtgtgcctcagatgatgctgcagttggagaagaaacttgaacgtgaacttgaggatgatgcacgagttattgcttgccggttccctttcccacattggactccagaccacgtcacgggggaggggatagacacagtgtgggcatatgatgcaagcacttttagaggccgtgaaaagaggccctgtacatcgatgcatttccagctgcccattcaagcataaacttgactgggagtgtttttctgaaatattgtagtcttccctgatcttgtagagacttacagctgtgtccttagcaaaggagcataattgtctttggtttggaatgagaaattactattactttccttaactgttggagaaaacaaacgaagaaaaacaggtagatttaaaatctgcttttgatgctattttcttaaaaattgtacttactgcctttccatgcacctggatgcatgaaaagatgaataagtgatggtcatggttatgggtaggaaaataagatgccaatagctcttcacattataaacaatatggcttaatgcctcgataaggagaaatgatttttaaagacagtatatattaccaactgtttgtagtatcctataactttgttcatacttaagttgtatctctttcctttttgtacttcatggcaaaattaattttctaaaggattcagagaggcgtttatattttataacatttattagaaataatttgttccaccactagattactgtattttatggaatctaagctgtatatgtgtacatttgtatacatgtatgtgtaaatgtaagcctgacgtgggttcagattccagttttgtcatcagcaagaggcctcggacccatgacttactgcctctgagccttggctttctgtgtatctctgccactgggataatggtacacataacagtggagtggggaccaatttctaaaactcatggcacctagtctttggtccataaatggtgtttgttattttagacactgagaaaaatcttattcacagaagttgcagattatttctgctagtcacttttttatttcttgagagctgccactcatttaatatttctcatttatgagaagagacttgactgatttagataaaagacgaattaaggaaaacctttgaacgtgagtagacaagcttcatatatctgtaaagtgaatattgaatggtagcttgagtcattcgtacttatcacagaaaagaattgaactcccagtcatacacctgtaactgaaataccaaactgtcttaatggagatgtaatgaagtaagatggtcacatctttaactaaacttataaaaattggtcagtt

SEQ ID NO: 5386 - protein, 233 aa, Homo sapiens; identical to SEQ ID NO: 5380

SEQ ID NO: 5387 - DNA, 2044 bp, Homo sapiens
aaaaacgctgttggaaatctcgcgatggagggaggaggaggtatacccctagaaacacttaaagaagaaagtcagtcaagacatgttctacctgcaagttttgaagtcaacagtttgcagaaaagcaactgggggttcttacttactgggcttgtgggtggcaccctggtggctgtgtacgctgtagccacgccgtttgtaacgccagcccttcgaaaagtctgtttgccgtttgtacctgcaactacgaagcagattgaaaatgttgtgaaaatgttgcgatgccgaagaggatcccttgtggacatcggtagtggggacggacgcattgttatttttattgcatattattacttgttcacaaaaccatcctcccagacactttcatttcactgctgctgtgctagcccactgatggagagatgcagtggattttcagcaatgttttgttcgacctccccgggggttggctgacctagaatcaattatggaggtgttccaagtgaacctgaatgtctattctgatacttgaggtcatagcggctgcgaagaaagggttcacagcagttggttatgaattaaacccatggctagtttggtattccagataccgcgcttggcgagaaggtgtgcatggatctgccaaattttatatttcagatttgtggaaggttactttttcgcagtactcgaacgttgttattttcggtgtgcctcagatgatgctgcagttggagaagaaacttgaacgtgaacttgaggatgatgcacgagttattgcttgccggttccctttcccacattggactccagaccacgtcacgggggaggggatagacacagtgtgggcatatgatgcaagcacttttagaggccgtgaaaagaggccctgtacatcgatgcatttccagctgcccattcaagcataaacttgactgggagtgtttttctgaaatattgtagtcttccctgatcttgtagagacttacagctgtgtccttagcaaaggagcataattgtctttggtttggaatgagaaattactattactttccttaactgttggagaaaacaaacgaagaaaaacaggtagatttaaaatctgcttttgatgctattttcttaaaaattgtacttactgcctttccatgcacctggatgcatgaaaagatgaataagtgatggtcatggttatgggtaggaaaataagatgccaatagctcttcacattataaacaatatggcttaatgcctcgataaggagaaatgatttttaaagacagtatatattaccaactgtttgtagtatcctataactttgttcatacttaagttgtatctctttcctttttgtacttcatggcaaaattaattttctaaaggattcagagaggcgtttatattttataacatttattagaaataatttgttccaccactagattactgtattttatggaatctaagctgtatatgtgtacatttgtatacatgtatgtgtaaatgtaagcctgacgtgggttcagattccagttttgtcatcagcaagaggcctcggacccatgacttactgcctctgagccttggctttctgtgtatctctgccactgggataatggtacacataacagtggagtggggaccaatttctaaaactcatggcacctagtctttggtccataaatggtgtttgttattttagacactgagaaaaatcttattcacagaagttgcagattatttctgctagtcacttttttatttcttgagagctgccactcatttaatatttctcatttatgagaagagacttgactgatttagataaaagacgaattaaggaaaacctttgaacgtgagtagacaagcttcatatatctgtaaagtgaatattgaatggtagcttgagtcattcgtacttatcacagaaaagaattgaactcccagtcatacacctgtaactgaaataccaaactgtcttaatggagatgtaatgaagtaagatggtcacatctttaactaaacttataaaaattggtcagtt

SEQ ID NO: 5388 - protein, 149 aa, Homo sapiens; identical to SEQ ID NO: 5378

SEQ ID NO: 5389 - DNA, 670 bp, Homo sapiens
acacagaggatgccataggacattctatttttcacaacaatcgaaggagccaaatgaattgcagaagtcaccatttttaatgaggaaacactgaattggcaaagctaacgtgaaataagacctgactccaaaatctaaaatgtccttgaagaacacttcaaggtctagcgccttgccaggcaccgttctccttgaatctcacagcagccctgtgagtaggcactactgttaccaccgtcactttgcagacagggaacccgagggacaaagaagttaagggatttcctcaaagccacagctaggaagagcggcagaactgcgattccaatccatcagtgtgcctccactatccctattccttaagatcgtgccaaaggctgagtcacttgcactaagtagcctagaacagtctctggggaaacgcgcccgccgacaaggatcgccagaaccggcgcgggcaccgcgcggcgaccaggagctctggtcaccgaaggccaggctggaggccagagcagccgcccgcacccggtcaccgcctcgacagtggagacctcagctgaccgcgagcccccggcccgcccgcaccccttctcatgcccccaggaacccgccaagccgctccagcctcacctcctcctccctccatcgcgagatttccaacagcgttttt

SEQ ID NO: 5390 - protein, 45 aa, Homo sapiens
MSLKNTSRSSALPGTVLLESHSSPVSRHYCYHRHFADREPEGQRS

SEQ ID NO: 5391 - DNA, 2223 bp, Homo sapiens
aataaagaaatagtgctttaagtcaatgaattcctccttgggacccactatcgagaaactatcagtggtaacgttttaaaaaatgacaaattcaatctgctcttgacttgtgtgtcctaagatttccactaagtgtcttcaaacctccccctccccggcttcctggataatagaagttcccgaaggccgccgattccagaagatactgtctggcgtgaaattagtctcagtagaaacataagtcccgcgcgtcttgtgctgcgcgtgcgcaagcttttgggccctcccgagaaagggaagtgcattctcgcttccgtagcggtctccgccggttggggggaagtaattccggttgttgcaccatggcgtccatggggaccctcgccttcgatgaatatgggcgccctttcctcatcatcaaggatcaggaccgcaagtcccgtcttatgggacttgaggccctcaagtctcatataatggcagcaaaggctgtagcaaatacaatgagaacatcacttggaccaaatgggcttgataagatgatggtggataaggatggagatgtgactgtaactaatgatggggccaccatcttaagcatgatggatgttgatcatcagattgccaagctgatggtggaactgtccaagtctcaggatgatgaaattggagatggaaccacaggagtggttgtcctggctggtgccttgttagaagaagcggagcaattgctagaccgaggcattcacccaatcagaatagccgatggctatgagcaggctgctcgtgttgctattgaacacctggacaagatcagcgatagcgtccttgttgacataaaggacaccgaacccctgattcagacagcaaaaaccacgctgggctccaaagtggtcaacagttgtcaccgacagatggctgagattgctgtgaatgccgtcctcactgtagcagatatggagcggagagacgttgactttgagcttatcaaagtagaaggcaaagtgggcggcaggctggaggacactaaactgattaagggcgtgattgtggacaaggatttcagtcacccacagatgccaaaaaaagtggaagatgcgaagattgcaattctcacatgtccatttgaaccacccaaaccaaaaacaaagcataagctggatgtgacctctgtcgaagattataaagcccttcagaaatacgaaaaggagaaatttgaagagatgattcaacaaattaaagagactggtgctaacctagcaatttgtcagtggggctttgatgatgaagcaaatcacttacttcttcagaacaacttgcctgcggttcgctgggtaggaggacctgaaattgagctgattgccatcgcaacaggagggcggatcgtccccaggttctcagagctcacagccgagaagctgggctttgctggtcttgtacaggagatctcatttgggacaactaaggataaaatgctggtcatcgagcagtgtaagaactccagagctgtaaccatttttattagaggaggaaataagatgatcattgaggaggcgaaacgatcccttcacgatgctttgtgtgtcatccggaacctcatccgcgataatcgtgtggtgtatggaggaggggctgctgagatatcctgtgccctggcagttagccaagaggcggataagtgccccaccttagaacagtatgccatgagagcgtttgccgacgcactggaggtcatccccatggccctctctgaaaacagtggcatgaatcccatccagactatgaccgaagtccgagccagacaggtgaaggagatgaaccctgctcttggcatcgactgtttgcacaaggggacaaatgatatgaagcaacagcatgtcatagaaaccttgattggcaaaaagcaacagatatctcttgcaacacaaatggttagaatgattttgaagattgatgacattcgtaagcctggagaatctgaagaatgaagacattgagaaaactatgtagcaagatccacttctgtgattaagtaaatggatgtctcgtgatgcatctacagttatttattgttacatccttttccagacactgtagatgctataataaaaatagctgtttggtaaccatagtttcacttgttcaaagctgtgtaatcgtgggggtaccatctcaactgcttttgtattcattgtattaaaagaatctgtttaaacaaccttt

SEQ ID NO: 5392 - protein, 541 aa, Homo sapiens; identical to SEQ ID NO: 619

SEQ ID NO: 5393 - DNA, 2283 bp, Homo sapiens
aataaagaaatagtgctttaagtcaatgaattcctccttgggacccactatcgagaaactatcagtggtaacgttttaaaaaatgacaaattcaatctgctcttgacttgtgtgtcctaagatttccactaagtgtcttcaaacctccccctccccggcttcctggataatagaagttcccgaaggccgccgattccagaagatactgtctggcgtgaaattagtctcagtagaaacataagtcccgcgcgtcttgtgctgcgcgtgcgcaagcttttgggccctcccgagaaagggaagtgcattctcgcttccgtagcggtctccgccggttggggggaagtaattccggttgttgcaccatggcgtccatggggaccctcgccttcgatgaatatgggcgccctttcctcatcatcaaggatcaggaccgcaagtcccgtcttatgggacttgaggccctcaagtctcatataatggcagcaaaggctgtagcaaatacaatgagaacatcacttggaccaaatgggcttgataagatgatggtggataaggatggagatgtgactgtaactaatgatggggccaccatcttaagcatgatggatgttgatcatcagattgccaagctgatggtggaactgtccaagtctcaggatgatgaaattggagatggaaccacaggagtggttgtcctggctggtgccttgttagaagaagcggagcaattgctagaccgaggcattcacccaatcagaatagccgatggctatgagcaggctgctcgtgttgctattgaacacctggacaagatcagcgatagcgtccttgttgacataaaggacaccgaacccctgattcagacagcaaaaaccacgctgggctccaaagtggtcaacagttgtcaccgacagatggctgagattgctgtgaatgccgtcctcactgtagcagatatggagcggagagacgttgactttgagcttatcaaagtagaaggcaaagtgggcggcaggctggaggacactaaactgattaagggcgtgattgtggacaaggatttcagtcacccacagatgccaaaaaaagtggaagatgcgaagattgcaattctcacatgtccatttgaaccacccaaaccaaaaacaaagcataagctggatgtgacctctgtcgaagattataaagcccttcagaaatacgaaaaggagaaatttgaagagatgattcaacaaattaaagagactggtgctaacctagcaatttgtcagtggggctttgatgatgaagcaaatcacttacttcttcagaacaacttgcctgcggttcgctgggtaggaggacctgaaattgagctgattgccatcgcaacaggagggcggatcgtccccaggttctcagagctcacagccgagaagctgggctttgctggtcttgtacaggagatctcatttgggacaactaaggataaaatgctggtcatcgagcagtgtaagaactccagagctgtaaccatttttattagaggaggaaataagatgatcattgaggaggcgaaacgatcccttcacgatgctttgtgtgtcatccggaacctcatccgcgataatcgtgtggtgtatggaggaggggctgctgagatatcctgtgccctggcagttagccaagaggcggataagtgccccaccttagaacagtatgccatgagagcgtttgccgacgcactggaggtcatccccatggccctctctgaaaacagtggcatgaatcccatccagactatgaccgaagtccgagccagacaggtgaaggagatgaaccctgctcttggcatcgactgtttgcacaaggggacaaatgatatgaagcaacagcatgtcatagaaaccttgattggcaaaaagcaacagatatctcttgcaacacaaatggttagaatgattttgaagattgatgacattcgtaagcctggagaatctgaagaatgaagacattgagaaaactatgtagcaagatccacttctgtgattaagtaaatggatgtctcgtgatgcatctacagttatttattgttacatccttttccagacactgtagatgctataataaaaatagctgtttggtaaccatagtttcacttgttcaaagctgtgtaatcgtgggggtaccatctcaactgcttttgtattcattgtattaaaagaatctgtttaaacaacctttatcttctcttcgggtttaagaaacgtttattgtaacagtaattaaatgctgccttaattg

SEQ ID NO: 5394 - protein, 541 aa, Homo sapiens; identical to SEQ ID NO: 619

SEQ ID NO: 5395 - DNA, 3616 bp, Homo sapiens
aataaagaaatagtgctttaagtcaatgaattcctccttgggacccactatcgagaaactatcagtggtaacgttttaaaaaatgacaaattcaatctgctcttgacttgtgtgtcctaagatttccactaagtgtcttcaaacctccccctccccggcttcctggataatagaagttcccgaaggccgccgattccagaagatactgtctggcgtgaaattagtctcagtagaaacataagtcccgcgcgtcttgtgctgcgcgtgcgcaagcttttgggccctcccgagaaagggaagtgcattctcgcttccgtagcggtctccgccggttggggggaagtaattccggttgttgcaccatggcgtccatggggaccctcgccttcgatgaatatgggcgccctttcctcatcatcaaggatcaggaccgcaagtcccgtcttatgggacttgaggccctcaagtctcatataatggcagcaaaggctgtagcaaatacaatgagaacatcacttggaccaaatgggcttgataagatgatggtggataaggatggagatgtgactgtaactaatgatggggccaccatcttaagcatgatggatgttgatcatcagattgccaagctgatggtggaactgtccaagtctcaggatgatgaaattggagatggaaccacaggagtggttgtcctggctggtgccttgttagaagaagcggagcaattgctagaccgaggcattcacccaatcagaatagccgatggctatgagcaggctgctcgtgttgctattgaacacctggacaagatcagcgatagcgtccttgttgacataaaggacaccgaacccctgattcagacagcaaaaaccacgctgggctccaaagtggtcaacagttgtcaccgacagatggctgagattgctgtgaatgccgtcctcactgtagcagatatggagcggagagacgttgactttgagcttatcaaagtagaaggcaaagtgggcggcaggctggaggacactaaactgattaagggcgtgattgtggacaaggatttcagtcacccacagatgccaaaaaaagtggaagatgcgaagattgcaattctcacatgtccatttgaaccacccaaaccaaaaacaaagcataagctggatgtgacctctgtcgaagattataaagcccttcagaaatacgaaaaggagaaatttgaagagatgattcaacaaattaaagagactggtgctaacctagcaatttgtcagtggggctttgatgatgaagcaaatcacttacttcttcagaacaacttgcctgcggttcgctgggtaggaggacctgaaattgagctgattgccatcgcaacaggagggcggatcgtccccaggttctcagagctcacagccgagaagctgggctttgctggtcttgtacaggagatctcatttgggacaactaaggataaaatgctggtcatcgagcagtgtaagaactccagagctgtaaccatttttattagaggaggaaataagatgatcattgaggaggcgaaacgatcccttcacgatgctttgtgtgtcatccggaacctcatccgcgataatcgtgtggtgtatggaggaggggctgctgagatatcctgtgccctggcagttagccaagaggcggataagtgccccaccttagaacagtatgccatgagagcgtttgccgacgcactggaggtcatccccatggccctctctgaaaacagtggcatgaatcccatccagactatgaccgaagtccgagccagacaggtgaaggagatgaaccctgctcttggcatcgactgtttgcacaaggggacaaatgatatgaagcaacagcatgtcatagaaaccttgattggcaaaaagcaacagatatctcttgcaacacaaatggttagaatgattttgaagattgatgacattcgtaagcctggagaatctgaagaatgaagacattgagaaaactatgtagcaagatccacttctgtgattaagtaaatggatgtctcgtgatgcatctacagttatttattgttacatccttttccagacactgtagatgctataataaaaatagctgtttggtaaccatagtttcacttgttcaaagctgtgtaatcgtgggggtaccatctcaactgcttttgtattcattgtattaaaagaatctgtttaaacaacctttatcttctcttcgggtttaagaaacgtttattgtaacagtaattaaatgctgccttaattgaaggggtttgggtggatttttttttctcaaaataagctgtagggactattttaacagcttaaacaggagctctcaagatgcactttcatattgagaggaatatgggcttgatcctcttcctatctaaatgggtgggccatttgattgtagagggtccaccacagaattatgggatgccttaagtgctgttactaggttgctcacagcctaacctggcgtgttgtttagggctgatggagacccatgtgagcctttgctttcctctggccccggccccaccctgaacacagctcatacacagaatcaggaccagcatgtgcagagctggccaccagcacaggcttagggcagttcagaacccacttgtttccctatcagagggacacagtgaagtggaggttaaagtaaattacaggaaataagggagaaatcttgcagttaccatgttcagatagagtgactgaaattaattgtacttactaaagtattaactagctaacagtgatgggccaagacgctccgagaactctaccgggattgtctgttctgacaacccagtgaggcagatacactttcttactgctcacatcttacaggtgagtactcataattggccagcatctcaccaccagcaagtagtagggccaggtcaatcccaggcagtctgaccccagagtggcccagctcatcccctactctgttatttgcttgttaatgattctctagattttctaaaataatgtttcttagcattgtgatgataaagctcatgatgaactttatcactagttatgccaccttaactagtcagatttcctagaattaggaaatggtgactcttgtctaaatttggttaagtgatgaatttgggttaccgtctcatgtgaacctggagattcaccagtcttaacttttgggtcattgtgttttctctacattcatgcattggatgttttgctaaataactcctgtggatttaggaatgtgtgctaatagcaatcttcctaattttcatgtttatatggaactatgcagttgagtattgaaagctttaaactgagtttatttacaaggactgagtctagcctacagagaacatacagcagccttctttggaccacagtcttatccgaggggtctgtggttgtatcagaagagccactaaaccaatccccctttccaaaattgaacctcacagacgttcctgttttttgtgattgagaaactggtcaatgaacaggaagacttagagatgtttcacaagcctttgatttttgtttcatttatttgtaataaacctcttccacgtgatgtcttttatttttcacgttcc

SEQ ID NO: 5396 - protein, 541 aa, Homo sapiens; identical to SEQ ID NO: 619

SEQ ID NO: 5397 - DNA, 1079 bp, Homo sapiens
aaatacttaaacacagtttaaatattcaagtcctggattttagaatgtttgatacagttacattaggggttggttaaactgctagccctagcaacataagactcattttaattacaatatggtattattaccaaggatgacttacatctgtcccttaggtagaaaaagggaacccaagtgaataaccattgacgatctctgttctttgagaatgagtttttagcacattgtgataaatctttgcgagttttgtcagtttttgactcttgcttgaccgtgtatcctagaatgagtcactggccgcctctgcctcttgaattttgttaactacattgcaggaaggaaagctagaaagataaatattatccgatagtggaggccatctaaatattagagcacagcctctctgtctttaaaaaggtgccagatacttggctctaaattgactagatcttgatcacattaattcaggcaaagctgttttccttagatcattgaggaggcgaaacgatcccttcacgatgctttgtgtgtcatccggaacctcatccgcgataatcgtgtggtgtatggaggaggggctgctgagatatcctgtgccctggcagttagccaagaggcggataagtgccccaccttagaacagtatgccatgagagcgtttgccgacgcactggaggtcatccccatggccctctctgaaaacagtggcatgaatcccatccagactatgaccgaagtccgagccagacaggtgaaggagatgaaccctgctcttggcatcgactgtttgcacaaggggacaaatgatatgaagcaacagcatgtcatagaaaccttgattggcaaaaagcaacagatatctcttgcaacacaaatggttagaatgattttgaagattgatgacattcgtaagcctggagaatctgaagaatgaagacattgagaaaactatgtagcaagatccacttctgtgattaagtaaatggatgtctcgtgatgcatctacagttatttattgttacatccttttccagacactgtagatgctataataaaaatagctgtttggtaaccat

SEQ ID NO: 5398 - protein, 94 aa, Homo sapiens [sequence omitted]

SEQ ID NO: 5399 - DNA, 484 bp, Homo sapiens
aagtgcactcaccatacttctgtacctttccagtgccccaccttagaacagtatgccatgagagcgtttgccgacgcactggaggtcatccccatggccctctctgaaaacagtggcatgaatcccatccagactatgaccgaagtccgagccagacaggtgaaggagatgaaccctgctcttggcatcgactgtttgcacaaggggacaaatgatatgaagcaacagcatgtcatagaaaccttgattggcaaaaagcaacagatatctcttgcaacacaaatggttagaatgattttgaagattgatgacattcgtaagcctggagaatctgaagaatgaagacattgagaaaactatgtagcaagatccacttctgtgattaagtaaatggatgtctcgtgatgcatctacagttatttattgttacatccttttccagacactgtagatgctataataaaaatagctgtttggtaaccat

SEQ ID NO: 5400 - protein, 94 aa, Homo sapiens [sequence omitted]

SEQ ID NO: 5401 - DNA, 574 bp, Homo sapiens
aagtgcactcaccatacttctgtacctttccagtgccccaccttagaacagtatgccatgagagcgtttgccgacgcactggaggtcatccccatggccctctctgaaaacagtggcatgaatcccatccagactatgaccgaagtccgagccagacaggtgaaggagatgaaccctgctcttggcatcgactgtttgcacaaggggacaaatgatatgaagcaacagcatgtcatagaaaccttgattggcaaaaagcaacagatatctcttgcaacacaaatggttagaatgattttgaagattgatgacattcgtaagcctggagaatctgaagaatgaagacattgagaaaactatgtagcaagatccacttctgtgattaagtaaatggatgtctcgtgatgcatctacagttatttattgttacatccttttccagacactgtagatgctataataaaaatagctgtttggtaaccatagtttcacttgttcaaagctgtgtaatcgtgggggtaccatctcaactgcttttgtattcattgtattaaaagaatctgtttaaacaacc

SEQ ID NO: 5402 - protein, 94 aa, Homo sapiens [sequence omitted]

SEQ ID NO: 5403 - DNA, 637 bp, Homo sapiens
aagtgcactcaccatacttctgtacctttccagtgccccaccttagaacagtatgccatgagagcgtttgccgacgcactggaggtcatccccatggccctctctgaaaacagtggcatgaatcccatccagactatgaccgaagtccgagccagacaggtgaaggagatgaaccctgctcttggcatcgactgtttgcacaaggggacaaatgatatgaagcaacagcatgtcatagaaaccttgattggcaaaaagcaacagatatctcttgcaacacaaatggttagaatgattttgaagattgatgacattcgtaagcctggagaatctgaagaatgaagacattgagaaaactatgtagcaagatccacttctgtgattaagtaaatggatgtctcgtgatgcatctacagttatttattgttacatccttttccagacactgtagatgctataataaaaatagctgtttggtaaccatagtttcacttgttcaaagctgtgtaatcgtgggggtaccatctcaactgcttttgtattcattgtattaaaagaatctgtttaaacaacctttatcttctcttcgggtttaagaaacgtttattgtaacagtaattaaatgctgccttaattg

SEQ ID NO: 5404 - protein, 94 aa, Homo sapiens [sequence omitted]

SEQ ID NO: 5405 - DNA, 1970 bp, Homo sapiens
aagtgcactcaccatacttctgtacctttccagtgccccaccttagaacagtatgccatgagagcgtttgccgacgcactggaggtcatccccatggccctctctgaaaacagtggcatgaatcccatccagactatgaccgaagtccgagccagacaggtgaaggagatgaaccctgctcttggcatcgactgtttgcacaaggggacaaatgatatgaagcaacagcatgtcatagaaaccttgattggcaaaaagcaacagatatctcttgcaacacaaatggttagaatgattttgaagattgatgacattcgtaagcctggagaatctgaagaatgaagacattgagaaaactatgtagcaagatccacttctgtgattaagtaaatggatgtctcgtgatgcatctacagttatttattgttacatccttttccagacactgtagatgctataataaaaatagctgtttggtaaccatagtttcacttgttcaaagctgtgtaatcgtgggggtaccatctcaactgcttttgtattcattgtattaaaagaatctgtttaaacaacctttatcttctcttcgggtttaagaaacgtttattgtaacagtaattaaatgctgccttaattgaaggggtttgggtggatttttttttctcaaaataagctgtagggactattttaacagcttaaacaggagctctcaagatgcactttcatattgagaggaatatgggcttgatcctcttcctatctaaatgggtgggccatttgattgtagagggtccaccacagaattatgggatgccttaagtgctgttactaggttgctcacagcctaacctggcgtgttgtttagggctgatggagacccatgtgagcctttgctttcctctggccccggccccaccctgaacacagctcatacacagaatcaggaccagcatgtgcagagctggccaccagcacaggcttagggcagttcagaacccacttgtttccctatcagagggacacagtgaagtggaggttaaagtaaattacaggaaataagggagaaatcttgcagttaccatgttcagatagagtgactgaaattaattgtacttactaaagtattaactagctaacagtgatgggccaagacgctccgagaactctaccgggattgtctgttctgacaacccagtgaggcagatacactttcttactgctcacatcttacaggtgagtactcataattggccagcatctcaccaccagcaagtagtagggccaggtcaatcccaggcagtctgaccccagagtggcccagctcatcccctactctgttatttgcttgttaatgattctctagattttctaaaataatgtttcttagcattgtgatgataaagctcatgatgaactttatcactagttatgccaccttaactagtcagatttcctagaattaggaaatggtgactcttgtctaaatttggttaagtgatgaatttgggttaccgtctcatgtgaacctggagattcaccagtcttaacttttgggtcattgtgttttctctacattcatgcattggatgttttgctaaataactcctgtggatttaggaatgtgtgctaatagcaatcttcctaattttcatgtttatatggaactatgcagttgagtattgaaagctttaaactgagtttatttacaaggactgagtctagcctacagagaacatacagcagccttctttggaccacagtcttatccgaggggtctgtggttgtatcagaagagccactaaaccaatccccctttccaaaattgaacctcacagacgttcctgttttttgtgattgagaaactggtcaatgaacaggaagacttagagatgtttcacaagcctttgatttttgtttcatttatttgtaataaacctcttccacgtgatgtcttttatttttcacgttcc

SEQ ID NO: 5406 - protein, 94 aa, Homo sapiens [sequence omitted]

SEQ ID NO: 5407 - DNA, 511 bp, Homo sapiens
catttggatgctaacttttcatcagaagtacttgatttggccaggctggtctcaagtggacctcaagtgatccgcccacctcggcctccccaagtgctgggattacaggcatgagccaccgcgcccagcccaggagaagtattttacactgcttcagttttttaatttaagtgaattaaaatgaaatgaaaagttgacctccccaggagtgctaaccctgtagcagggtagtcactggccacacctgcaagtctatactggcgaggaagattcgcatccccaactgcatcctgttgactttccattaatcctgtttgtccgccttatggcagccctgcagctggttgtgaaagaaaatagacgctcaggacccgaaagtcactatgccagagggaaagttcagcttgggaactgcgcaatactgccttcctttccttcccaaacagacagctgcaatgtcacaaccctgtgttagagcctcgtccgtaagccaggatcccacaaccatgga

SEQ ID NO: 5408 - protein, 49 aa, Homo sapiens
MAALQLVVKENRRSGPESHYARGKVQLGNCAILPSFPSQTDSCNVTTLC

SEQ ID NO: 5409 - DNA, 1128 bp, Homo sapiens
gtatctttgctgactcagaagttgaaagaacactgcaaagttgaatatcaaattaaaacattttctgggcagactcatgggttcgtgcatcggaagagagaagattgctcacctgcagacaagccctacattgacgaggccagaaggaatttaattgagtggctgaacaagtacatgtagcaagaatcaagggcaagccttcctagaatagctttcatcccaaaatttgcttggaaatagttagatcatttgatttaattttcacttttataaaataagtgtaggaatcctaaaattgattatttcatttgaaacacaaattcagtaggacgtaatgcatgaaataatttaatttttgacatgtacatcgaatcataatttaaaaacaaggtctgaccaggtgtagtgcctcatgcctgtaattccagcactttgggaggccaaagtgggtggatcacctgaggtcaggagtttgagaccagcctggccaacatggtgagaccccatctctacaaaaaatacaaaaattagcctggtgtggtggtgcacgcctgtagtcccagctacttgggaggctgaggcacaagaatcaatagaacccaggaggtggagactgcagtgagccaagattgtgccactactgtactctagcctgggcagcagagtgaaaccccatctctactaaaaatataaaaatcagccgggcatggtggcatgtgcctgtaatcccagctactcaggagtctgaggaggagaatcacttgaacctggaggcagaggttgcagtgagtcgaggttgcgctactgcactccagcctggacaacagagggagactctgtctcaaaaaaaaaaaaaaacctacagctgttcaaggaccagctgacaggtcaagtgtggccttttctggtctttgaacacatcatagaaagtgacaaatgctgcaaagccatgaagaacatgaactataaacgggtagactaactgcccagcttagacacttatctatgccacaaaacagctgaatttgtcacatttatatattgcaatatgggaagtattgagatcaaaacaggattccattgacctaattatattaagctaataaactaattttttgaatttttgaa

SEQ ID NO: 5410 - protein, 71 aa, Homo sapiens
NPISTKNIKISRAWWHVPVIPATQESEEENHLNLEAEVAVSRGCATALQPGQQRETLSQKKKKTYSCSRTS

SEQ ID NO: 5411 - DNA, 2332 bp, Homo sapiens
ctctccctgcacctttctttatcttggagcctctcccatctctccctccctcttcctccctaccccaccctccgaccaccccacttcttcccctcccctcacacttccctccctcccttctctcgtctcctccccactgcgcctccctccctcctggccttccttcccttccccgactttgcagatttctcttcccccaggcctccctcctccacctctccgccccctccgggcttggctctcccaggaggctacgactggagccactggtcccgcaggatccccgcgtcctcggtcgccgcgtccacgtccctctcgcgtccccgcccggcgccacgccgcctcctctgggttcggcctccgcgcggtgcagcgcagtctcaggccgcgggacaagcccgacttaaatctctgcaatggctaacgaagcttatccttgtccgtgtgacattggccacagacttgagtatggagggctaggccgtgaagttcaagtcgagcacatcaaggcttatgtcaccaaatcccccgttgatgcaggcaaagctgtgattgtcattcaagatatatttggctggcagttgcccaataccagatatatagctgacatgatctcaggaaatggatacacaaccattgttccagacttctttgtagggcaagagccttgggacccctctggcgactggtctatcttccctgagtggctgaaaacaagaaatgcccagaagatcgatagagagatcagtgctatcttgaagtatctgaaacaacagtgtcatgcccagaaaattggcatcgtgggattctgctggggtggaactgctgtccatcatttgatgatgaaatactcagaattcagggcaggggtgtccgtctatggcattgtcaaggattctgaagacatttacaatttaaagaaccccactttgttcatttttgctgaaaatgatgttgtgattccactcaaggacgtatctttgctgactcagaagttgaaagaacactgcaaagttgaatatcaaattaaaacattttctgggcagactcatgggttcgtgcatcggaagagagaagattgctcacctgcagacaagccctacattgacgaggccagaaggaatttaattgagtggctgaacaagtacatgtagcaagaatcaagggcaagccttcctagaatagctttcatcccaaaatttgcttggaaatagttagatcatttgatttaattttcacttttataaaataagtgtaggaatcctaaaattgattatttcatttgaaacacaaattcagtaggacgtaatgcatgaaataatttaatttttgacatgtacatcgaatcataatttaaaaacaaggtctgaccaggtgtagtgcctcatgcctgtaattccagcactttgggaggccaaagtgggtggatcacctgaggtcaggagtttgagaccagcctggccaacatggtgagaccccatctctacaaaaaatacaaaaattagcctggtgtggtggtgcacgcctgtagtcccagctacttgggaggctgaggcacaagaatcaatagaacccaggaggtggagactgcagtgagccaagattgtgccactactgtactctagcctgggcagcagagtgagaccctgtctcaaaaataaataagtaaataaataaataaataaaataaaaaccaggtcagtacctggagaatttgaatgatagagaatgatagagtaataccctaattattagttaaaacctacaggccgggtgcggtggctcacgcctgtaatcccagcactttgggaggccgaggtgggtggatcacttgaggtcaggagttcaagaccagcctggccaacatggtgaaaccccatctctactaaaaatataaaaatcagccgggcatggtggcatgtgcctgtaatcccagctactcaggagtctgaggaggagaatcacttgaacctggaggcagaggttgcagtgagtcgaggttgcgctactgcactccagcctggacaacagagggagactctgtctcaaaaaaaaaaaaaaacctacagctgttcaaggaccagctgacaggtcaagtgtggccttttctggtctttgaacacatcatagaaagtgacaaatgctgcaaagccatgaagaacatgaactataaacgggtagactaactgcccagcttagacacttatctatgccacaaaacagctgaatttgtcacatttatatattgcaatatgggaagtattgagatcaaaacaggattccattgacctaattatattaagctaataaactaattttttgaatttttgaa

SEQ ID NO: 5412 - protein, 245 aa, Homo sapiens; identical to SEQ ID NO: 621

SEQ ID NO: 5413 - DNA, 1265 bp, Homo sapiens
ctctccctgcacctttctttatcttggagcctctcccatctctccctccctcttcctccctaccccaccctccgaccaccccacttcttcccctcccctcacacttccctccctcccttctctcgtctcctccccactgcgcctccctccctcctggccttccttcccttccccgactttgcagatttctcttcccccaggcctccctcctccacctctccgccccctccgggcttggctctcccaggaggctacgactggagccactggtcccgcaggatccccgcgtcctcggtcgccgcgtccacgtccctctcgcgtccccgcccggcgccacgccgcctcctctgggttcggcctccgcgcggtgcagcgcagtctcaggccgcgggacaagcccgacttaaatctctgcaatggctaacgaagcttatccttgtccgtgtgacattggccacagacttgagtatggagggctaggccgtgaagttcaagtcgagcacatcaaggcttatgtcaccaaatcccccgttgatgcaggcaaagctgtgattgtcattcaagatatatttggctggcagttgcccaataccagatatatagctgacatgatctcaggaaatggatacacaaccattgttccagacttctttgtagggcaagagccttgggacccctctggcgactggtctatcttccctgagtggctgaaaacaagaaatgcccagaagatcgatagagagatcagtgctatcttgaagtatctgaaacaacagtgtcatgcccagaaaattggcatcgtgggattctgctggggtggaactgctgtccatcatttgatgatgaaatactcagaattcagggcaggggtgtccgtctatggcattgtcaaggattctgaagacatttacaatttaaagaaccccactttgttcatttttgctgaaaatgatgttgtgattccactcaaggacgtatctttgctgactcagaagttgaaagaacactgcaaagttgaatatcaaattaaaacattttctgggcagactcatgggttcgtgcatcggaagagagaagattgctcacctgcagacaagccctacattgacgaggccagaaggaatttaattgagtggctgaacaagtacatgtagcaagaatcaagggcaagccttcctagaatagctttcatcccaaaatttgcttggaaatagttagatcatttgatttaattttcacttttataaaataagtgtaggaatcct

SEQ ID NO: 5414 - protein, 245 aa, Homo sapiens; identical to SEQ ID NO: 621

SEQ ID NO: 5415 - DNA, 1070 bp, Homo sapiens
ggaaaacaccaagtccctggacaaggggaagacaccaaatccctggactcaggcctcacatgattgagtgagaggaactctgctgtcagaccctacaatgcactcttcagtggaagaggatcacacattccaaacatactccatcaggtcatatgttaaatgacagggctgagacctctccacagcacatctgatactgggatcgatgaagatcagatgtgcaaatcacactgggctccggaaagccctagactgtgtcattcaagatgtgtgacatggataaaaagctccccatagtggaaagaggtgccataaaacactagacaatgagagcaagatgggggacccaaaatggtgccctggcatcggcaagtggtgaaaccagccatctggccctgtgccctgtcctcagaagtgcccctgccgccccagcaggtacatttgcaggtgaagaatttctttcgctttagtgtcctgggaaccaagtattttctgttggtggtgtttctcttgcaccagatgaatttttgcctcgcttacctgagacttagactgtcccaattccagtctccactgatgcaaactaggttggttcacaacaggctgccataaaatttctcatttttttctgtttgaaatgtgtaacttttgatttacttcctaagtaagacttcctgagttgggagctctaaaaactttcattaaaaaacagtggatttgtcaaacttttgagcaaagtattggtggcacttctaaatctttgaatttaatttcttcttttaggggactcttagaaagggaaaatatgatcttactacattgaccatgcaaattctgaggttcatattgaatctaaagtcattggaaatataaatctcaataaaatccctaatactaaatactcatatatatgtatatattgcccatagacatgtagtatgtattcatgtatcatatatgtataggtatatatatgttcatatgtcatatattaaatatgtatgaatttataagataaaggtggaaattattgacatgttataactaaataaagaaaatctttaacaacc

SEQ ID NO: 5416 - protein, 45 aa, Homo sapiens
MTGLRPLHSTSDTGIDEDQMCKSHWAPESPRLCHSRCVTWIKSSP

SEQ ID NO: 5417 - DNA, 806 bp, Homo sapiens
gccattcgattcctaacacagggagtggagttggagtgagagaacatgaagccagctctacaatttttgcattgtataatgttttccacgaacttggcagaagcccacaaaggaaagacagttggtgcttaggagctagccttgattttctgcttgggacgggattccagttttgaatgtttcccaagatgtgtttcacgggagagtttattttgtctacagtatccccaaggaagcttgtggttaatgatgtgctcctgcaggcgcctggcagccaaggggaccagaagaacagaagaggcgccctgattggctcctgggattacagctttattaatgcgctctgacagcctgtctgtcactagcgccaagcggagaacattaacttgaacctgacagctccaccccccagagaaaatgagggcctaatgtgttataaatcaagctggcttttgaaatcaatattcctaaaaaaatactactggaagaaaacacattcctattactcagagtgttgacatatttattaaagtagcataaaggccactgagttagtcactaaaaaatagaaatgaaaatgtgactatcaattgaaacttagacgtttctacctttatgtttctcttttttttttttttctgtatcaggttcacacattgcaaagtaaatgggagctatttagcaaatggccagttcctttcatcaatggagtatgaaattctggtagctcaaggctcaaggctcaaggttttgaataggcaccatttttggctgactactttgcctaaatcatgcagtgctcaata

SEQ ID NO: 5418 - protein, 62 aa, Homo sapiens
MFLFFFFFCIRFTHCKVNGSYLANGQFLSSMEYEILVAQGSRLKVLNRHHFWLTTLPKSCSA

SEQ ID NO: 5419 - DNA, 4567 bp, Homo sapiens
tcactcgctccggggacccgcaacaagtggccgccgcgccctccccggggaagccgcgggcgcgcaggggcagccgaaggaggcggtcgagccgcggagcccaggggcctgcccggctcagcgcccaccggaggggatcggggcgggcggatggggacccggcggcggcggcgcggtgagcctctgggcggccccggggcgcgggctgtgcgcggcgctgcgcccgccggcccccagcgcggattgtaagtgctgcagctgtgcccggccccgcctggagccaccgggggtgccaggaggggacgcagcaccccctcccactggagtgcggggacctctccaggccggaggtcggccccggagcttgggggggatgtgcagctaacggtcccgtcgggcgggctttcctcgggccgagcgcgcaggacgtgcgccgcagctatggagtgtcccgggagacggcgggcatgacggctacaggatgggcgcgaacaatggcaaacagtacggcagtgagggcaaaggcagctcgagcatctcatctgacgtgagttcaagtacagatcacacgcccactaaagcccagaagaatgtggctaccagcgaagactccgacctgagcatgcgcacactgagcacgcccagcccagccctgatatgtccaccgaatctcccaggatttcagaatggaaggggctcgtccacctcctcgtcctccatcaccggggagacggtggccatggtgcactccccgcccccgacccgcctcacacacccgctcatccggctcgcctccagaccccagaaggagcaggccagcatagaccggctcccggaccactccatggtgcagatcttctccttcctgcccaccaaccagctgtgccgctgcgcgcgagtgtgccgccgctggtacaacctggcctgggacccgcggctctggaggactatccgcctgacgggcgagaccatcaacgtggaccgcgccctcaaggtgctgacccgcagactctgccaggacacccccaacgtgtgtctcatgctggaaaccgtaactgtcagtggctgcaggcggctcacagaccgagggctgtacaccatcgcccagtgctgccccgaactgaggcgactggaagtctcaggctgttacaatatctccaacgaggccgtctttgatgtggtgtccctctgccctaatctggagcacctggatgtgtcaggatgctccaaagtgacctgcatcagcttgacccgggaggcctccattaaactgtcacccttgcatggcaaacagatttccatccgctacctggacatgacggactgcttcgtgctggaggacgaaggcctgcacaccatcgcggcgcactgcacgcagctcacccacctctacctgcgccgctgcgtccgcctgaccgacgaaggcctgcgctacctggtgatctactgcgcctccatcaaggagctgagcgtcagcgactgccgcttcgtcagcgacttcggcctgcgggagatcgccaagctggagtcccgcctgcggtacctgagcatcgcgcactgcggccgggtcaccgacgtgggcatccgctacgtggccaagtactgcagcaagctgcgctacctcaacgcgaggggctgcgagggcatcacggaccacggtgtggagtacctcgccaagaactgcaccaaactcaaatccctggatatcggcaaatgccctttggtatccgacacgggcctggagtgcctggccctgaactgcttcaacctcaagcggctcagcctcaagtcctgcgagagcatcaccggccagggcttgcagatcgtggccgccaactgctttgacctccagacgctgaatgtccaggactgcgaggtctccgtggaggccctgcgctttgtcaaacgccactgcaagcgctgcgtcatcgagcacaccaacccggctttcttctgaagggacagagttcatccggcgttgtattcacacaaacctgaacaaagcaaatttttttaaaagcagcgtatgtaagcaccgacacccactcaaaacagctctttcttccgggaaggttattaggaatctggcctttatttttcctcatttctcatgggcaacagaggccaaagaaacgaagcaagacaaacagcaaacaggcattttggtcaggtcatttgtaggcagtttctcttctcacaaaagatgtacttaagcaggctgatcgctgttccttgagcaaggcgcttactctcctccgctcaggcccccaaggccgccctttccctcgcacacaggccccacccccacagttccacgccccccccccaaggccacaccctccctccctagagcagcagcgaggatccatcatcagaatcacagtgctctccagacctcctctctaaactgcttcattgacctaagtcactctcttcaatcccacacccatggacattcttgtcaactcaataccatagcactttgcataggcaaaatacttttcaggcctttttaaaaaattcattacagcaaacagctggggaaggacatgcagtcctcccccagctctgtcaatgactatgaccttggccaaagcacttcactgctctgggctgcagcttccagcactgaatcagaggccacacagcccaaagattagcttcatgtccattatagcattgagggagcagagatacccatacacagaagcaccttggcatagagcacccaggcatcgacctcttccaggagaactgattctgtggatggatgtgatttcaggagattgtgcagtgccagcatcagtgcataaagggtcctgtatgtcctttggctgcaaatcacccacttccctgtgtttcagtgggagaatttcctctcccacctcctcacatcctcttttgccaggctggatgctgtcgtctctgtacacaaatactttctgcattcccccctccacaccatcctagcgaggcaccagcacacctaatcacagcaaagcccagatccccccatcagttgcttttactcagtgttttcaaataggagtaaaggcccttgcaatttttaattaacaagcaaggcccaagggaacacatgtcctcaaaagtttttctgatccctcgccttgcacacctggcatgcatcaggcacatctgtcctacagctggcagagacagatgcctcggttctttgtcattcagattgcatttgacctcttctcatctatttatttctttatacatccagacttcatcacatgaagcctattggggttaagtttgtaagtgtttaattgtgcaaattgccaccctgtgtacctcctccatgtctgtctgcgtgttttccaccaaagaatgcaaagcagacttccaggtgtttaaattctgttcactcaacaatgccagatgaatggaagagggaacacactgagatgacttagactctggtccaccaaccagacccttggaaaggaatactaaaatcattacaaggtatggattttaaatggatgaaacttcaaattatcttatttggatagaagtctatattctagcctcatttgcatgaagtcagatagccagaagaaattccattgctggttttcacgaaattcacttgtcttttgctaataaacacatggccctttcccagattattctctagccaagccccacctttgttacgttgaaatccctcatttattttcttctcaaaatgcccattatccaaatgcagaacctctgcatctccaagccagttatgctgaatttgtcaaacttagacacccttgacaactgcactcctactgtaggctcctgtgcatactgtcgtcttctgtgggggatggagaggttagtgtgatgaggtggtgtctgcccaggaggtttctttcaaacatcatggcctcccatccaatcaacatcatcaaattacatgtgtaatcaaggctctgtgccatgggggaaatgaatcatttagctaggccaggatctagtgaaagccacagagtttaaaaccatgaaagaagttgaaggcagcattcctcagctctgtgacttgtgaccctatttgaagtttcaggatttgggtgtcacaaaggattgtccctaatccttggccctggggtcttccgagtgagctggtttaatactctgagaatgagcagggagatccagagaatgaatccctgaccgcatcacctaaactgtcttccaaacatgagacaaagctgactgttcacactgattgcccagcacataccgtcttgccagtttcttcttttctcccagtctcctgttcatccattctgttctcccttggggtgggaatctatgatggaggttactggggaaacagctcagcagatttttggagaccaaaccaaaggtctcactaggaaatttatctgttttaaaacattgcttccttcctggctctgctaaattgaatgctcattgtttgttgttgttgttttttaattctaatgttcaaatcactgcgtgctgtatgaatctagaaagccttaatttactaccaagaaataaagcaatatgttcgtaatca

SEQ ID NO: 5420 - protein, 491 aa, Homo sapiens; identical to SEQ ID NO: 624

SEQ ID NO: 5421 - DNA, 8033 bp, Homo sapiens
gctggctgagccgcggcgcgggactgctcacctccaagcgctcgcgcggggatcgcggctcctgctcactttgcggcccgctgtcctcctgcccgccccgagggcccccggccggagcgcagagggagggggccgcgctcgccagcaccccgccgccttcccccgcctgggggaagaatgtgccaccagctgttctccgcttgcgagcgctgcgcccagtagtgaggaacttggaggaagaagagacaaaggctgccgtcgggacgggcgagttagggacttgggtttgggcgaacaaaaggtgagaaggacaagaagggaccgggcgatggcagcaggggagccccgcgggcgcgcgtcctcgggagtggcgccgtgacacgcatggtttccccggacccgcggcggcgctgacttccgcgagtcggagcggcactcggcgagtccgggactgcgctggaacaatggataacttcttcaccgagggaacacgggtctggctgagagaaaatggccagcattttccaagtactgtaaattcctgtgcagaaggcatcgtcgtcttccggacagactatggtcaggtattcacttacaagcagagcacaattacccaccagaaggtgactgctatgcaccccacgaacgaggagggcgtggatgacatggcgtccttgacagagctccatggcggctccatcatgtataacttattccagcggtataagagaaatcaaatatatacctacatcggctccatcctggcctccgtgaacccctaccagcccatcgccgggctgtacgagcctgccaccatggagcagtacagccggcgccacctgggcgagctgcccccgcacatcttcgccatcgccaacgagtgctaccgctgcctgtggaagcgccacgacaaccagtgcatcctcatcagtggtgaaagtggggcaggtaaaaccgaaagcactaaattgatcctcaagtttctgtcagtcatcagtcaacagtctttggaattgtccttaaaggagaagacatcctgtgttgaacgagctattcttgaaagcagccccatcatggaagctttcggcaatgcgaagaccgtgtacaacaacaactctagtcgctttgggaagtttgttcagctgaacatctgtcagaaaggaaatattcagggcgggagaattgtagattatttatcttcccagaaccgagtagtaaggcaaaatcccggggaaaggaattatcacatattttatgcactgctggcagggctggaacatgaagaaagagaagaattttatttatctacgccagaaaactaccactacttgaatcagtctggatgtgtagaagacaagacaatcagtgaccaggaatcctttagggaagttattacggcaatggacgtgatgcagttcagcaaggaggaagttcgggaagtgtcgaggctgcttgctggtatactgcatcttgggaacatagaatttatcactgctggtggggcacaggtttccttcaaaacagctttgggcagatctgcggagttacttgggctggacccaacacagctcacagatgctttgacccagagatcaatgttcctcaggggagaagagatcctcacgcctctcaatgttcaacaggcagtagacagcagggactccctggccatggctctgtatgcgtgctgctttgagtgggtaatcaagaagatcaacagcaggatcaaaggcaatgaggacttcaagtctattggcatcctcgacatctttggatttgaaaactttgaggttaatcactttgaacagttcaatataaactatgcaaacgagaaacttcaggagtacttcaacaagcatattttttctttagaacaactagaatatagccgggaaggattagtgtgggaagatattgactggatagacaatggagaatgcctggacttgattgagaagaaacttggcctcctagcccttatcaatgaagaaagccattttcctcaagccacagacagcaccttattggagaagctacacagtcagcatgcgaataaccacttttatgtgaagcccagagttgcagttaacaattttggagtgaagcactatgctggagaggtgcaatatgatgtccgaggtatcttggagaagaacagagatacatttcgagatgaccttctcaatttgctaagagaaagccgatttgactttatctacgatctttttgaacatgtttcaagccgcaacaaccaggataccttgaaatgtggaagcaaacatcggcggcctacagtcagctcacagttcaaggactcactgcattccttaatggcaacgctaagctcctctaatcctttctttgttcgctgtatcaagccaaacatgcagaagatgccagaccagtttgaccaggcggttgtgctgaaccagctgcggtactcagggatgctggagactgtgagaatccgcaaagctgggtatgcggtccgaagaccctttcaggacttttacaaaaggtataaagtgctgatgaggaatctggctctgcctgaggacgtccgagggaagtgcacgagcctgctgcagctctatgatgcctccaacagcgagtggcagctggggaagaccaaggtctttcttcgagaatccttggaacagaaactggagaagcggagggaagaggaagtgagccacgcggccatggtgattcgggcccatgtcttgggcttcttagcacgaaaacaatacagaaaggtcctttattgtgtggtgataatacagaagaattacagagcattccttctgaggaggagatttttgcacctgaaaaaggcagccatagttttccagaagcaactcagaggtcagattgctcggagagtttacagacaattgctggcagagaaaagggagcaagaagaaaagaagaaacaggaagaggaagaaaagaagaaacgggaggaagaagaaagagaaagagagagagagcgaagagaagccgagctccgcgcccagcaggaagaagaaacgaggaagcagcaagaactcgaagccttgcagaagagccagaaggaagctgaactgacccgtgaactggagaaacagaaggaaaataagcaggtggaagagatcctccgtctggagaaagaaatcgaggacctgcagcgcatgaaggagcagcaggagctgtcgctgaccgaggcttccctgcagaagctgcaggagcggcgggaccaggagctccgcaggctggaggaggaagcgtgcagggcggcccaggagttcctcgagtccctcaatttcgacgagatcgacgagtgtgtccggaatatcgagcggtccctgtcggtgggaagcgaattttccagcgagctggctgagagcgcatgcgaggagaagcccaacttcaacttcagccagccctacccagaggaggaggtcgatgagggcttcgaagccgacgacgacgccttcaaggactcccccaaccccagcgagcacggccactcagaccagcgaacaagtggcatccggaccagcgatgactcttcagaggaggacccatacatgaacgacacggtggtgcccaccagccccagtgcggacagcacggtgctgctcgccccatcagtgcaggactccgggagcctacacaactcctccagcggcgagtccacctactgcatgccccagaacgctggggacttgccctccccagacggcgactacgactacgaccaggatgactatgaggacggtgccatcacttccggcagcagcgtgaccttctccaactcctacggcagccagtggtcccccgactaccgctgctctgtggggacctacaacagctcgggtgcctaccggttcagctctgagggggcgcagtcctcgtttgaagatagtgaagaggactttgattccaggtttgatacagatgatgagctttcataccggcgtgactctgtgtacagctgtgtcactctgccgtatttccacagctttctgtacatgaaaggtggcctgatgaactcttggaaacgccgctggtgcgtcctcaaggatgaaaccttcttgtggttccgctccaagcaggaggccctcaagcaaggctggctccacaaaaaaggggggggctcctccacgctgtccaggagaaattggaagaagcgctggtttgtcctccgccagtccaagctgatgtactttgaaaacgacagcgaggagaagctcaagggcaccgtagaagtgcgaacggcaaaagagatcatagataacaccaccaaggagaatgggatcgacatcattatggccgataggactttccacctgattgcagagtccccagaagatgccagccagtggttcagcgtgctgagtcaggtccacgcgtccacggaccaggagatccaggagatgcatgatgagcaggcaaacccacagaatgctgtgggcaccttggatgtggggctgattgattctgtgtgtgcctctgacagccctgatagacccaactcgtttgtgatcatcacggccaaccgggtgctgcactgcaacgccgacacgccggaggagatgcaccactggataaccctgctgcagaggtccaaaggggacaccagagtggagggccaggaattcatcgtgagaggatggttgcacaaagaggtgaagaacagtccaaagatgtcttcactgaaactgaagaaacggtggtttgtactcacccacaattccctggattactacaagagttcagagaagaacgcgctcaaactggggaccctggtcctcaacagcctctgctctgtcgtccccccagatgagaagatattcaaagagacaggctactggaacgtcaccgtgtacgggcgcaagcactgttaccggctctacaccaagctgctcaacgaggccacccggtggtccagtgccattcaaaacgtgactgacaccaaggccccgatcgacacccccacccagcagctgattcaagatatcaaggagaactgcctgaactcggatgtggtggaacagatttacaagcggaacccgatccttcgatacacccatcaccccttgcactccccgctcctgccccttccgtatggggacataaatctcaacttgctcaaagacaaaggctataccacccttcaggatgaggccatcaagatattcaattccctgcagcaactggagtccatgtctgacccaattccaataatccagggcatcctacagacagggcatgacctgcgacctctgcgggacgagctgtactgccagcttatcaaacagaccaacaaagtgccccaccccggcagtgtgggcaacctgtacagctggcagatcctgacatgcctgagctgcaccttcctgccgagtcgagggattctcaagtatctcaagttccatctgaaaaggatacgggaacagtttccaggaagcgagatggaaaaatacgctctcttcacttacgaatctcttaagaaaaccaaatgccgagagtttgtgccttcccgagatgaaatagaagctctgatccacaggcaggaaatgacatccacggtctattgccatggcggcggctcctgcaagatcaccatcaactcccacaccaccgctggggaggtggtggagaagctgatccgaggcctggccatggaggacagcaggaacatgtttgctttgtttgaatacaacggccacgtcgacaaagccattgaaagtcgaaccgtcgtagctgatgtcttagccaagtttgaaaagctggctgccacatccgaggttggggacctgccatggaaattctacttcaaactttactgcttcctggacacagacaacgtgccaaaagacagtgtggagtttgcatttatgtttgaacaggcccacgaagcggttatccatggccaccatccagccccggaagaaaacctccaggttcttgctgccctgcgactccagtatctgcagggggattatactctgcacgctgccatcccacctctcgaagaggtttattccctgcagagactcaaggcccgcatcagccagtcaaccaaaaccttcaccccttgtgaacggctggagaagaggcggacgagcttcctagaggggaccctgaggcggagcttccggacaggatccgtggtccggcagaaggtcgaggaggagcagatgctggacatgtggattaaggaagaagtctcctctgctcgagccagtatcattgacaagtggaggaaatttcagggaatgaaccaggaacaggccatggccaagtacatggccttgatcaaggagtggcctggctatggctcgacgctgtttgatgtggagtgcaaggaaggtggcttccctcaggaactctggttgggtgtcagcgcggacgccgtctccgtctacaagcgtggagagggaagaccactggaagtcttccagtatgaacacatcctctcttttggggcacccctggcgaatacgtataagatcgtggtcgatgagagggagctgctctttgaaaccagtgaggtggtggatgtggccaagctcatgaaagcctacatcagcatgatcgtgaagaagcgctacagcacgacacgctccgccagcagccagggcagctccaggtgaaggcgggacagagcccacctgtctttgctacctgaacgcaccaccctctggcctaggctggctccagtgtgccatgcccagccaaaacaaacacagagctgcccaggctttctggaagcttctggtctgagggaggtgtctccgaggatccttttgcctgccgccttcattgatcctgtattaagctgtcaactttaacagtctgcacagtttccaaagctttactactcttagaggacacatgccttaaaaaaggaggggaggaaccacgctgccaccaaagcagccggaagtgccttaacttgtggaaccaacactaatcgaccgtaactgtgctactgaagggaactgcctttcccccttctgggggagacttaacagagcgtggaaggggggcattctctgtcaatgatgcactaacctcccaacctgatttccccgaatctgagggaaggtgagggagtgggaagggggatggagagctcgaggggacagtgtgtttgagctggagtgctgcgggcagcctttctcatggaatgacatgaatcaacttttttctttgtttcatcttttaagtgtacgtgcttgcctgttcgtgcatgtgttcataaactcaacactttaatcatggtttcatgagcattaaaaagcaaagggaaaaaggatgtgtaatggtgtacacagtctgtatattttaataatgcagagctatagtctcaattgttactttataaggtggttttattaacaaacccaaatcctggattttcctgtctttgctgtattttgaaaaacacgtgttgactccattgttttacatgtagcaaagtctgccatctgtgtctgctgtattataaacagataagcagcctacaagataactgtatttataaaccactcttcaacagctggctccagtgctggttttagaacaagaatgaagtcattttggagtctttcatgtctaaaagatttaagttaaaaacaaagtgttacttggaaggttagcttctatcattctggatagattacagatataataaccatgttgactatgggggagagacgctgcattccagaaacgtcttaacacttgagtgaatcttcaaaggaccctgacattaaatgctgaggctttaatacacacatattttatcccaagtttataatggtggtctgaacaaggcacctgtaaataaatcagcatttatgaccagaagaaaaataatctggtcttggactttttatttttatatggaaaagttttaaggacttgggccaactaagtctacccacacgaaaaaagaaatttgccttgtccctttgtgtacaaccatgcaaaactgtttgttggctcacagaagttctgacaataaaagatactagctaaca

SEQ ID NO: 5422 - protein, 2058 aa, Homo sapiens
MDNFFTEGTRVWLRENGQHFPSTVNSCAEGIVVFRTDYGQVFTYKQSTITHQKVTAMHPTNEEGVDDMASLTELHGGSIMYNLFQRYKRNQIYTYIGSILASVNPYQPIAGLYEPATMEQYSRRHLGELPPHIFAIANECYRCLWKRHDNQCILISGESGAGKTESTKLILKFLSVISQQSLELSLKEKTSCVERAILESSPIMEAFGNAKTVYNNNSSRFGKFVQLNICQKGNIQGGRIVDYLSSQNRVVRQNPGERNYHIFYALLAGLEHEEREEFYLSTPENYHYLNQSGCVEDKTISDQESFREVITAMDVMQFSKEEVREVSRLLAGILHLGNIEFITAGGAQVSFKTALGRSAELLGLDPTQLTDALTQRSMFLRGEEILTPLNVQQAVDSRDSLAMALYACCFEWVIKKINSRIKGNEDFKSIGILDIFGFENFEVNHFEQFNINYANEKLQEYFNKHIFSLEQLEYSREGLVWEDIDWIDNGECLDLIEKKLGLLALINEESHFPQATDSTLLEKLHSQHANNHFYVKPRVAVNNFGVKHYAGEVQYDVRGILEKNRDTFRDDLLNLLRESRFDFIYDLFEHVSSRNNQDTLKCGSKHRRPTVSSQFKDSLHSLMATLSSSNPFFVRCIKPNMQKMPDQFDQAVVLNQLRYSGMLETVRIRKAGYAVRRPFQDFYKRYKVLMRNLALPEDVRGKCTSLLQLYDASNSEWQLGKTKVFLRESLEQKLEKRREEEVSHAAMVIRAHVLGFLARKQYRKVLYCVVIIQKNYRAFLLRRRFLHLKKAAIVFQKQLRGQIARRVYRQLLAEKREQEEKKKQEEEEKKKREEEERERERERREAELRAQQEEETRKQQELEALQKSQKEAELTRELEKQKENKQVEEILRLEKEIEDLQRMKEQQELSLTEASLQKLQERRDQELRRLEEEACRAAQEFLESLNFDEIDECVRNIERSLSVGSEFSSELAESACEEKPNFNFSQPYPEEEVDEGFEADDDAFKDSPNPSEHGHSDQRTSGIRTSDDSSEEDPYMNDTVVPTSPSADSTVLLAPSVQDSGSLHNSSSGESTYCMPQNAGDLPSPDGDYDYDQDDYEDGAITSGSSVTFSNSYGSQWSPDYRCSVGTYNSSGAYRFSSEGAQSSFEDSEEDFDSRFDTDDELSYRRDSVYSCVTLPYFHSFLYMKGGLMNSWKRRWCVLKDETFLWFRSKQEALKQGWLHKKGGGSSTLSRRNWKKRWFVLRQSKLMYFENDSEEKLKGTVEVRTAKEIIDNTTKENGIDIIMADRTFHLIAESPEDASQWFSVLSQVHASTDQEIQEMHDEQANPQNAVGTLDVGLIDSVCASDSPDRPNSFVIITANRVLHCNADTPEEMHHWITLLQRSKGDTRVEGQEFIVRGWLHKEVKNSPKMSSLKLKKRWFVLTHNSLDYYKSSEKNALKLGTLVLNSLCSVVPPDEKIFKETGYWNVTVYGRKHCYRLYTKLLNEATRWSSAIQNVTDTKAPIDTPTQQLIQDIKENCLNSDVVEQIYKRNPILRYTHHPLHSPLLPLPYGDINLNLLKDKGYTTLQDEAIKIFNSLQQLESMSDPIPIIQGILQTGHDLRPLRDELYCQLIKQTNKVPHPGSVGNLYSWQILTCLSCTFLPSRGILKYLKFHLKRIREQFPGSEMEKYALFTYESLKKTKCREFVPSRDEIEALIHRQEMTSTVYCHGGGSCKITINSHTTAGEVVEKLIRGLAMEDSRNMFALFEYNGHVDKAIESRTVVADVLAKFEKLAATSEVGDLPWKFYFKLYCFLDTDNVPKDSVEFAFMFEQAHEAVIHGHHPAPEENLQVLAALRLQYLQGDYTLHAAIPPLEEVYSLQRLKARISQSTKTFTPCERLEKRRTSFLEGTLRRSFRTGSVVRQKVEEEQMLDMWIKEEVSSARASIIDKWRKFQGMNQEQAMAKYMALIKEWPGYGSTLFDVECKEGGFPQELWLGVSADAVSVYKRGEGRPLEVFQYEHILSFGAPLANTYKIVVDERELLFETSEVVDVAKLMKAYISMIVKKRYSTTRSASSQGSSR

SEQ ID NO: 5423 - DNA, 2922 bp, Homo sapiens
gctggctgagccgcggcgcgggactgctcacctccaagcgctcgcgcggggatcgcggctcctgctcactttgcggcccgctgtcctcctgcccgccccgagggcccccggccggagcgcagagggagggggccgcgctcgccagcaccccgccgccttcccccgcctgggggaagaatgtgccaccagctgttctccgcttgcgagcgctgcgcccagtagtgaggaacttggaggaagaagagacaaaggctgccgtcgggacgggcgagttagggacttgggtttgggcgaacaaaaggtgagaaggacaagaagggaccgggcgatggcagcaggggagccccgcgggcgcgcgtcctcgggagtggcgccgtgacacgcatggtttccccggacccgcggcggcgctgacttccgcgagtcggagcggcactcggcgagtccgggactgcgctggaacaatggataacttcttcaccgagggaacacgggtctggctgagagaaaatggccagcattttccaagtactgtaaattcctgtgcagaaggcatcgtcgtcttccggacagactatggtcaggtattcacttacaagcagagcacaattacccaccagaaggtgactgctatgcaccccacgaacgaggagggcgtggatgacatggcgtccttgacagagctccatggcggctccatcatgtataacttattccagcggtataagagaaatcaaatatatacctacatcggctccatcctggcctccgtgaacccctaccagcccatcgccgggctgtacgagcctgccaccatggagcagtacagccggcgccacctgggcgagctgcccccgcacatcttcgccatcgccaacgagtgctaccgctgcctgtggaagcgccacgacaaccagtgcatcctcatcagtggtgaaagtggggcaggtaaaaccgaaagcactaaattgatcctcaagtttctgtcagtcatcagtcaacagtctttggaattgtccttaaaggagaagacatcctgtgttgaacgagctattcttgaaagcagccccatcatggaagctttcggcaatgcgaagaccgtgtacaacaacaactctagtcgctttgggaagtttgttcagctgaacatctgtcagaaaggaaatattcagggcgggagaattgtagattatttatcttcccagaaccgagtagtaaggcaaaatcccggggaaaggaattatcacatattttatgcactgctggcagggctggaacatgaagaaagagaagaattttatttatctacgccagaaaactaccactacttgaatcagtctggatgtgtagaagacaagacaatcagtgaccaggaatcctttagggaagttattacggcaatggacgtgatgcagttcagcaaggaggaagttcgggaagtgtcgaggctgcttgctggtatactgcatcttgggaacatagaatttatcactgctggtggggcacaggtttccttcaaaacagctttgggcagatctgcggagttacttgggctggacccaacacagctcacagatgctttgacccagagatcaatgttcctcaggggagaagagatcctcacgcctctcaatgttcaacaggcagtagacagcagggactccctggccatggctctgtatgcgtgctgctttgagtgggtaatcaagaagatcaacagcaggatcaaaggcaatgaggacttcaagtctattggcatcctcgacatctttggatttgaaaactttgaggttaatcactttgaacagttcaatataaactatgcaaacgagaaacttcaggagtacttcaacaagcatattttttctttagaacaactagaatatagccgggaaggattagtgtgggaagatattgactggatagacaatggagaatgcctggacttgattgagaagaaacttggcctcctagcccttatcaatgaagaaagccattttcctcaagccacagacagcaccttattggagaagctacacagtcagcatgcgaataaccacttttatgtgaagcccagagttgcagttaacaattttggagtgaagcactatgctggagaggtgcaatatgatgtccgaggtatcttggagaagaacagagatacatttcgagatgaccttctcaatttgctaagagaaagccgatttgactttatctacgatctttttgaacatgtttcaagccgcaacaaccaggataccttgaaatgtggaagcaaacatcggcggcctacagtcagctcacagttcaaggactcactgcattccttaatggcaacgctaagctcctctaatcctttctttgttcgctgtatcaagccaaacatgcagaagatgccagaccagtttgaccaggcggttgtgctgaaccagctgcggtactcagggatgctggagactgtgagaatccgcaaagctgggtatgcggtccgaagaccctttcaggacttttacaaaaggtataaagtgctgatgaggaatctggctctgcctgaggacgtccgagggaagtgcacgagcctgctgcagctctatgatgcctccaacagcgagtggcagctggggaagaccaaggtctttcttcgagaatccttggaacagaaactggagaagcggagggaagaggaagtgagccacgcggccatggtgattcgggcccatgtcttgggcttcttagcacgaaaacaatacagaaaggtcctttattgtgtggtgataatacagaagaattacagagcattccttctgaggaggagatttttgcacctgaaaaaggcagccatagttttccagaagcaactcagaggtcagattgctcggagagtttacagacaattgctggcagagaaaagggagcaagaag

SEQ ID NO: 5424 - protein, 818 aa, Homo sapiens
MDNFFTEGTRVWLRENGQHFPSTVNSCAEGIVVFRTDYGQVFTYKQSTITHQKVTAMHPTNEEGVDDMASLTELHGGSIMYNLFQRYKRNQIYTYIGSILASVNPYQPIAGLYEPATMEQYSRRHLGELPPHIFAIANECYRCLWKRHDNQCILISGESGAGKTESTKLILKFLSVISQQSLELSLKEKTSCVERAILESSPIMEAFGNAKTVYNNNSSRFGKFVQLNICQKGNIQGGRIVDYLSSQNRVVRQNPGERNYHIFYALLAGLEHEEREEFYLSTPENYHYLNQSGCVEDKTISDQESFREVITAMDVMQFSKEEVREVSRLLAGILHLGNIEFITAGGAQVSFKTALGRSAELLGLDPTQLTDALTQRSMFLRGEEILTPLNVQQAVDSRDSLAMALYACCFEWVIKKINSRIKGNEDFKSIGILDIFGFENFEVNHFEQFNINYANEKLQEYFNKHIFSLEQLEYSREGLVWEDIDWIDNGECLDLIEKKLGLLALINEESHFPQATDSTLLEKLHSQHANNHFYVKPRVAVNNFGVKHYAGEVQYDVRGILEKNRDTFRDDLLNLLRESRFDFIYDLFEHVSSRNNQDTLKCGSKHRRPTVSSQFKDSLHSLMATLSSSNPFFVRCIKPNMQKMPDQFDQAVVLNQLRYSGMLETVRIRKAGYAVRRPFQDFYKRYKVLMRNLALPEDVRGKCTSLLQLYDASNSEWQLGKTKVFLRESLEQKLEKRREEEVSHAAMVIRAHVLGFLARKQYRKVLYCVVIIQKNYRAFLLRRRFLHLKKAAIVFQKQLRGQIARRVYRQLLAEKREQ

SEQ ID NO: 5425 - DNA, 755 bp, Homo sapiens
gccccgcgggcgcgcgtcctcgggagtggcgccgtgacacgcatggtttccccggacccgcggcggcgctgacttccgcgagtcggagcggcactcggcgagtccgggactgcgctggaacaatggataacttcttcaccgaggtattcacttacaagcagagcacaattacccaccagaaggtgactgctatgcaccccacgaacgaggagggcgtggatgacatggcgtccttgacagagctccatggcggctccatcatgtataacttattccagcggtataagagaaatcaaatatatacctacatcggctccatcctggcctccgtgaacccctaccagcccatcgccgggctgtacgagcctgccaccatggagcagtacagccggcgccacctgggcgagctgcccccgcacatcttcgccatcgccaacgagtgctaccgctgcctgtggaagcgccacgacaaccagtgcatcctcatcagtggtgaaagtggggcaggtaaaaccgaaagcactaaattgatcctcaagtttctgtcagtcatcagtcaacagtctttggaattgtccttaaaggagaagacatcctgtgttgaacgagctattcttgaaagcagccccatcatggaagctttcggcaatgcgaagaccgtgtacaacaacaactctagtcgctttgggaagtttgttcagctgaacatctgtcagaaaggaaatattcagggcgggagaattgtagattgtatc

SEQ ID NO: 5426 - protein, 210 aa, Homo sapiens
MDNFFTEVFTYKQSTITHQKVTAMHPTNEEGVDDMASLTELHGGSIMYNLFQRYKRNQIYTYIGSILASVNPYQPIAGLYEPATMEQYSRRHLGELPPHIFAIANECYRCLWKRHDNQCILISGESGAGKTESTKLILKFLSVISQQSLELSLKEKTSCVERAILESSPIMEAFGNAKTVYNNNSSRFGKFVQLNICQKGNIQGGRIVDC

SEQ ID NO: 5427 - DNA, 1689 bp, Homo sapiens
gctggctgagccgcggcgcgggactgctcacctccaagcgctcgcgcggggatcgcggctcctgctcactttgcggcccgctgtcctcctgcccgccccgagggcccccggccggagcgcagagggagggggccgcgctcgccagcaccccgccgccttcccccgcctgggggaagaatgtgccaccagctgttctccgcttgcgagcgctgcgcccagtagtgaggaacttggaggaagaagagacaaaggctgccgtcgggacgggcgagttagggacttgggtttgggcgaacaaaaggtgagaaggacaagaagggaccgggcgatggcagcaggggagccccgcgggcgcgcgtcctcgggagtggcgccgtgacacgcatggtttccccggacccgcggcggcgctgacttccgcgagtcggagcggcactcggcgagtccgggactgcgctggaacaatggataacttcttcaccgagggaacacgggtctggctgagagaaaatggccagcattttccaagtactgtaaattcctgtgcagaaggcatcgtcgtcttccggacagactatggtcaggtattcacttacaagcagagcacaattacccaccagaaggtgactgctatgcaccccacgaacgaggagggcgtggatgacatggcgtccttgacagagctccatggcggctccatcatgtataacttattccagcggtataagagaaatcaaatatatgtgcagataggttgaatatacctaatccaaaaactccaaatccacaatgcttcaaaatccaagacattttgcatgctgatgtgttgctgaaaggaaatgctcattgggaatattttggattttgaatttaacttaaattatgcttaaccagtacatagtatgcaaatattccaaaatccaaaaaatattgaaatccacaacactttgtgtcccaggcatttcacacaagggatgctcaatctatattttgaaactcatactttgctgtcattagagaaaaaacacaagtttgtttttttttgtaatagtgtcttgctatgttgcccaggctagactcaaactcctgagctaaagtgatcctcctgccttagcctcctgagtacctgggattacaggcacgtgccagcatgcccacctagacacaagttgttattgtacattttcaatagtcaagaaaaagtaagtaaattagaaggaaaaaaaaactacacaagggtttaaaaggcagacccttttaaaaagttttttatttattttcctcttttcatgataataatgttaaacctgacagctaaattgccaatacatactatgaataagatcttggtcttggaataaggtcatattcttcctttctaaggggaaacccgtaggatttttgtgcatccaatttgcagttcagttcagttaattatgccattgtagaccttccgtttgaggcttgcaaaattgtatattatccataaagcagccaccatgattttttaaaattatcattgaagccattcaccggagatgtcagcgtctgttggactccgctcacatcgagacaagaccgccacctgtcagaacagccactgcttctccacatttgatcctggctcggagcaatgcctgtctatatctttaaaagagaaaaaaaataaaatgacttgaattgttccag

SEQ ID NO: 5428 - protein, 97 aa, Homo sapiens
MDNFFTEGTRVWLRENGQHFPSTVNSCAEGIVVFRTDYGQVFTYKQSTITHQKVTAMHPTNEEGVDDMASLTELHGGSIMYNLFQRYKRNQIYVQIG

SEQ ID NO: 5429 - DNA, 229 bp, Homo sapiens
aacgccccgacagtgttctgaactgggttgaacacacaaaggatgctacaattttccacttgtatacaggtccctccaagacttcgcttctcaccatgattctgacattgatatgaaaacacacaagatttcacttctcaccatgattctgacactgatatgatcactgaatgaccgttttcagcaattcgggcctataaaagtgtgaaatagattttttttgaaagtc

SEQ ID NO: 5430 - DNA, 2783 bp, Homo sapiens
gatttcgggcacctccgaaagataattgggaagggtttccagaaggtgggaaatgtcacctgattcacactgaacttttgaaagctccccacccccaaggagccgcgcacaccctcgctcgcggccgccctcccacagccccacacactgggagaccgcccaccgcaaaccgcggagacccccgtctagatttaaagcgcggctgcgcccggcttctgacgtccattgaatcgcgcgggcggccggcggcgagcgcggggctgcgccgggatcgctgcgccctccgccgctggcctctgcgacgcgcgccgctcgcccgagccacccgccgccgcgccggctccccgcgccgctgcgctcctcgccccgcgcctgcccccaggatggtccgcgcgaggcaccagccgggtgggctttgcctcctgctgctgctgctctgccagttcatggaggaccgcagtgcccaggctgggaactgctggctccgtcaagcgaagaacggccgctgccaggtcctgtacaagaccgaactgagcaaggaggagtgctgcagcaccggccggctgagcacctcgtggaccgaggaggacgtgaatgacaacacactcttcaagtggatgattttcaacgggggcgcccccaactgcatcccctgtaaagaaacgtgtgagaacgtggactgtggacctgggaaaaaatgccgaatgaacaagaagaacaaaccccgctgcgtctgcgccccggattgttccaacatcacctggaagggtccagtctgcgggctggatgggaaaacctaccgcaatgaatgtgcactcctaaaggcaagatgtaaagagcagccagaactggaagtccagtaccaaggcagatgtaaaaagacttgtcgggatgttttctgtccaggcagctccacatgtgtggtggaccagaccaataatgcctactgtgtgacctgtaatcggatttgcccagagcctgcttcctctgagcaatatctctgtgggaatgatggagtcacctactccagtgcctgccacctgagaaaggctacctgcctgctgggcagatctattggattagcctatgagggaaagtgtatcaaagcaaagtcctgtgaagatatccagtgcactggtgggaaaaaatgtttatgggatttcaaggttgggagaggccggtgttccctctgtgatgagctgtgccctgacagtaagtcggatgagcctgtctgtgccagtgacaatgccacttatgccagcgagtgtgccatgaaggaagctgcctgctcctcaggtgtgctactggaagtaaagcactccggatcttgcaactgaatctgcccgtaaaacctgagccattgattcttcagaactttctgcagtttttgacttcatagattatgctttaaaaaaatttttttaacttattgcataacagcagatgccaaaaacaaaaaaagcatctcactgcaagtcacataaaaatgcaacgctgtaatatggctgtatcagagggctttgaaaacatacactgagctgcttctgcgctgttgttgtccgtatttaaacaacagctcccctgtattcccccatctagccatttcggaagacaccgaggaagaggaggaagatgaagaccaggactacagctttcctatatcttctattctagagtggtaaactctctataagtgttcagtgttgacatagcctttgtgcaaaaaaaaaaaaaaaaaaaaagaaaaagaaaaaaagaaaaatatattgtccatactgtaaataagtgtatgcttatttatttggggggaaaactatacattaaaggacctttgtcctaaagctctctcccaggccaccttgttactcattggacacggagaggcattcattgtgaggtctactggatgaggcccatagttgagacttgtagacatttatttatactgtgtcatgttttataatttatacataaaatgtctggttgactgtataccttgtttttgaagaaatttattcgtgaaaggaagagcagttgttatttattgtgaggtctcttgcttgtaaagtaaaagctttttttccttgtaaaccatttaagtccattccttactattcactcactcatctgtctcccttcatttcactgttagactcttttccactttcaacaaacttgcatgtcagtttctgtcatgtttatttattggattctctgctgcctgatctgtacatacatgatccctcgggttttgtttacaaggaaccttgactgaccaaaaggcattataactctgactcaaatacaaggtacagaagataagcatctttgaggaaactcctacttcagttcttttgttatgatgaagacatttgtgagagaggagatgattagaattctagtaatgtacttttaagatgttacagatacaaagaaatgatgtgggtgtcaggagactaaaggatgttgaaggctacacattcaaccttttgttaggtgtttcctttaagctactcagctgtaccttttaaattagttctttttcaaccagtatatcactaaaagttatatcaaagctttatcagttcaagtttcttgcttttcataatacttttttctgatgcaattttatattttcaaacatggcaagttaaaatataaattcatttaaatatatagttttgtacttttctaccatgtaaatgtgcaatgtatataaaagttataatgtgtatttgtaaataaatgatgagtgaaaaaataaaaaaattttaaaaagccaa

SEQ ID NO: 5431 - protein, 317 aa, Homo sapiens; identical to SEQ ID NO: 628

SEQ ID NO: 5432 - DNA, 2519 bp, Homo sapiens
gatttcgggcacctccgaaagataattgggaagggtttccagaaggtgggaaatgtcacctgattcacactgaacttttgaaagctccccacccccaaggagccgcgcacaccctcgctcgcggccgccctcccacagccccacacactgggagaccgcccaccgcaaaccgcggagacccccgtctagatttaaagcgcggctgcgcccggcttctgacgtccattgaatcgcgcgggcggccggcggcgagcgcggggctgcgccgggatcgctgcgccctccgccgctggcctctgcgacgcgcgccgctcgcccgagccacccgccgccgcgccggctccccgcgccgctgcgctcctcgccccgcgcctgcccccaggatggtccgcgcgaggcaccagccgggtgggctttgcctcctgctgctgctgctctgccagttcatggaggaccgcagtgcccaggctgggaactgctggctccgtcaagcgaagaacggccgctgccaggtcctgtacaagaccgaactgagcaaggaggagtgctgcagcaccggccggctgagcacctcgtggaccgaggaggacgtgaatgacaacacactcttcaagtggatgattttcaacgggggcgcccccaactgcatcccctgtaaagaaacgtgtgagaacgtggactgtggacctgggaaaaaatgccgaatgaacaagaagaacaaaccccgctgcgtctgcgccccggattgttccaacatcacctggaagggtccagtctgcgggctggatgggaaaacctaccgcaatgaatgtgcactcctaaaggcaagatgtaaagagcagccagaactggaagtccagtaccaaggcagatgtaaaaagacttgtcgggatgttttctgtccaggcagctccacatgtgtggtggaccagaccaataatgcctactgtgtgacctgtaatcggatttgcccagagcctgcttcctctgagcaatatctctgtgggaatgatggagtcacctactccagtgcctgccacctgagaaaggctacctgcctgctgggcagatctattggattagcctatgagggaaagtgtatcaaagcaaagtcctgtgaagatatccagtgcactggtgggaaaaaatgtttatgggatttcaaggttgggagaggccggtgttccctctgtgatgagctgtgccctgacagtaagtcggatgagcctgtctgtgccagtgacaatgccacttatgccagcgagtgtgccatgaaggaagctgcctgctcctcaggtgtgctactggaagtaaagcactccggatcttgcaactccatttcggaagacaccgaggaagaggaggaagatgaagaccaggactacagctttcctatatcttctattctagagtggtaaactctctataagtgttcagtgttgacatagcctttgtgcaaaaaaaaaaaaaaaaaaaaagaaaaagaaaaaaagaaaaatatattgtccatactgtaaataagtgtatgcttatttatttggggggaaaactatacattaaaggacctttgtcctaaagctctctcccaggccaccttgttactcattggacacggagaggcattcattgtgaggtctactggatgaggcccatagttgagacttgtagacatttatttatactgtgtcatgttttataatttatacataaaatgtctggttgactgtataccttgtttttgaagaaatttattcgtgaaaggaagagcagttgttatttattgtgaggtctcttgcttgtaaagtaaaagctttttttccttgtaaaccatttaagtccattccttactattcactcactcatctgtctcccttcatttcactgttagactcttttccactttcaacaaacttgcatgtcagtttctgtcatgtttatttattggattctctgctgcctgatctgtacatacatgatccctcgggttttgtttacaaggaaccttgactgaccaaaaggcattataactctgactcaaatacaaggtacagaagataagcatctttgaggaaactcctacttcagttcttttgttatgatgaagacatttgtgagagaggagatgattagaattctagtaatgtacttttaagatgttacagatacaaagaaatgatgtgggtgtcaggagactaaaggatgttgaaggctacacattcaaccttttgttaggtgtttcctttaagctactcagctgtaccttttaaattagttctttttcaaccagtatatcactaaaagttatatcaaagctttatcagttcaagtttcttgcttttcataatacttttttctgatgcaattttatattttcaaacatggcaagttaaaatataaattcatttaaatatatagttttgtacttttctaccatgtaaatgtgcaatgtatataaaagttataatgtgtatttgtaaataaatgatgagtgaaaaaataaaaaaattttaaaaagccaa

SEQ ID NO: 5433 - protein, 344 aa, Homo sapiens; identical to SEQ ID NO: 630

SEQ ID NO: 5434 - DNA, 1582 bp, Homo sapiens
gtggactgtggacctgggaaaaaatgccgaatgaacaagaagaacaaaccccgctgcgtctgcgccccggattgttccaacatcacctggaagggtccagtctgcgggctggatgggaaagtgtatcagtaggtattctggattgaggaaggaaaaagagaaaacagaagcaaagtcctgtgaagatatccagtgcactggtgggaaaaaatgtttatgggatttcaaggttgggagaggccggtgttccctctgtgatgagctgtgccctgacagtaagtcggatgagcctgtctgtgccagtgacaatgccacttatgccagcgagtgtgccatgaaggaagctgcctgctcctcaggtgtgctactggaagtaaagcactccggatcttgcaactccatttcggaagacaccgaggaagaggaggaagatgaagaccaggactacagctttcctatatcttctattctagagtggtaaactctctataagtgttcagtgttgacatagcctttgtgcaaaaaaaaaaaaaaaaaaaaagaaaaagaaaaaaagaaaaatatattgtccatactgtaaataagtgtatgcttatttatttggggggaaaactatacattaaaggacctttgtcctaaagctctctcccaggccaccttgttactcattggacacggagaggcattcattgtgaggtctactggatgaggcccatagttgagacttgtagacatttatttatactgtgtcatgttttataatttatacataaaatgtctggttgactgtataccttgtttttgaagaaatttattcgtgaaaggaagagcagttgttatttattgtgaggtctcttgcttgtaaagtaaaagctttttttccttgtaaaccatttaagtccattccttactattcactcactcatctgtctcccttcatttcactgttagactcttttccactttcaacaaacttgcatgtcagtttctgtcatgtttatttattggattctctgctgcctgatctgtacatacatgatccctcgggttttgtttacaaggaaccttgactgaccaaaaggcattataactctgactcaaatacaaggtacagaagataagcatctttgaggaaactcctacttcagttcttttgttatgatgaagacatttgtgagagaggagatgattagaattctagtaatgtacttttaagatgttacagatacaaagaaatgatgtgggtgtcaggagactaaaggatgttgaaggctacacattcaaccttttgttaggtgtttcctttaagctactcagctgtaccttttaaattagttctttttcaaccagtatatcactaaaagttatatcaaagctttatcagttcaagtttcttgcttttcataatacttttttctgatgcaattttatattttcaaacatggcaagttaaaatataaattcatttaaatatatagttttgtacttttctaccatgtaaatgtgcaatgtatataaaagttataatgtgtatttgtaaataaatgatgagtgaaaaaataaaaaaattttaaaaagccaa

SEQ ID NO: 5435 - protein, 122 aa, Homo sapiens
MGKCISRYSGLRKEKEKTEAKSCEDIQCTGGKKCLWDFKVGRGRCSLCDELCPDSKSDEPVCASDNATYASECAMKEAACSSGVLLEVKHSGSCNSISEDTEEEEEDEDQDYSFPISSILEW

SEQ ID NO: 5436 - DNA, 2115 bp, Homo sapiens
ggtattctggattgaggaaggaaaaagagaaaacaggctagttctattattaaactgtggggttaactaataagtaaagcccaaggcgtccccaaacaccatagggagaaatacgctgcaatttggggaaagtgttgtgaccacagtattcctcatggaaaccattgtcttctggaggcattgacacatatattcaaatgccagcaggaagcaaggaacagtattccgtcttagaaaacttagaacttactcaattttacacatttttttaagtgccagacttgctggaagcgaaaaataattacttagcagttccagaaatctgttgtcagattctagtaattaatggaattctttcttttgtaaaagatcccacttgtgggaaataataagatacatatttaacttgagaatattgtaaaatcctgttcttaaaaaaatacccttttaatgcactaatgtagtatgtaagaaactgcaggggttttgtgcgtgtgtatgtgtgtgtgcatttgagtttcagttttattatccagcatttttgcataatatctccattacccccattagtaataggctattactattatgtttatataaaataaattatgtttatatttattgatagaggactagagaaagggagaaaagggggatatggggaaatcagtttactcatcacagatgtattatatcctagaagcaaagtcctgtgaagatatccagtgcactggtgggaaaaaatgtttatgggatttcaaggttgggagaggccggtgttccctctgtgatgagctgtgccctgacagtaagtcggatgagcctgtctgtgccagtgacaatgccacttatgccagcgagtgtgccatgaaggaagctgcctgctcctcaggtgtgctactggaagtaaagcactccggatcttgcaactccatttcggaagacaccgaggaagaggaggaagatgaagaccaggactacagctttcctatatcttctattctagagtggtaaactctctataagtgttcagtgttgacatagcctttgtgcaaaaaaaaaaaaaaaaaaaaagaaaaagaaaaaaagaaaaatatattgtccatactgtaaataagtgtatgcttatttatttggggggaaaactatacattaaaggacctttgtcctaaagctctctcccaggccaccttgttactcattggacacggagaggcattcattgtgaggtctactggatgaggcccatagttgagacttgtagacatttatttatactgtgtcatgttttataatttatacataaaatgtctggttgactgtataccttgtttttgaagaaatttattcgtgaaaggaagagcagttgttatttattgtgaggtctcttgcttgtaaagtaaaagctttttttccttgtaaaccatttaagtccattccttactattcactcactcatctgtctcccttcatttcactgttagactcttttccactttcaacaaacttgcatgtcagtttctgtcatgtttatttattggattctctgctgcctgatctgtacatacatgatccctcgggttttgtttacaaggaaccttgactgaccaaaaggcattataactctgactcaaatacaaggtacagaagataagcatctttgaggaaactcctacttcagttcttttgttatgatgaagacatttgtgagagaggagatgattagaattctagtaatgtacttttaagatgttacagatacaaagaaatgatgtgggtgtcaggagactaaaggatgttgaaggctacacattcaaccttttgttaggtgtttcctttaagctactcagctgtaccttttaaattagttctttttcaaccagtatatcactaaaagttatatcaaagctttatcagttcaagtttcttgcttttcataatacttttttctgatgcaattttatattttcaaacatggcaagttaaaatataaattcatttaaatatatagttttgtacttttctaccatgtaaatgtgcaatgtatataaaagttataatgtgtatttgtaaataaatgatgagtgaaaaaataaaaaaattttaaaaagccaa

SEQ ID NO: 5437 - protein, 118 aa, Homo sapiens [sequence omitted]

SEQ ID NO: 5438 - DNA, 916 bp, Homo sapiens
aaaaaaaaaaaagaaaaagaaaaaaagaaaaatatattgtccatactgtaaataagtgtatgcttatttatttggggggaaaactatacattaaaggacctttgtcctaaagctctctcccaggccaccttgtttttgaagaaatttattcgtgaaaggaagagcagttgttatttattgtgaggtctcttgcttgtaaagtaaaagctttttttccttgtaaaccatttaagtccattccttactattcactcactcatctgtctcccttcatttcactgttagactcttttccactttcaacaaacttgcatgtcagtttctgtcatgtttatttattggattctctgctgcctgatctgtacatacatgatccctcgggttttgtttacaaggaaccttgactgaccaaaaggcattataactctgactcaaatacaaggtacagaagataagcatctttgaggaaactcctacttcagttcttttgttatgatgaagacatttgtgagagaggagatgattagaattctagtaatgtacttttaagatgttacagatacaaagaaatgatgtgggtgtcaggagactaaaggatgttgaaggctacacattcaaccttttgttaggtgtttcctttaagctactcagctgtaccttttaaattagttctttttcaaccagtatatcactaaaagttatatcaaagctttatcagttcaagtttcttgcttttcataatacttttttctgatgcaattttatattttcaaacatggcaagttaaaatataaattcatttaaatatatagttttgtacttttctaccatgtaaatgtgcaatgtatataaaagttataatgtgtatttgtaaataaatgatgagtgaaaaaataaaaaaattttaaaaagccaa

SEQ ID NO: 5439 - protein, 37 aa, Homo sapiens
MLQIQRNDVGVRRLKDVEGYTFNLLLGVSFKLLSCTF

SEQ ID NO: 5440 - DNA, 802 bp, Homo sapiens
cctttcatcctggcgtttgcctgcagcaagatggcggcggtgtcaatgtcagtggtactgaggcagacgttgtggcggagaagggcagtggctgtagctgccctttccgtttccagggttccgaccagagacagggccttgctctgtcatccaggctggagtgcagtggtgcaatcatagctcactacatccctgagctcctgggcttaagcagtcctcccacctcagcctcccaggcagctgcgactataggtcgttgaggacttccacatggagattggcacaggaccagactcaagacacacaactcataacagttgatgaaaaattggatatcactactttaactggagttccagaagagcatataaaaactagaaaagtcaggatctttgttcctgctcgcaataacatgcagtctggagtaaacaacacaaagaaatggaagatggagtttgataccagagagcgatgggaaaatcctttgatgggttgggcatcaacggctgatcccttatccaacatggttctaaccttcagtactaaagaagatgcagtttcctttgcagaaaaaaatggatggagctatgacattgaagagaggaaggttccaaaacccaagtccaagtcttatggtgcaaacttttcttggaacaaaagaacaagagtatccacaaaataggttggcactgactatatctctgcttgactgtgaataaagtcagctgtgcagtatttatagtccatgtataataaatacatctcttaatctcctaataaattggacctttaaactacagat

SEQ ID NO: 5441 - protein, 89 aa, Homo sapiens
MQSGVNNTKKWKMEFDTRERWENPLMGWASTADPLSNMVLTFSTKEDAVSFAEKNGWSYDIEERKVPKPKSKSYGANFSWNKRTRVSTK

SEQ ID NO: 5442 - DNA, 601 bp, Homo sapiens
atcctggcgtttgcctgcagcaagatggcggcggtgtcaatgtcagtggtactgaggcagacgttgtggcggagaagggcagtggctgtagctgccctttccgtttccagggttccgaccaggtcgttgaggacttccacatggagattggcacaggaccagactcaagacacacaactcataacagttgatgaaaaattggatatcactactttaactggagttccagaagagcatataaaaactagaaaagtcaggatctttgttcctgctcgcaataacatgcagtctggagtaaacaacacaaagaaatggaagatggagtttgataccagagagcgatgggaaaatcctttgatgggttgggcatcaacggctgatcccttatccaacatggttctaaccttcagtactaaagaagatgcagtttcctttgcagaaaaaaatggatggagctatgacattgaagagaggaaggttccaaaacccaagtccaagtcttatggtgcaaacttttcttggaacaaaagaacaagagtatccacaaaataggttggcactgactatatctctgcttgactgtgaataaagtcagctgtgc

SEQ ID NO: 5443 - protein, 175 aa, Homo sapiens; identical to SEQ ID NO: 632

SEQ ID NO: 5444 - DNA, 672 bp, Homo sapiens
atcctggcgtttgcctgcagcaagatggcggcggtgtcaatgtcagtggtactgaggcagacgttgtggcggagaagggcagtggctgtagctgccctttccgtttccagggttccgaccaggtcgttgaggacttccacatggagattggcacaggaccagactcaagacacacaactcataacagttgatgaaaaattggatatcactactttaactggagttccagaagagcatataaaaactagaaaagtcaggatctttgttcctgctcgcaataacatgcagtctggagtaaacaacacaaagaaatggaagatggagtttgataccagagagcgatgggaaaatcctttgatgggttgggcatcaacggctgatcccttatccaacatggttctaaccttcagtactaaagaagatgcagtttcctttgcagaaaaaaatggatggagctatgacattgaagagaggaaggttccaaaacccaagtccaagtcttatggtgcaaacttttcttggaacaaaagaacaagagtatccacaaaataggttggcactgactatatctctgcttgactgtgaataaagtcagctgtgcagtatttatagtccatgtataataaatacatctcttaatctcctaataaattggacctttaaactacagat

SEQ ID NO: 5445 - protein, 175 aa, Homo sapiens; identical to SEQ ID NO: 632

SEQ ID NO: 5446 - DNA, 595 bp, Homo sapiens
tcctggcgtttgcctgcagcaagatggcggcggtgtcaatgtcagtggtactgaggcagacgttgtggcggagaagggcagtggctgtagctgccctttccgtttccagggttccgaccaggtcgttgaggacttccacatggagattggcacaggaccagactcaagacacacaactcataacagttgatgaaaaattggatatcactactttaactggagttccagaagagcatataaaaactagaaaagtcaggatctttgttcctgctcgcaataacatgcagtctggagtaaacaacacaaagaaatggaagatggagtttgataccagagagcgatgggaaaatcctttgatgggttgggcatcaacgatggagctatgacattgaagagaggaaggttccaaaacccaagtccaagtcttatggtgcaaacttttcttggaacaaaagaacaagagtatccacaaaataggttggcactgactatatctctgcttgactgtgaataaagtcagctgtgcagtatttatagtccatgtataataaatacatctcttaatctcctaataaattggacctttaaactacag

SEQ ID NO: 5447 - protein, 120 aa, Homo sapiens
MAAVSMSVVLRQTLWRRRAVAVAALSVSRVPTRSLRTSTWRLAQDQTQDTQLITVDEKLDITTLTGVPEEHIKTRKVRIFVPARNNMQSGVNNTKKWKMEFDTRERWENPLMGWASTMEL

SEQ ID NO: 5448 - DNA, 836 bp, Homo sapiens
gtttgcctgcagcaagatggcggcggtgtcaatgtcagtggtactgaggcagacgttgtggcggagaagggcagtggctgtagctgccctttccgtttccagggttccgaccaggtcgttgaggacttccacatggagattggcacaggaccagactcaagacacacaactcataacagttgatgaaaaattggtttatcttgtaccactgtgttttacattctgtggtctagccacaccaagcctggaacttgctactctttttcctgcttcaaggcatttggagttcctgttcactctacctggatgcattttaactaatcctgaggacttcatccggtcaccatctacctattcttcaaatggatatcactactttaactggagttccagaagagcatataaaaactagaaaagtcaggatctttgttcctgctcgcaataacatgcagtctggagtaaacaacacaaagaaatggaagatggagtttgataccagagagcgatgggaaaatcctttgatgggttgggcatcaacggctgatcccttatccaacatggttctaaccttcagtactaaagaagatgcagtttcctttgcagaaaaaaatggatggagctatgacattgaagagaggaaggttccaaaacccaagtccaagtcttatggtgcaaacttttcttggaacaaaagaacaagagtatccacaaaataggttggcactgactatatctctgcttgactgtgaataaagtcagctgtgcagtatttatagtccatgtataataaatacatctcttaatctcctaataaattggacctttaaactacagat

SEQ ID NO: 5449 - protein, 131 aa, Homo sapiens
MAAVSMSVVLRQTLWRRRAVAVAALSVSRVPTRSLRTSTWRLAQDQTQDTQLITVDEKLVYLVPLCFTFCGLATPSLELATLFPASRHLEFLFTLPGCILTNPEDFIRSPSTYSSNGYHYFNWSSRRAYKN

SEQ ID NO: 5450 - DNA, 557 bp, Homo sapiens
tcaatgtcagtggtactgaggcagacgttgtggcggagaagggcagtggctgtagctgccctttccgtttccagggttccgaccaggatatcactactttaactggagttccagaagagcatataaaaactagaaaagtcaggatctttgttcctgctcgcaataacatgcagtctggagtaaacaacacaaagaaatggaagatggagtttgataccagagagcgatgggaaaatcctttgatgggttgggcatcaacggctgatcccttatccaacatggttctaaccttcagtactaaagaagatgcagtttcctttgcagaaaaaaatggatggagctatgacattgaagagaggaaggttccaaaacccaagtccaagtcttatggtgcaaacttttcttggaacaaaagaacaagagtatccacaaaataggttggcactgactatatctctgcttgactgtgaataaagtcagctgtgcagtatttatagtccatgtataataaatacatctcttaatctcctaataaattggacctttaaactacagat

SEQ ID NO: 5451 - protein, 89 aa, Homo sapiens; identical to SEQ ID NO: 5441

SEQ ID NO: 5452 - DNA, 445 bp, Homo sapiens
ctgtttgaaacgtgtttttttttcttgtttttctgtaggatatcactactttaactggagttccagaagagcatataaaaactagaaaagtcaggatctttgttcctgctcgcaataacatgcagtctggagtaaacaacacaaagaaatggaagatggagtttgataccagagagcgatgggaaaatcctttgatgggttgggcatcaacggctgatcccttatccaacatggttctaaccttcagtactaaagaagatgcagtttcctttgcagaaaaaaatggtatgtttggtctgtttttgacaaagtcaagataatgattttatgttcttaaccttaattaaaaccaattaagtatacagaatttgagttggaatccagtggtttcattgtatctaatccagtggtttcagactttaactacatcagaacacccacctcc

SEQ ID NO: 5453 - protein, 66 aa, Homo sapiens
MQSGVNNTKKWKMEFDTRERWENPLMGWASTADPLSNMVLTFSTKEDAVSFAEKNGMFGLFLTKSR

SEQ ID NO: 5454 - DNA, 2046 bp, Homo sapiens
aactaatgaatgttttcctgtcaagttaatttggagtttatcctgagtttattaaggattagcatcctgaagtgtattgaaacaaaatgattatttcataatgtttgaattgcttccaaactgcatgttatttattctaaactctccctctgataggataccgagacctagagaagttaagaaaacaagccccagatcaatcacattgctcctgacagcacctaaccttctagattccaagtccaatggttttcctggtactatgatgctagtagatcttaaaaaataataatctagatctacactatccaatatggtagccactggccacatgtgattttagctcttgatatgtgtttaattcgaatttagatgtgccgtaagtgtaaaatgcacactgaatttcaaagacttagtatgaaaaaaaaaagtatctcaatttttattacatgaagtgataacctagaaacactggacgaagtaaaatattataaaaattaattttacatatttccttttatttaatgtggctactagaaacttatgtatggctcacatatttctactgaacagcactgatatatttggcaatatacagggtatacattatatatatatatatattctatgtaaatagttcattaaataattcctatagtaaatatgagaaacaggaaactcatatccaacttggaaaagttcaaatataatacttattaagaaatacagttctattcttcaggtactcttacctagaatgaattaaggatatgtagaaactcttatgttacttataaaataataaagagatactgtaggtctctacagagatactatagtgtccctatagtacctctagagtatagtatagagatactatagtatctctttactatatagatatatggaatagactatagagtatctctagactatatattatttatactctactatctatatagtatctctatatagagagataatatatatactccatatagtatactctagagatgctataagtttctgtagtatctttatagtagagataatagggagggataatagtatagggacgtactatatacctatagtatctctataagtacacaagttcccccattaatcatctgttttcagttgttaaccaaataaggtattatgcaggctcatctttttatataagaaagaaaagactgaatgctccctatgacttcattttctccctgttcccactaccatgtccccaaacatactgacacacaaagaaaatataaatacccctgattcttttagccttaaacttagggcctcatcctaaacatcttaagctcagcatctattccaaaggaactctttaatgataacgtttctttgtaaagagacgaatatcatctggggtttcctctgaaatgtagatgaacctcacttcagttctttgtgtactaaaaagacccacccttctcacccatgtggcttttgtctttccttgtgttatgtaataagtgatggggtagaaggatggggggtggaggaagctacatcatggagagaggaggtagaagacagctgtggaaaatttggatggtggaagactagaatctactaccatttacatgctaatgaaaaccagaaatggtcttttttcccccgtttgatctgatttgaaagtttgtgacttttgtctagtatgtcattttaccccctgtgtttttctcattgttgttagctataaaaactctttgaaattctcaaaataaaggaaggtttctttcaggaataggagggctgaggacaagctgtgaaactgcattcttcatagtgggtctattggggtggaaaacccgcctctgaagtaatagaaggtagaagcacggaaggaaacaggtctggccctggatccaggaaaataaagaaagaaataattggagatgtagcttagtacttagaattatcccagaagtgaacaacatcagtaaggtctgggcttccacctaacgtaacctcttatgagggtctcaacctcacatccatatatctttt

SEQ ID NO: 5455 - protein, 62 aa, Homo sapiens
MFELLPNCMLFILNSPSDRIPRPREVKKTSPRSITLLLTAPNLLDSKSNGFPGTMMLVDLKK

SEQ ID NO: 5456 - DNA, 1028 bp, Homo sapiens
gccacctcctggtggtaagtctcgctcctggagttcccatcttgaccctacagcgggacattttgccgccacctctttgtgtgttgggaagatgacgtcctttctgctcgtcctgcttctctgattgatctgtgtctctggagatccctttgctcagccatcagatcaagcaggcatccatggttcagaatgcaggtgatgacctgggcaagagctcaccagtaaggagcaaaggggcccgcctgccactcttaagcagagcgcctgctgaatcaggatttccaaggctccggctgagtgcctggctgggggctgtgtgtgcagatgccacaagatggacaagactgaggacgcagatgaggaaactgaagcaactgttcaagaagaggatataaaaagggacaggcattgatgatgatatcagagcttcttcctggggaatctcagcctcacatgatggagtatgactaaaggaaaaaaataaggctcttcacatactttcttggcagtctgtgagggtcagggttgattttgtgtccctaaaatgtcacatgaagttcataggcacttccaaaggggcagtctagcaagttaaagagtagatgtggggctgtgtggagtccattgtttgggtaatctttttcaaacagtaggaatataccagcttgtaaagatttgcccacttagcttcaagtctctctgaacacatttccccccgctctatgaatagatgaagacatacaaatggaactcttgatattcttaagtgaaaaacatgatatggaatagcagataaatacaaacaatttcttatccagcaaagagctccagaaatattttgacttcatttaaaacagttatataaatatttgctggtggaatttttttctaaaccaaataccctgaaggattttagttgtctatctacaactttttgcttgtggaaaatgttgacttcctggttactttgacttgtgttcacctgaaattttgcttttgcagtagtttttcttatgatttagtggcat

SEQ ID NO: 5457 - protein, 71 aa, Homo sapiens
MVQNAGDDLGKSSPVRSKGARLPLLSRAPAESGFPRLRLSAWLGAVCADATRWTRLRTQMRKLKQLFKKRI

SEQ ID NO: 5458 - DNA, 793 bp, Homo sapiens
tcctggtggtaagtctcgctcctggagttcccatcttgaccctacagcgggacattttgccgccacctctttgtgtgttgggaagatgacgtcctttctgctcgtcctgcttctctgattgggacagtctggtttgaaagggaggaggagaaataagagaaagctccgtggtaatatacaagacgaaaggaaaagaaagacaagtaaaaggaatgatctgcaaccacctggatattggagcacaattgtgagaacaactggatctgtgtctctggagatccctttgctcagccatcagatcaagcaggcatccatggttcagaatgcaggtgatgacctgggcaagagctcaccagtaaggagcaaaggggcccgcctgccactcttaagcagagcgcctgctgaatcaggatttccaaggctccggctgagtgcctggctgggggctgtgtgtgcagatgccacaagatggacaagactgaggacgcagatttcctacaacagcagacttctgatgcccaggcctcagttctgaactctggaggctacaacctggcctgcttatagacggtggaccaaatgaaggtgaagaggagacggatgaggaaactgaagcaactgttcaagaagaggatataaaaagggacaggcattgatgatgatatcagagcttcttcctggggaatctcagcctcacatgatggagtatgactaaaggaaaaaaataaggctcttcacatactttcttggcagtctgtgagggtcagggttgattttgtgtccctaaaatgtc

SEQ ID NO: 5459 - protein, 73 aa, Homo sapiens
MVQNAGDDLGKSSPVRSKGARLPLLSRAPAESGFPRLRLSAWLGAVCADATRWTRLRTQISYNSRLLMPRPQF

SEQ ID NO: 5460 - DNA, 1424 bp, Homo sapiens
ccaggtttataatccagtccaactccttatccccactgctccagctagacatagaccaacgtgggtacagccattccaccacacttttaaaaaacgatcttctgctaactactagataatggtgaattccctttttccttccttctttttcaaaaatctcttccttttatctgatgatctcaaagaatcctacataaatgtttcagcctagttttcttctagcagcaacatttcaaccatggaggtgagttggcaatgtagtccccagagatgctaacctggctcaggcccaagggaacaaatcaaaatgaggcttgaataagcaccaggttccccagactctctcattttcctgtttcttcatggaatatagggaggcggagggagctggttatttcaaaaagcctaagatcacttccatcacaggcaaacccctcctgaaagtgtgaaatccagcctacaatggactttcaccgacaagtgattcattgagacaaaggctagagttccagcatcaaacagatgtcagacaaagcaccaaacgcctataaatgattgctttgcaagcaagggaatgactggaagacctggcctaatgatgtaccccatgtctggacaagcttacagaagatggtggtggagggagctgctggttttaaacagagtctgtgaagaaagctgtttctggagagagaagtaagaccacaattcttacctgagaggttcatgttgaaatgaatgatttctggccagtttgcgtataatctgtgtaaaggtaaatcagaaaaatgtgtgtccagggcaccttgaaggccagagtgatgtggtatgatattaaatcattagacatataaatattaaaaatgagaagattttgttagaatggaaacggctcaccaaaaggcagagacaagaatgcaaacagtaagtctagctgtcattctctgtaatctggagcaagtcaggtttgtctctggaccttctccagttgttttacaactttctagacatgcagtgtatcaacccaacacttttattaagcagctttgacagggtttttgagatgacagctagtcgagattcaacttagcattgtacagttttatttcacaattggaactttcggttttaatacttttaggactttattcattaatgcaacactttttgttgaacacctactatgtaccagggattgatatagctgtaaatatgacatacttagtctctgtctttgtagtactttaattcctgtaacacttgttaaattggattatttttatgaccgtagagaattagagggggtgagggattttattatattaaaattgcaatttcagtctctagattttaaaaaatttgttcttggtcctaatttctgttttttagccctcctaatttagaattgtttttgggtgctgttt

SEQ ID NO: 5461 - protein, 41 aa, Homo sapiens
MTGRPGLMMYPMSGQAYRRWWWRELLVLNRVCEESCFWREK

SEQ ID NO: 5462 - DNA, 370 bp, Homo sapiens
atccaggaatagtaagctggctttgtgtgccactaagctctatattttgtattacctatatggaagccataagatgcatccgtaggagaccctctgctgcaactaaaatcactcattctgggggcagccctctggcatgtaatgagcagtcctatggagaggcccatgtgacagtagccatgcgagtgacactggaagtgaaacctgcagctccagtcaagcctttagaagactgcagccctggctgacagcttgacagcaaactcatgagagactctcagcttgaacaactcagctaaactgttcctgggttcctggtcctcaaaaactgtacgagatgaaaaaaaagtttgtttttttaagctgccaa

SEQ ID NO: 5463 - protein, 62 aa, Homo sapiens [sequence omitted]

SEQ ID NO: 5464 - DNA, 657 bp, Homo sapiens
cccaacttggctgctttgtaagaagtggacttctgcctcctcagcctaacctgaagaatagaaccagcttctttcgtggcaattttcccccaggagggatttccctgcagtggacctcctccccagtggtaccttcagccatcagaacacctcgctttagatctgtgggtcccaaatttcatcaaatccaatgaccatttctatgtccttagtaattggtggcaacctggtggagagggaagaccacaggctgtggagttggacctgggtttgaagattggctttgcatgcctagcaggatgtaagcttggcccactgacttcacttctgagccttgttctccatgtctgtcaagtgcaggggaaggatcactcattctgggggcagccctctggcatgtaatgagcagtcctatggagaggcccatgtgacagtagccatgcgagtgacactggaagtgaaacctgcagctccagtcaagcctttagaagactgcagccctggctgacagcttgacagcaaactcatgagagactctcagcttgaacaactcagctaaactgttcctgggttcctggtcctcaaaaactctggaattctgtgaagcacatgacctcaagtctttggataaatggaaacgcagcttatgccggaaag

SEQ ID NO: 5465 - protein, 54 aa, Homo sapiens
MSVKCRGRITHSGGSPLACNEQSYGEAHVTVAMRVTLEVKPAAPVKPLEDCSPG

SEQ ID NO: 5466 - DNA, 769 bp, Homo sapiens
gcattccgtgctatgattcaggcctaattaagtgattgcgtctgggcacggctataaaccactagctgcttcaactggtaatccagtcagtaggcaactgcaggggctcgccactgactgaaggcagtggaaggttggcagaaggaggctgttcaaggctgtttttgccttcactatggcaaaaatcattttgaggcacctcatagagattccagtgcgttaccaggaagagtttgaagctcgaggtctagaagactgcaggctggatcatgctttatatgcactgcctgggccaaccatcgtggacctgaggaaaaccagggcagcgcagtctcctccagtggactcagcggcagagacgccaccccgagaaggcaaatcccactttcagatcctgctggacgtggtccagttcctccctgaagacatcatcattcagaccttcgaaggctggctgctgataaaagcacaacacggaaccagaatggatgagcacggttttatctcaagaagcttcacccgacagtacaaactaccagatggtgtggaaatcaaagatttgtctgcagtcctctgtcatgatggaattttggtggtggaagtaaaggatccagttgggactaagtgacatcgtatcggttcctgttcagatgacatggggaagatgatggttcagccactggtactacgagaatgtttgtattacccacatttgaaatgatttgctatgatttttatgaagattaaaaatatatacacagttcctggt

SEQ ID NO: 5467 - protein, 150 aa, Homo sapiens; identical to SEQ ID NO: 634

SEQ ID NO: 5468 - DNA, 506 bp, Homo sapiens
aggctgttcaaggctgtttttgccttcactatggcaaaaatcattttgaggcaccagggcagcgcagtctcctccagtggactcagcggcagagacgccaccccgagaaggcaaatcccactttcagatcctgctggacgtggtccagttcctccctgaagacatcatcattcagaccttcgaaggctggctgctgataaaagcacaacacggaaccagaatggatgagcacggttttatctcaagaagcttcacccgacagtacaaactaccagatggtgtggaaatcaaagatttgtctgcagtcctctgtcatgatggaattttggtggtggaagtaaaggatccagttgggactaagtgacatcgtatcggttcctgttcagatgacatggggaagatgatggttcagccactggtactacgagaatgtttgtattacccacatttgaaatgatttgctatgatttttatgaagattaaaaatatatacacagttcctggta

SEQ ID NO: 5469 - protein, 42 aa, Homo sapiens
MAKIILRHQGSAVSSSGLSGRDATPRRQIPLSDPAGRGPVPP

SEQ ID NO: 5470 - DNA, 740 bp, Homo sapiens
aacacgagcaccagacctgactgggtggttgagggagctcctggtgaaatgtgctgaggcttctgctgaggtttctacctcagctccacggcctggccagttcaatggattgaagaaaatgttcacggaaggaagatgattaattgatccagagggcctgtagcaactctgtttaacatgctagatgagccagtcttattcagtgatgactaaggatctagagaaaactggtgtcaggttggtcttcttcttcccacctattttcagttggcctgcagttcctaggatgtgtatcctgtatgctggtcaccggaagataggcaaatttttgctttgttgctggttctgggacaacagccatgatgacttcttggcagtcatttgcagactaaggtagctttgaaggtgaagattctttgtgttcattctcatcctgatgtaaaaatactacctgagactggataatttataaacaaaagaggtttaattgattcacagttcctcatgcctggggaggcctcaggaaacttacaatcacagcggaaggcaaaagggaagaaggcaccttcttcacaaggtggcaggagagacagtgaggaagtgccatactttaaaaccatcagctctcatgagacttcactcatgatcacgagaacagcatggggaaccttctcccatgattcaatcacctcccaccagctccctcctcgacatgtggggattacaatttgagatgagat

SEQ ID NO: 5471 - protein, 70 aa, Homo sapiens
MSQSYSVMTKDLEKTGVRLVFFFPPIFSWPAVPRMCILYAGHRKIGKFLLCCWFWDNSHDDFLAVICRLR

SEQ ID NO: 5472 - DNA, 7419 bp, Homo sapiens
ttctcactgccctgcggtgttttgaactgccttcttacagacgtcatacagcccttgaggaatagtttctgcctggtgagattgaatgatagttctcattcacaaaaccctggattctaagcagggacacacagaaattactttcgcaggtaaatcagcccacccagccaaagtgtggagagatttgttccttggctgacttctttgctccacggagaggagtgttttcctgtgcttgccctgaaatggaacttccttgacagctctcccgtgttacagtacctcccggtcattttctttttctctctctctacctgcgctcttcgagtgtcagaaacctttaaagctgttactatggaattgcaaaaaagagatcaagtgactctttcactatgctggtttcccttgtgacccagatgaagaatcaattcagaattcagttcctcccttggcattgcaagacacagaagaaactgtcacttcctaacagcctagtactggagtaaattcagtatgaaggaagaaagcgctcctgcgtgttagaaccttgcccatgagctggaccgaggacaggagatggactccaggaaaattggatttcttcaagcagcctcccttggaaatggaatatctttaaaatcttctttgcagaaagacagttagaatgtattaatcagaatagttgaagacttattttcctttttattttttttcaaaatgagcattattatgaagccaagatcccgatctacaagttccctaaggactgcagaggcagtttgttttgatgtggacaatggcacatctgcgggacggagtcccttggatcccatgaccagcccaggatccgggctaattctccaagcaaattttgtccacagtcaacgacgggagtccttcctgtatcgatccgacagcgattatgacctctctccaaagtctatgtcccggaactcctccattgccagtgatatacacggagatgacttgattgtgactccatttgctcaggtcttggccagtctgcgaactgtacgaaacaactttgctgcattaactaatttgcaagatcgagcacctagcaaaagatcacccatgtgcaaccaaccatccatcaacaaagccaccataacagaggaggcctaccagaaactggccagcgagaccctggaggagctggactggtgtctggaccagctagagaccctacagaccaggcactccgtcagtgagatggcctccaacaagtttaaaaggatgcttaatcgggagctcacccatctctctgaaatgagtcggtctggaaatcaagtgtcagagtttatatcaaacacattcttagataagcaacatgaagtggaaattccttctccaactcagaaggaaaaggagaaaaagaaaagaccaatgtctcagatcagtggagtcaagaaattgatgcacagctctagtctgactaattcaagtatcccaaggtttggagttaaaactgaacaagaagatgtccttgccaaggaactagaagatgtgaacaaatggggtcttcatgttttcagaatagcagagttgtctggtaaccggcccttgactgttatcatgcacaccatttttcaggaacgggatttattaaaaacatttaaaattccagtagatactttaattacatatcttatgactctcgaagaccattaccatgctgatgtggcctatcacaacaatatccatgctgcagatgttgtccagtctactcatgtgctattatctacacctgctttggaggctgtgtttacagatttggagattcttgcagcaatttttgccagtgcaatacatgatgtagatcatcctggtgtgtccaatcaatttctgatcaatacaaactctgaacttgccttgatgtacaatgattcctcagtcttagagaaccatcatttggctgtgggctttaaattgcttcaggaagaaaactgtgacattttccagaatttgaccaaaaaacaaagacaatctttaaggaaaatggtcattgacatcgtacttgcaacagatatgtcaaaacacatgaatctactggctgatttgaagactatggttgaaactaagaaagtgacaagctctggagttcttcttcttgataattattccgataggattcaggttcttcagaatatggtgcactgtgcagatctgagcaacccaacaaagcctctccagctgtaccgccagtggacggaccggataatggaggagttcttccgccaaggagaccgagagagggaacgtggcatggagataagccccatgtgtgacaagcacaatgcttccgtggaaaaatcacaggtgggcttcatagactatattgttcatcccctctgggagacatgggcagacctcgtccaccctgacgcccaggatattttggacactttggaggacaatcgtgaatggtaccagagcacaatccctcagagcccctctcctgcacctgatgacccagaggagggccggcagggtcaaactgagaaattccagtttgaactaactttagaggaagatggtgagtcagacacggaaaaggacagtggcagtcaagtggaagaagacactagctgcagtgactccaagactctttgtactcaagactcagagtctactgaaattccccttgatgaacaggttgaagaggaggcagtaggggaagaagaggaaagccagcctgaagcctgtgtcatagatgatcgttctcctgacacgtaacagtgcaaaaactttcatgccttttttttttttaagtagaaaaattgtttccaaagtgcatgtcacatgccacaaccacggtcacacctcactgtcatctgccaggacgtttgttgaacaaaactgaccttgactactcagtccagcgctcaggaatatcgtaaccagttttttcacctccatgtcatccgagcaaggtggacatcttcacgaacagcgtttttaacaagatttcagcttggtagagctgacaaagcagataaaatctactccaaattattttcaagagagtgtgactcatcaggcagcccaaaagtttattggacttggggtttctattcctttttatttgtttgcaatattttcagaagaaaggcattgcacagagtgaacttaatggacgaagcaacaaatatgtcaagaacaggacatagcacgaatctgttaccagtaggaggaggatgagccacagaaattgcataattttctaatttcaagtcttcctgatacatgactgaatagtgtggttcagtgagctgcactgacctctacattttgtatgatatgtaaaacagattttttgtagagcttacttttattattaaatgtattgaggtattatatttaaaaaaaactatgttcagaacttcatctgccactggttatttttttctaaggagtaacttgcaagttttcagtacaaatctgtgctacactggataaaaatctaatttatgaattttacttgcaccttatagttcatagcaattaactgatttgtagtgattcattgtttgttttatataccaatgacttccatattttaaaagagaaaaacaactttatgttgcaggaaaccctttttgtaagtctttattatttactttgcattttgtttcactctttccagataagcagagttgctcttcaccagtgtttttcttcatgtgcaaagtgactatttgttctataatacttttatgtgtgttatatcaaatgtgtcttaagcttcatgcaaactcagtcatcagttcgtgttgtctgaagcaagtgggagatatataaatacccagtagctaaaatggtcagtcttttttagatgttttcctacttagtatctcctaataacgttttgctgtgtcactagatgttcatttcacaagtgcatgtctttctaataatccacacatttcatgctctaataatccacacatttcatgctcatttttattgtttttacagccagttatagtaagaaaaaggtttttccccttgtgctgctttataatttagcgtgtgtctgaaccttatccatgtttgctagatgaggtcttgtcaaatatatcactaccattgtcaccggtgaaaagaaacaggtagttaagttagggttaacattcatttcaaccacgaggttgtatatcatgactagcttttactcttggtttacagagaaaagttaaacagccaactaggcagtttttaagaatattaacaatatattaacaaacaccaatacaactaatcctatttggttttaatgatttcaccatgggattaagaactatatcaggaacatccctgagaaacggttttaagtgtagcaactactcttccttaatggacagccacataacgtgtaggaagtcctttatcacttatcctcgatccataagcatatcttgcagaggggaactacttctttaaacacatggagggaaagaagatgatgccactggcaccagagggttagtactgtgatgcatcctaaaatatttattatattggtaaaaattctggttaaataaaaaattagagatcactcttggctgatttcagcaccaggaactgtattacagttttagagattaattcctagtgtttacctgattatagcagttggcatcatggggcatttaattctgactttatccccacgtcagccttaataaagtcttctttaccttctctatgaagactttaaagcccaaataatcatttttcacattgatattcaagaattgagatagatagaagccaaagtgggtatctgacaagtggaaaatcaaacgtttaagaagaattacaactctgaaaagcatttatatgtggaacttctcaaggagcctcctggggactggaaagtaagtcatcagccaggcaaatgactcatgctgaagagagtccccatttcagtcccctgagatctagctgatgcttagatcctttgaaataaaaattatgtctttataactctgatcttttacataaagcagaagaggaatcaactagttaattgcaaggtttctactctgtttcctctgtaaagatcagatggtaatctttcaaataagaaaaaaataaagacgtatgtttgaccaagtagtttcacaagaatatttgggaacttgtttcttttaattttatttgtccctgagtgaagtctagaaagaaaggtaaagagtctagagtttattcctctttccaaaacattctcattcctctcctccctacacttagtatttcccccacagagtgcctagaatcttaataatgaataaaataaaaagcagcaatatgtcattaacaaatccagacctgaaagggtaaagggtttataactgcactaataaagagaggctctttttttttcttccagtttgttggtttttaatggtaccgtgttgtaaagatacccactaatggacaatcaaattgcagaaaaggctcaatatccaagagacagggactaatgcactgtacaatctgcttatccttgcccttctctcttgccaaagtgtgcttcagaaatatatactgctttaaaaaagaataaaagaatatccttttacaagtggctttacatttcctaaaatgccataagaaaatgcaatatctgggtactgtatggggaaaaaaatgtccaagtttgtgtaaaaccagtgcatttcagcttgcaagttactgaacacaataatgctgttttaattttgttttatatcagttaaaattcacaataatgtagatagaacaaattacagacaaggaaagaaaaaacttgaatgaaatggattttacagaaagctttatgataatttttgaatgcattatttattttttgtgccatgcattttttttctcaccaaatgaccttacctgtaatacagtcttgtttgtctgtttacaaccatgtatttattgcaatgtacatactgtaatgttaattgtaaattatctgttcttattaaaacatcatcccatgatgggatggtgttgatatatttggaaactcttggtgagagaatgaatggtgtgtatacatactctgtacatttttcttttctcctgtaatatagtcttgtcaccttagagcttgtttatggaagattcaagaaaactataaaatacttaaagatatataaatttaaaaaaacatagctgcaggtctttggtcccagggctgtgccttaactttaaccaatattttcttctgttttgctgcatttgaaaggtaacagtggagctagggctgggcattttacatccaggcttttaattgattagaattctgccaataggtggattttacaaaaccacagacaacctctgaaagattctgagacccttttgagacagaagctcttaagtacttcttgccagggagcagcactgcatgtgtgatggttgtttgccatctgttgatcaggaactacttcagctacttgcatttgattatttcctttttttttttttttaactcggaaacacaactggggaaatatattctttcccagtgattataaacaatctttttcttttttttaagtccttttggcttctagagctcataggaaaatggacttgatttgaaattggagccagagtttactcgtgttggttatctattcatcagcttcctgacatgttaagagaatacattaaagagaaaatactgttttttaatcctaaaatttttcttccactaagataaaccaaatgtccttacatatatgtaaacccatctatttaaacgcaaaggtgggttgatgtcagtttacatagcagaaagcattcactatcctctaagatttgtttctgcaaaactttcattgctttagaattttaaaatttcaccttgtacaatggccagcccctaaagcaggaaacatttataatggattatatggaaacatcctcccagtacttgcccagcccttgaatcatgtggcttttcagtgaaaggaaagattctttttctaggaaaaatgagcctattttattttattttattttattttttgacacaaactgtagattttagcagccctggcccaaaggaatttgattacttttgttttaaacagtacaaaggggacactataattacaaaaacatccttaactgatttgagttgtttttatttctttggatatattttcagagtggtaaattgtgtgtgagaattacaaatgattattcttttagtggtttcttagcctctcttacagcccacggggatagtactgtacatcaataccttcatatgaaatttttatatgcaatgaaaataaaagcatgggttgattctgcctatttatgactcaatcttttacaaataaaagattattcattttaaattatagttcaatcagcatgtctctt

SEQ ID NO: 5473 - protein, 679 aa, Homo sapiens
MSIIMKPRSRSTSSLRTAEAVCFDVDNGTSAGRSPLDPMTSPGSGLILQANFVHSQRRESFLYRSDSDYDLSPKSMSRNSSIASDIHGDDLIVTPFAQVLASLRTVRNNFAALTNLQDRAPSKRSPMCNQPSINKATITEEAYQKLASETLEELDWCLDQLETLQTRHSVSEMASNKFKRMLNRELTHLSEMSRSGNQVSEFISNTFLDKQHEVEIPSPTQKEKEKKKRPMSQISGVKKLMHSSSLTNSSIPRFGVKTEQEDVLAKELEDVNKWGLHVFRIAELSGNRPLTVIMHTIFQERDLLKTFKIPVDTLITYLMTLEDHYHADVAYHNNIHAADVVQSTHVLLSTPALEAVFTDLEILAAIFASAIHDVDHPGVSNQFLINTNSELALMYNDSSVLENHHLAVGFKLLQEENCDIFQNLTKKQRQSLRKMVIDIVLATDMSKHMNLLADLKTMVETKKVTSSGVLLLDNYSDRIQVLQNMVHCADLSNPTKPLQLYRQWTDRIMEEFFRQGDRERERGMEISPMCDKHNASVEKSQVGFIDYIVHPLWETWADLVHPDAQDILDTLEDNREWYQSTIPQSPSPAPDDPEEGRQGQTEKFQFELTLEEDGESDTEKDSGSQVEEDTSCSDSKTLCTQDSESTEIPLDEQVEEEAVGEEEESQPEACVIDDRSPDT

SEQ ID NO: 5474 - DNA, 6855 bp, Homo sapiens
actgcacaaaggaaatgccctcactcagctacaagtgcctcctgctccgtgcggggcctcagggccccagagccccgcaccagctctgacttctcgtggttcctggggatcttggcatcgtccttaaaaatggcttttgtttgggatcctctgggagccacggtgccaggaccatctacaagagccaaatcaagattgcgtttctcaaagtcctacagttttgatgtggacaatggcacatctgcgggacggagtcccttggatcccatgaccagcccaggatccgggctaattctccaagcaaattttgtccacagtcaacgacgggagtccttcctgtatcgatccgacagcgattatgacctctctccaaagtctatgtcccggaactcctccattgccagtgatatacacggagatgacttgattgtgactccatttgctcaggtcttggccagtctgcgaactgtacgaaacaactttgctgcattaactaatttgcaagatcgagcacctagcaaaagatcacccatgtgcaaccaaccatccatcaacaaagccaccataacagaggaggcctaccagaaactggccagcgagaccctggaggagctggactggtgtctggaccagctagagaccctacagaccaggcactccgtcagtgagatggcctccaacaagtttaaaaggatgcttaatcgggagctcacccatctctctgaaatgagtcggtctggaaatcaagtgtcagagtttatatcaaacacattcttagataagcaacatgaagtggaaattccttctccaactcagaaggaaaaggagaaaaagaaaagaccaatgtctcagatcagtggagtcaagaaattgatgcacagctctagtctgactaattcaagtatcccaaggtttggagttaaaactgaacaagaagatgtccttgccaaggaactagaagatgtgaacaaatggggtcttcatgttttcagaatagcagagttgtctggtaaccggcccttgactgttatcatgcacaccatttttcaggaacgggatttattaaaaacatttaaaattccagtagatactttaattacatatcttatgactctcgaagaccattaccatgctgatgtggcctatcacaacaatatccatgctgcagatgttgtccagtctactcatgtgctattatctacacctgctttggaggctgtgtttacagatttggagattcttgcagcaatttttgccagtgcaatacatgatgtagatcatcctggtgtgtccaatcaatttctgatcaatacaaactctgaacttgccttgatgtacaatgattcctcagtcttagagaaccatcatttggctgtgggctttaaattgcttcaggaagaaaactgtgacattttccagaatttgaccaaaaaacaaagacaatctttaaggaaaatggtcattgacatcgtacttgcaacagatatgtcaaaacacatgaatctactggctgatttgaagactatggttgaaactaagaaagtgacaagctctggagttcttcttcttgataattattccgataggattcaggttcttcagaatatggtgcactgtgcagatctgagcaacccaacaaagcctctccagctgtaccgccagtggacggaccggataatggaggagttcttccgccaaggagaccgagagagggaacgtggcatggagataagccccatgtgtgacaagcacaatgcttccgtggaaaaatcacaggtgggcttcatagactatattgttcatcccctctgggagacatgggcagacctcgtccaccctgacgcccaggatattttggacactttggaggacaatcgtgaatggtaccagagcacaatccctcagagcccctctcctgcacctgatgacccagaggagggccggcagggtcaaactgagaaattccagtttgaactaactttagaggaagatggtgagtcagacacggaaaaggacagtggcagtcaagtggaagaagacactagctgcagtgactccaagactctttgtactcaagactcagagtctactgaaattccccttgatgaacaggttgaagaggaggcagtaggggaagaagaggaaagccagcctgaagcctgtgtcatagatgatcgttctcctgacacgtaacagtgcaaaaactttcatgccttttttttttttaagtagaaaaattgtttccaaagtgcatgtcacatgccacaaccacggtcacacctcactgtcatctgccaggacgtttgttgaacaaaactgaccttgactactcagtccagcgctcaggaatatcgtaaccagttttttcacctccatgtcatccgagcaaggtggacatcttcacgaacagcgtttttaacaagatttcagcttggtagagctgacaaagcagataaaatctactccaaattattttcaagagagtgtgactcatcaggcagcccaaaagtttattggacttggggtttctattcctttttatttgtttgcaatattttcagaagaaaggcattgcacagagtgaacttaatggacgaagcaacaaatatgtcaagaacaggacatagcacgaatctgttaccagtaggaggaggatgagccacagaaattgcataattttctaatttcaagtcttcctgatacatgactgaatagtgtggttcagtgagctgcactgacctctacattttgtatgatatgtaaaacagattttttgtagagcttacttttattattaaatgtattgaggtattatatttaaaaaaaactatgttcagaacttcatctgccactggttatttttttctaaggagtaacttgcaagttttcagtacaaatctgtgctacactggataaaaatctaatttatgaattttacttgcaccttatagttcatagcaattaactgatttgtagtgattcattgtttgttttatataccaatgacttccatattttaaaagagaaaaacaactttatgttgcaggaaaccctttttgtaagtctttattatttactttgcattttgtttcactctttccagataagcagagttgctcttcaccagtgtttttcttcatgtgcaaagtgactatttgttctataatacttttatgtgtgttatatcaaatgtgtcttaagcttcatgcaaactcagtcatcagttcgtgttgtctgaagcaagtgggagatatataaatacccagtagctaaaatggtcagtcttttttagatgttttcctacttagtatctcctaataacgttttgctgtgtcactagatgttcatttcacaagtgcatgtctttctaataatccacacatttcatgctctaataatccacacatttcatgctcatttttattgtttttacagccagttatagtaagaaaaaggtttttccccttgtgctgctttataatttagcgtgtgtctgaaccttatccatgtttgctagatgaggtcttgtcaaatatatcactaccattgtcaccggtgaaaagaaacaggtagttaagttagggttaacattcatttcaaccacgaggttgtatatcatgactagcttttactcttggtttacagagaaaagttaaacagccaactaggcagtttttaagaatattaacaatatattaacaaacaccaatacaactaatcctatttggttttaatgatttcaccatgggattaagaactatatcaggaacatccctgagaaacggttttaagtgtagcaactactcttccttaatggacagccacataacgtgtaggaagtcctttatcacttatcctcgatccataagcatatcttgcagaggggaactacttctttaaacacatggagggaaagaagatgatgccactggcaccagagggttagtactgtgatgcatcctaaaatatttattatattggtaaaaattctggttaaataaaaaattagagatcactcttggctgatttcagcaccaggaactgtattacagttttagagattaattcctagtgtttacctgattatagcagttggcatcatggggcatttaattctgactttatccccacgtcagccttaataaagtcttctttaccttctctatgaagactttaaagcccaaataatcatttttcacattgatattcaagaattgagatagatagaagccaaagtgggtatctgacaagtggaaaatcaaacgtttaagaagaattacaactctgaaaagcatttatatgtggaacttctcaaggagcctcctggggactggaaagtaagtcatcagccaggcaaatgactcatgctgaagagagtccccatttcagtcccctgagatctagctgatgcttagatcctttgaaataaaaattatgtctttataactctgatcttttacataaagcagaagaggaatcaactagttaattgcaaggtttctactctgtttcctctgtaaagatcagatggtaatctttcaaataagaaaaaaataaagacgtatgtttgaccaagtagtttcacaagaatatttgggaacttgtttcttttaattttatttgtccctgagtgaagtctagaaagaaaggtaaagagtctagagtttattcctctttccaaaacattctcattcctctcctccctacacttagtatttcccccacagagtgcctagaatcttaataatgaataaaataaaaagcagcaatatgtcattaacaaatccagacctgaaagggtaaagggtttataactgcactaataaagagaggctctttttttttcttccagtttgttggtttttaatggtaccgtgttgtaaagatacccactaatggacaatcaaattgcagaaaaggctcaatatccaagagacagggactaatgcactgtacaatctgcttatccttgcccttctctcttgccaaagtgtgcttcagaaatatatactgctttaaaaaagaataaaagaatatccttttacaagtggctttacatttcctaaaatgccataagaaaatgcaatatctgggtactgtatggggaaaaaaatgtccaagtttgtgtaaaaccagtgcatttcagcttgcaagttactgaacacaataatgctgttttaattttgttttatatcagttaaaattcacaataatgtagatagaacaaattacagacaaggaaagaaaaaacttgaatgaaatggattttacagaaagctttatgataatttttgaatgcattatttattttttgtgccatgcattttttttctcaccaaatgaccttacctgtaatacagtcttgtttgtctgtttacaaccatgtatttattgcaatgtacatactgtaatgttaattgtaaattatctgttcttattaaaacatcatcccatgatgggatggtgttgatatatttggaaactcttggtgagagaatgaatggtgtgtatacatactctgtacatttttcttttctcctgtaatatagtcttgtcaccttagagcttgtttatggaagattcaagaaaactataaaatacttaaagatatataaatttaaaaaaacatagctgcaggtctttggtcccagggctgtgccttaactttaaccaatattttcttctgttttgctgcatttgaaaggtaacagtggagctagggctgggcattttacatccaggcttttaattgattagaattctgccaataggtggattttacaaaaccacagacaacctctgaaagattctgagacccttttgagacagaagctcttaagtacttcttgccagggagcagcactgcatgtgtgatggttgtttgccatctgttgatcaggaactacttcagctacttgcatttgattatttcctttttttttttttttaactcggaaacacaactggggaaatatattctttcccagtgattataaacaatctttttcttttttttaagtccttttggcttctagagctcataggaaaatggacttgatttgaaattggagccagagtttactcgtgttggttatctattcatcagcttcctgacatgttaagagaatacattaaagagaaaatactgttttttaatcctaaaatttttcttccactaagataaaccaaatgtccttacatatatgtaaacccatctatttaaacgcaaaggtgggttgatgtcagtttacatagcagaaagcattcactatcctctaagatttgtttctgcaaaactttcattgctttagaattttaaaatttcaccttgtacaatggccagcccctaaagcaggaaacatttataatggattatatggaaacatcctcccagtacttgcccagcccttgaatcatgtggcttttcagtgaaaggaaagattctttttctaggaaaaatgagcctattttattttattttattttattttttgacacaaactgtagattttagcagccctggcccaaaggaatttgattacttttgttttaaacagtacaaaggggacactataattacaaaaacatccttaactgatttgagttgtttttatttctttggatatattttcagagtggtaaattgtgtgtgagaattacaaatgattattcttttagtggtttcttagcctctcttacagcccacggggatagtactgtacatcaataccttcatatgaaatttttatatgcaatgaaaataaaagcatgggttgattctgcctatttatgactcaatcttttacaaataaaagattattcattttaaattatagttcaatcagcatgtctctt

SEQ ID NO: 5475 - protein, 687 aa, Homo sapiens
MAFVWDPLGATVPGPSTRAKSRLRFSKSYSFDVDNGTSAGRSPLDPMTSPGSGLILQANFVHSQRRESFLYRSDSDYDLSPKSMSRNSSIASDIHGDDLIVTPFAQVLASLRTVRNNFAALTNLQDRAPSKRSPMCNQPSINKATITEEAYQKLASETLEELDWCLDQLETLQTRHSVSEMASNKFKRMLNRELTHLSEMSRSGNQVSEFISNTFLDKQHEVEIPSPTQKEKEKKKRPMSQISGVKKLMHSSSLTNSSIPRFGVKTEQEDVLAKELEDVNKWGLHVFRIAELSGNRPLTVIMHTIFQERDLLKTFKIPVDTLITYLMTLEDHYHADVAYHNNIHAADVVQSTHVLLSTPALEAVFTDLEILAAIFASAIHDVDHPGVSNQFLINTNSELALMYNDSSVLENHHLAVGFKLLQEENCDIFQNLTKKQRQSLRKMVIDIVLATDMSKHMNLLADLKTMVETKKVTSSGVLLLDNYSDRIQVLQNMVHCADLSNPTKPLQLYRQWTDRIMEEFFRQGDRERERGMEISPMCDKHNASVEKSQVGFIDYIVHPLWETWADLVHPDAQDILDTLEDNREWYQSTIPQSPSPAPDDPEEGRQGQTEKFQFELTLEEDGESDTEKDSGSQVEEDTSCSDSKTLCTQDSESTEIPLDEQVEEEAVGEEEESQPEACVIDDRSPDT

SEQ ID NO: 5476 - DNA, 6349 bp, Homo sapiens
gacagaagatctgcgaacatgatgcacgtgaataattttccctttagaaggcattcctggatatgaggaggcctaccagaaactggccagcgagaccctggaggagctggactggtgtctggaccagctagagaccctacagaccaggcactccgtcagtgagatggcctccaacaagtttaaaaggatgcttaatcgggagctcacccatctctctgaaatgagtcggtctggaaatcaagtgtcagagtttatatcaaacacattcttagataagcaacatgaagtggaaattccttctccaactcagaaggaaaaggagaaaaagaaaagaccaatgtctcagatcagtggagtcaagaaattgatgcacagctctagtctgactaattcaagtatcccaaggtttggagttaaaactgaacaagaagatgtccttgccaaggaactagaagatgtgaacaaatggggtcttcatgttttcagaatagcagagttgtctggtaaccggcccttgactgttatcatgcacaccatttttcaggaacgggatttattaaaaacatttaaaattccagtagatactttaattacatatcttatgactctcgaagaccattaccatgctgatgtggcctatcacaacaatatccatgctgcagatgttgtccagtctactcatgtgctattatctacacctgctttggaggctgtgtttacagatttggagattcttgcagcaatttttgccagtgcaatacatgatgtagatcatcctggtgtgtccaatcaatttctgatcaatacaaactctgaacttgccttgatgtacaatgattcctcagtcttagagaaccatcatttggctgtgggctttaaattgcttcaggaagaaaactgtgacattttccagaatttgaccaaaaaacaaagacaatctttaaggaaaatggtcattgacatcgtacttgcaacagatatgtcaaaacacatgaatctactggctgatttgaagactatggttgaaactaagaaagtgacaagctctggagttcttcttcttgataattattccgataggattcaggttcttcagaatatggtgcactgtgcagatctgagcaacccaacaaagcctctccagctgtaccgccagtggacggaccggataatggaggagttcttccgccaaggagaccgagagagggaacgtggcatggagataagccccatgtgtgacaagcacaatgcttccgtggaaaaatcacaggtgggcttcatagactatattgttcatcccctctgggagacatgggcagacctcgtccaccctgacgcccaggatattttggacactttggaggacaatcgtgaatggtaccagagcacaatccctcagagcccctctcctgcacctgatgacccagaggagggccggcagggtcaaactgagaaattccagtttgaactaactttagaggaagatggtgagtcagacacggaaaaggacagtggcagtcaagtggaagaagacactagctgcagtgactccaagactctttgtactcaagactcagagtctactgaaattccccttgatgaacaggttgaagaggaggcagtaggggaagaagaggaaagccagcctgaagcctgtgtcatagatgatcgttctcctgacacgtaacagtgcaaaaactttcatgccttttttttttttaagtagaaaaattgtttccaaagtgcatgtcacatgccacaaccacggtcacacctcactgtcatctgccaggacgtttgttgaacaaaactgaccttgactactcagtccagcgctcaggaatatcgtaaccagttttttcacctccatgtcatccgagcaaggtggacatcttcacgaacagcgtttttaacaagatttcagcttggtagagctgacaaagcagataaaatctactccaaattattttcaagagagtgtgactcatcaggcagcccaaaagtttattggacttggggtttctattcctttttatttgtttgcaatattttcagaagaaaggcattgcacagagtgaacttaatggacgaagcaacaaatatgtcaagaacaggacatagcacgaatctgttaccagtaggaggaggatgagccacagaaattgcataattttctaatttcaagtcttcctgatacatgactgaatagtgtggttcagtgagctgcactgacctctacattttgtatgatatgtaaaacagattttttgtagagcttacttttattattaaatgtattgaggtattatatttaaaaaaaactatgttcagaacttcatctgccactggttatttttttctaaggagtaacttgcaagttttcagtacaaatctgtgctacactggataaaaatctaatttatgaattttacttgcaccttatagttcatagcaattaactgatttgtagtgattcattgtttgttttatataccaatgacttccatattttaaaagagaaaaacaactttatgttgcaggaaaccctttttgtaagtctttattatttactttgcattttgtttcactctttccagataagcagagttgctcttcaccagtgtttttcttcatgtgcaaagtgactatttgttctataatacttttatgtgtgttatatcaaatgtgtcttaagcttcatgcaaactcagtcatcagttcgtgttgtctgaagcaagtgggagatatataaatacccagtagctaaaatggtcagtcttttttagatgttttcctacttagtatctcctaataacgttttgctgtgtcactagatgttcatttcacaagtgcatgtctttctaataatccacacatttcatgctctaataatccacacatttcatgctcatttttattgtttttacagccagttatagtaagaaaaaggtttttccccttgtgctgctttataatttagcgtgtgtctgaaccttatccatgtttgctagatgaggtcttgtcaaatatatcactaccattgtcaccggtgaaaagaaacaggtagttaagttagggttaacattcatttcaaccacgaggttgtatatcatgactagcttttactcttggtttacagagaaaagttaaacagccaactaggcagtttttaagaatattaacaatatattaacaaacaccaatacaactaatcctatttggttttaatgatttcaccatgggattaagaactatatcaggaacatccctgagaaacggttttaagtgtagcaactactcttccttaatggacagccacataacgtgtaggaagtcctttatcacttatcctcgatccataagcatatcttgcagaggggaactacttctttaaacacatggagggaaagaagatgatgccactggcaccagagggttagtactgtgatgcatcctaaaatatttattatattggtaaaaattctggttaaataaaaaattagagatcactcttggctgatttcagcaccaggaactgtattacagttttagagattaattcctagtgtttacctgattatagcagttggcatcatggggcatttaattctgactttatccccacgtcagccttaataaagtcttctttaccttctctatgaagactttaaagcccaaataatcatttttcacattgatattcaagaattgagatagatagaagccaaagtgggtatctgacaagtggaaaatcaaacgtttaagaagaattacaactctgaaaagcatttatatgtggaacttctcaaggagcctcctggggactggaaagtaagtcatcagccaggcaaatgactcatgctgaagagagtccccatttcagtcccctgagatctagctgatgcttagatcctttgaaataaaaattatgtctttataactctgatcttttacataaagcagaagaggaatcaactagttaattgcaaggtttctactctgtttcctctgtaaagatcagatggtaatctttcaaataagaaaaaaataaagacgtatgtttgaccaagtagtttcacaagaatatttgggaacttgtttcttttaattttatttgtccctgagtgaagtctagaaagaaaggtaaagagtctagagtttattcctctttccaaaacattctcattcctctcctccctacacttagtatttcccccacagagtgcctagaatcttaataatgaataaaataaaaagcagcaatatgtcattaacaaatccagacctgaaagggtaaagggtttataactgcactaataaagagaggctctttttttttcttccagtttgttggtttttaatggtaccgtgttgtaaagatacccactaatggacaatcaaattgcagaaaaggctcaatatccaagagacagggactaatgcactgtacaatctgcttatccttgcccttctctcttgccaaagtgtgcttcagaaatatatactgctttaaaaaagaataaaagaatatccttttacaagtggctttacatttcctaaaatgccataagaaaatgcaatatctgggtactgtatggggaaaaaaatgtccaagtttgtgtaaaaccagtgcatttcagcttgcaagttactgaacacaataatgctgttttaattttgttttatatcagttaaaattcacaataatgtagatagaacaaattacagacaaggaaagaaaaaacttgaatgaaatggattttacagaaagctttatgataatttttgaatgcattatttattttttgtgccatgcattttttttctcaccaaatgaccttacctgtaatacagtcttgtttgtctgtttacaaccatgtatttattgcaatgtacatactgtaatgttaattgtaaattatctgttcttattaaaacatcatcccatgatgggatggtgttgatatatttggaaactcttggtgagagaatgaatggtgtgtatacatactctgtacatttttcttttctcctgtaatatagtcttgtcaccttagagcttgtttatggaagattcaagaaaactataaaatacttaaagatatataaatttaaaaaaacatagctgcaggtctttggtcccagggctgtgccttaactttaaccaatattttcttctgttttgctgcatttgaaaggtaacagtggagctagggctgggcattttacatccaggcttttaattgattagaattctgccaataggtggattttacaaaaccacagacaacctctgaaagattctgagacccttttgagacagaagctcttaagtacttcttgccagggagcagcactgcatgtgtgatggttgtttgccatctgttgatcaggaactacttcagctacttgcatttgattatttcctttttttttttttttaactcggaaacacaactggggaaatatattctttcccagtgattataaacaatctttttcttttttttaagtccttttggcttctagagctcataggaaaatggacttgatttgaaattggagccagagtttactcgtgttggttatctattcatcagcttcctgacatgttaagagaatacattaaagagaaaatactgttttttaatcctaaaatttttcttccactaagataaaccaaatgtccttacatatatgtaaacccatctatttaaacgcaaaggtgggttgatgtcagtttacatagcagaaagcattcactatcctctaagatttgtttctgcaaaactttcattgctttagaattttaaaatttcaccttgtacaatggccagcccctaaagcaggaaacatttataatggattatatggaaacatcctcccagtacttgcccagcccttgaatcatgtggcttttcagtgaaaggaaagattctttttctaggaaaaatgagcctattttattttattttattttattttttgacacaaactgtagattttagcagccctggcccaaaggaatttgattacttttgttttaaacagtacaaaggggacactataattacaaaaacatccttaactgatttgagttgtttttatttctttggatatattttcagagtggtaaattgtgtgtgagaattacaaatgattattcttttagtggtttcttagcctctcttacagcccacggggatagtactgtacatcaataccttcatatgaaatttttatatgcaatgaaaataaaagcatgggttgattctgcctatttatgactcaatcttttacaaataaaagattattcattttaaattatagttcaatcagcatgtctctt

SEQ ID NO: 5477 - protein, 507 aa, Homo sapiens
MASNKFKRMLNRELTHLSEMSRSGNQVSEFISNTFLDKQHEVEIPSPTQKEKEKKKRPMSQISGVKKLMHSSSLTNSSIPRFGVKTEQEDVLAKELEDVNKWGLHVFRIAELSGNRPLTVIMHTIFQERDLLKTFKIPVDTLITYLMTLEDHYHADVAYHNNIHAADVVQSTHVLLSTPALEAVFTDLEILAAIFASAIHDVDHPGVSNQFLINTNSELALMYNDSSVLENHHLAVGFKLLQEENCDIFQNLTKKQRQSLRKMVIDIVLATDMSKHMNLLADLKTMVETKKVTSSGVLLLDNYSDRIQVLQNMVHCADLSNPTKPLQLYRQWTDRIMEEFFRQGDRERERGMEISPMCDKHNASVEKSQVGFIDYIVHPLWETWADLVHPDAQDILDTLEDNREWYQSTIPQSPSPAPDDPEEGRQGQTEKFQFELTLEEDGESDTEKDSGSQVEEDTSCSDSKTLCTQDSESTEIPLDEQVEEEAVGEEEESQPEACVIDDRSPDT

SEQ ID NO: 5478 - DNA, 6808 bp, Homo sapiens
caatacttgttgcaataattgcccacgatagctgctcaaacaagagagttggaattcatctgtaaaaatcactacatgtaacgtaggagacaagaaaaatattaatgacagaagatctgcgaacatgatgcacgtgaataattttccctttagaaggcattcctggatatgttttgatgtggacaatggcacatctgcgggacggagtcccttggatcccatgaccagcccaggatccgggctaattctccaagcaaattttgtccacagtcaacgacgggagtccttcctgtatcgatccgacagcgattatgacctctctccaaagtctatgtcccggaactcctccattgccagtgatatacacggagatgacttgattgtgactccatttgctcaggtcttggccagtctgcgaactgtacgaaacaactttgctgcattaactaatttgcaagatcgagcacctagcaaaagatcacccatgtgcaaccaaccatccatcaacaaagccaccataacagaggaggcctaccagaaactggccagcgagaccctggaggagctggactggtgtctggaccagctagagaccctacagaccaggcactccgtcagtgagatggcctccaacaagtttaaaaggatgcttaatcgggagctcacccatctctctgaaatgagtcggtctggaaatcaagtgtcagagtttatatcaaacacattcttagataagcaacatgaagtggaaattccttctccaactcagaaggaaaaggagaaaaagaaaagaccaatgtctcagatcagtggagtcaagaaattgatgcacagctctagtctgactaattcaagtatcccaaggtttggagttaaaactgaacaagaagatgtccttgccaaggaactagaagatgtgaacaaatggggtcttcatgttttcagaatagcagagttgtctggtaaccggcccttgactgttatcatgcacaccatttttcaggaacgggatttattaaaaacatttaaaattccagtagatactttaattacatatcttatgactctcgaagaccattaccatgctgatgtggcctatcacaacaatatccatgctgcagatgttgtccagtctactcatgtgctattatctacacctgctttggaggctgtgtttacagatttggagattcttgcagcaatttttgccagtgcaatacatgatgtagatcatcctggtgtgtccaatcaatttctgatcaatacaaactctgaacttgccttgatgtacaatgattcctcagtcttagagaaccatcatttggctgtgggctttaaattgcttcaggaagaaaactgtgacattttccagaatttgaccaaaaaacaaagacaatctttaaggaaaatggtcattgacatcgtacttgcaacagatatgtcaaaacacatgaatctactggctgatttgaagactatggttgaaactaagaaagtgacaagctctggagttcttcttcttgataattattccgataggattcaggttcttcagaatatggtgcactgtgcagatctgagcaacccaacaaagcctctccagctgtaccgccagtggacggaccggataatggaggagttcttccgccaaggagaccgagagagggaacgtggcatggagataagccccatgtgtgacaagcacaatgcttccgtggaaaaatcacaggtgggcttcatagactatattgttcatcccctctgggagacatgggcagacctcgtccaccctgacgcccaggatattttggacactttggaggacaatcgtgaatggtaccagagcacaatccctcagagcccctctcctgcacctgatgacccagaggagggccggcagggtcaaactgagaaattccagtttgaactaactttagaggaagatggtgagtcagacacggaaaaggacagtggcagtcaagtggaagaagacactagctgcagtgactccaagactctttgtactcaagactcagagtctactgaaattccccttgatgaacaggttgaagaggaggcagtaggggaagaagaggaaagccagcctgaagcctgtgtcatagatgatcgttctcctgacacgtaacagtgcaaaaactttcatgccttttttttttttaagtagaaaaattgtttccaaagtgcatgtcacatgccacaaccacggtcacacctcactgtcatctgccaggacgtttgttgaacaaaactgaccttgactactcagtccagcgctcaggaatatcgtaaccagttttttcacctccatgtcatccgagcaaggtggacatcttcacgaacagcgtttttaacaagatttcagcttggtagagctgacaaagcagataaaatctactccaaattattttcaagagagtgtgactcatcaggcagcccaaaagtttattggacttggggtttctattcctttttatttgtttgcaatattttcagaagaaaggcattgcacagagtgaacttaatggacgaagcaacaaatatgtcaagaacaggacatagcacgaatctgttaccagtaggaggaggatgagccacagaaattgcataattttctaatttcaagtcttcctgatacatgactgaatagtgtggttcagtgagctgcactgacctctacattttgtatgatatgtaaaacagattttttgtagagcttacttttattattaaatgtattgaggtattatatttaaaaaaaactatgttcagaacttcatctgccactggttatttttttctaaggagtaacttgcaagttttcagtacaaatctgtgctacactggataaaaatctaatttatgaattttacttgcaccttatagttcatagcaattaactgatttgtagtgattcattgtttgttttatataccaatgacttccatattttaaaagagaaaaacaactttatgttgcaggaaaccctttttgtaagtctttattatttactttgcattttgtttcactctttccagataagcagagttgctcttcaccagtgtttttcttcatgtgcaaagtgactatttgttctataatacttttatgtgtgttatatcaaatgtgtcttaagcttcatgcaaactcagtcatcagttcgtgttgtctgaagcaagtgggagatatataaatacccagtagctaaaatggtcagtcttttttagatgttttcctacttagtatctcctaataacgttttgctgtgtcactagatgttcatttcacaagtgcatgtctttctaataatccacacatttcatgctctaataatccacacatttcatgctcatttttattgtttttacagccagttatagtaagaaaaaggtttttccccttgtgctgctttataatttagcgtgtgtctgaaccttatccatgtttgctagatgaggtcttgtcaaatatatcactaccattgtcaccggtgaaaagaaacaggtagttaagttagggttaacattcatttcaaccacgaggttgtatatcatgactagcttttactcttggtttacagagaaaagttaaacagccaactaggcagtttttaagaatattaacaatatattaacaaacaccaatacaactaatcctatttggttttaatgatttcaccatgggattaagaactatatcaggaacatccctgagaaacggttttaagtgtagcaactactcttccttaatggacagccacataacgtgtaggaagtcctttatcacttatcctcgatccataagcatatcttgcagaggggaactacttctttaaacacatggagggaaagaagatgatgccactggcaccagagggttagtactgtgatgcatcctaaaatatttattatattggtaaaaattctggttaaataaaaaattagagatcactcttggctgatttcagcaccaggaactgtattacagttttagagattaattcctagtgtttacctgattatagcagttggcatcatggggcatttaattctgactttatccccacgtcagccttaataaagtcttctttaccttctctatgaagactttaaagcccaaataatcatttttcacattgatattcaagaattgagatagatagaagccaaagtgggtatctgacaagtggaaaatcaaacgtttaagaagaattacaactctgaaaagcatttatatgtggaacttctcaaggagcctcctggggactggaaagtaagtcatcagccaggcaaatgactcatgctgaagagagtccccatttcagtcccctgagatctagctgatgcttagatcctttgaaataaaaattatgtctttataactctgatcttttacataaagcagaagaggaatcaactagttaattgcaaggtttctactctgtttcctctgtaaagatcagatggtaatctttcaaataagaaaaaaataaagacgtatgtttgaccaagtagtttcacaagaatatttgggaacttgtttcttttaattttatttgtccctgagtgaagtctagaaagaaaggtaaagagtctagagtttattcctctttccaaaacattctcattcctctcctccctacacttagtatttcccccacagagtgcctagaatcttaataatgaataaaataaaaagcagcaatatgtcattaacaaatccagacctgaaagggtaaagggtttataactgcactaataaagagaggctctttttttttcttccagtttgttggtttttaatggtaccgtgttgtaaagatacccactaatggacaatcaaattgcagaaaaggctcaatatccaagagacagggactaatgcactgtacaatctgcttatccttgcccttctctcttgccaaagtgtgcttcagaaatatatactgctttaaaaaagaataaaagaatatccttttacaagtggctttacatttcctaaaatgccataagaaaatgcaatatctgggtactgtatggggaaaaaaatgtccaagtttgtgtaaaaccagtgcatttcagcttgcaagttactgaacacaataatgctgttttaattttgttttatatcagttaaaattcacaataatgtagatagaacaaattacagacaaggaaagaaaaaacttgaatgaaatggattttacagaaagctttatgataatttttgaatgcattatttattttttgtgccatgcattttttttctcaccaaatgaccttacctgtaatacagtcttgtttgtctgtttacaaccatgtatttattgcaatgtacatactgtaatgttaattgtaaattatctgttcttattaaaacatcatcccatgatgggatggtgttgatatatttggaaactcttggtgagagaatgaatggtgtgtatacatactctgtacatttttcttttctcctgtaatatagtcttgtcaccttagagcttgtttatggaagattcaagaaaactataaaatacttaaagatatataaatttaaaaaaacatagctgcaggtctttggtcccagggctgtgccttaactttaaccaatattttcttctgttttgctgcatttgaaaggtaacagtggagctagggctgggcattttacatccaggcttttaattgattagaattctgccaataggtggattttacaaaaccacagacaacctctgaaagattctgagacccttttgagacagaagctcttaagtacttcttgccagggagcagcactgcatgtgtgatggttgtttgccatctgttgatcaggaactacttcagctacttgcatttgattatttcctttttttttttttttaactcggaaacacaactggggaaatatattctttcccagtgattataaacaatctttttcttttttttaagtccttttggcttctagagctcataggaaaatggacttgatttgaaattggagccagagtttactcgtgttggttatctattcatcagcttcctgacatgttaagagaatacattaaagagaaaatactgttttttaatcctaaaatttttcttccactaagataaaccaaatgtccttacatatatgtaaacccatctatttaaacgcaaaggtgggttgatgtcagtttacatagcagaaagcattcactatcctctaagatttgtttctgcaaaactttcattgctttagaattttaaaatttcaccttgtacaatggccagcccctaaagcaggaaacatttataatggattatatggaaacatcctcccagtacttgcccagcccttgaatcatgtggcttttcagtgaaaggaaagattctttttctaggaaaaatgagcctattttattttattttattttattttttgacacaaactgtagattttagcagccctggcccaaaggaatttgattacttttgttttaaacagtacaaaggggacactataattacaaaaacatccttaactgatttgagttgtttttatttctttggatatattttcagagtggtaaattgtgtgtgagaattacaaatgattattcttttagtggtttcttagcctctcttacagcccacggggatagtactgtacatcaataccttcatatgaaatttttatatgcaatgaaaataaaagcatgggttgattctgcctatttatgactcaatcttttacaaataaaagattattcattttaaattatagttcaatcagcatgtctctt

SEQ ID NO: 5479 - protein, 673 aa, Homo sapiens; identical to SEQ ID NO: 636

SEQ ID NO: 5480 - DNA, 7240 bp, Homo sapiens
tgcggcgcattagttccaatagtttaacaggctgctttgtagcacggacaaagccgtgcgagcgcggtgctttccctccttgttcatttgctatgcgagcttgtcagtgatctttggcaggggcttgggagaggaggggtgacgtttaatacgcttccgcggaggagtgcgctcgcctcctctgcacccagccccaggctctacagagagactgaggcaggcgactgaatgcactaacagcagcaggctcagacctgcttccctggacatttccgggaccgtgagcgagggaaccacgttgccctggattcttgccagctgtacaaagttgaccaggaaaatggctcagcagacaagcccggacactttaacagtacctgaagtggataatccgcattgtccaaacccgtggctgaacgaagaccttgtgaaatccttgcgagaaaacctgttgcagcatgagaagtccaagacagcgaggaaatcggtttctcccaagctctctccagtgatctctccgagaaattcccccaggcttctgcgcagaatgcttctcagcagcaacatccccaaacagcggcgtttcacggtggcacatacatgttttgatgtggacaatggcacatctgcgggacggagtcccttggatcccatgaccagcccaggatccgggctaattctccaagcaaattttgtccacagtcaacgacgggagtccttcctgtatcgatccgacagcgattatgacctctctccaaagtctatgtcccggaactcctccattgccagtgatatacacggagatgacttgattgtgactccatttgctcaggtcttggccagtctgcgaactgtacgaaacaactttgctgcattaactaatttgcaagatcgagcacctagcaaaagatcacccatgtgcaaccaaccatccatcaacaaagccaccataacagaggaggcctaccagaaactggccagcgagaccctggaggagctggactggtgtctggaccagctagagaccctacagaccaggcactccgtcagtgagatggcctccaacaagtttaaaaggatgcttaatcgggagctcacccatctctctgaaatgagtcggtctggaaatcaagtgtcagagtttatatcaaacacattcttagataagcaacatgaagtggaaattccttctccaactcagaaggaaaaggagaaaaagaaaagaccaatgtctcagatcagtggagtcaagaaattgatgcacagctctagtctgactaattcaagtatcccaaggtttggagttaaaactgaacaagaagatgtccttgccaaggaactagaagatgtgaacaaatggggtcttcatgttttcagaatagcagagttgtctggtaaccggcccttgactgttatcatgcacaccatttttcaggaacgggatttattaaaaacatttaaaattccagtagatactttaattacatatcttatgactctcgaagaccattaccatgctgatgtggcctatcacaacaatatccatgctgcagatgttgtccagtctactcatgtgctattatctacacctgctttggaggctgtgtttacagatttggagattcttgcagcaatttttgccagtgcaatacatgatgtagatcatcctggtgtgtccaatcaatttctgatcaatacaaactctgaacttgccttgatgtacaatgattcctcagtcttagagaaccatcatttggctgtgggctttaaattgcttcaggaagaaaactgtgacattttccagaatttgaccaaaaaacaaagacaatctttaaggaaaatggtcattgacatcgtacttgcaacagatatgtcaaaacacatgaatctactggctgatttgaagactatggttgaaactaagaaagtgacaagctctggagttcttcttcttgataattattccgataggattcaggttcttcagaatatggtgcactgtgcagatctgagcaacccaacaaagcctctccagctgtaccgccagtggacggaccggataatggaggagttcttccgccaaggagaccgagagagggaacgtggcatggagataagccccatgtgtgacaagcacaatgcttccgtggaaaaatcacaggtgggcttcatagactatattgttcatcccctctgggagacatgggcagacctcgtccaccctgacgcccaggatattttggacactttggaggacaatcgtgaatggtaccagagcacaatccctcagagcccctctcctgcacctgatgacccagaggagggccggcagggtcaaactgagaaattccagtttgaactaactttagaggaagatggtgagtcagacacggaaaaggacagtggcagtcaagtggaagaagacactagctgcagtgactccaagactctttgtactcaagactcagagtctactgaaattccccttgatgaacaggttgaagaggaggcagtaggggaagaagaggaaagccagcctgaagcctgtgtcatagatgatcgttctcctgacacgtaacagtgcaaaaactttcatgccttttttttttttaagtagaaaaattgtttccaaagtgcatgtcacatgccacaaccacggtcacacctcactgtcatctgccaggacgtttgttgaacaaaactgaccttgactactcagtccagcgctcaggaatatcgtaaccagttttttcacctccatgtcatccgagcaaggtggacatcttcacgaacagcgtttttaacaagatttcagcttggtagagctgacaaagcagataaaatctactccaaattattttcaagagagtgtgactcatcaggcagcccaaaagtttattggacttggggtttctattcctttttatttgtttgcaatattttcagaagaaaggcattgcacagagtgaacttaatggacgaagcaacaaatatgtcaagaacaggacatagcacgaatctgttaccagtaggaggaggatgagccacagaaattgcataattttctaatttcaagtcttcctgatacatgactgaatagtgtggttcagtgagctgcactgacctctacattttgtatgatatgtaaaacagattttttgtagagcttacttttattattaaatgtattgaggtattatatttaaaaaaaactatgttcagaacttcatctgccactggttatttttttctaaggagtaacttgcaagttttcagtacaaatctgtgctacactggataaaaatctaatttatgaattttacttgcaccttatagttcatagcaattaactgatttgtagtgattcattgtttgttttatataccaatgacttccatattttaaaagagaaaaacaactttatgttgcaggaaaccctttttgtaagtctttattatttactttgcattttgtttcactctttccagataagcagagttgctcttcaccagtgtttttcttcatgtgcaaagtgactatttgttctataatacttttatgtgtgttatatcaaatgtgtcttaagcttcatgcaaactcagtcatcagttcgtgttgtctgaagcaagtgggagatatataaatacccagtagctaaaatggtcagtcttttttagatgttttcctacttagtatctcctaataacgttttgctgtgtcactagatgttcatttcacaagtgcatgtctttctaataatccacacatttcatgctctaataatccacacatttcatgctcatttttattgtttttacagccagttatagtaagaaaaaggtttttccccttgtgctgctttataatttagcgtgtgtctgaaccttatccatgtttgctagatgaggtcttgtcaaatatatcactaccattgtcaccggtgaaaagaaacaggtagttaagttagggttaacattcatttcaaccacgaggttgtatatcatgactagcttttactcttggtttacagagaaaagttaaacagccaactaggcagtttttaagaatattaacaatatattaacaaacaccaatacaactaatcctatttggttttaatgatttcaccatgggattaagaactatatcaggaacatccctgagaaacggttttaagtgtagcaactactcttccttaatggacagccacataacgtgtaggaagtcctttatcacttatcctcgatccataagcatatcttgcagaggggaactacttctttaaacacatggagggaaagaagatgatgccactggcaccagagggttagtactgtgatgcatcctaaaatatttattatattggtaaaaattctggttaaataaaaaattagagatcactcttggctgatttcagcaccaggaactgtattacagttttagagattaattcctagtgtttacctgattatagcagttggcatcatggggcatttaattctgactttatccccacgtcagccttaataaagtcttctttaccttctctatgaagactttaaagcccaaataatcatttttcacattgatattcaagaattgagatagatagaagccaaagtgggtatctgacaagtggaaaatcaaacgtttaagaagaattacaactctgaaaagcatttatatgtggaacttctcaaggagcctcctggggactggaaagtaagtcatcagccaggcaaatgactcatgctgaagagagtccccatttcagtcccctgagatctagctgatgcttagatcctttgaaataaaaattatgtctttataactctgatcttttacataaagcagaagaggaatcaactagttaattgcaaggtttctactctgtttcctctgtaaagatcagatggtaatctttcaaataagaaaaaaataaagacgtatgtttgaccaagtagtttcacaagaatatttgggaacttgtttcttttaattttatttgtccctgagtgaagtctagaaagaaaggtaaagagtctagagtttattcctctttccaaaacattctcattcctctcctccctacacttagtatttcccccacagagtgcctagaatcttaataatgaataaaataaaaagcagcaatatgtcattaacaaatccagacctgaaagggtaaagggtttataactgcactaataaagagaggctctttttttttcttccagtttgttggtttttaatggtaccgtgttgtaaagatacccactaatggacaatcaaattgcagaaaaggctcaatatccaagagacagggactaatgcactgtacaatctgcttatccttgcccttctctcttgccaaagtgtgcttcagaaatatatactgctttaaaaaagaataaaagaatatccttttacaagtggctttacatttcctaaaatgccataagaaaatgcaatatctgggtactgtatggggaaaaaaatgtccaagtttgtgtaaaaccagtgcatttcagcttgcaagttactgaacacaataatgctgttttaattttgttttatatcagttaaaattcacaataatgtagatagaacaaattacagacaaggaaagaaaaaacttgaatgaaatggattttacagaaagctttatgataatttttgaatgcattatttattttttgtgccatgcattttttttctcaccaaatgaccttacctgtaatacagtcttgtttgtctgtttacaaccatgtatttattgcaatgtacatactgtaatgttaattgtaaattatctgttcttattaaaacatcatcccatgatgggatggtgttgatatatttggaaactcttggtgagagaatgaatggtgtgtatacatactctgtacatttttcttttctcctgtaatatagtcttgtcaccttagagcttgtttatggaagattcaagaaaactataaaatacttaaagatatataaatttaaaaaaacatagctgcaggtctttggtcccagggctgtgccttaactttaaccaatattttcttctgttttgctgcatttgaaaggtaacagtggagctagggctgggcattttacatccaggcttttaattgattagaattctgccaataggtggattttacaaaaccacagacaacctctgaaagattctgagacccttttgagacagaagctcttaagtacttcttgccagggagcagcactgcatgtgtgatggttgtttgccatctgttgatcaggaactacttcagctacttgcatttgattatttcctttttttttttttttaactcggaaacacaactggggaaatatattctttcccagtgattataaacaatctttttcttttttttaagtccttttggcttctagagctcataggaaaatggacttgatttgaaattggagccagagtttactcgtgttggttatctattcatcagcttcctgacatgttaagagaatacattaaagagaaaatactgttttttaatcctaaaatttttcttccactaagataaaccaaatgtccttacatatatgtaaacccatctatttaaacgcaaaggtgggttgatgtcagtttacatagcagaaagcattcactatcctctaagatttgtttctgcaaaactttcattgctttagaattttaaaatttcaccttgtacaatggccagcccctaaagcaggaaacatttataatggattatatggaaacatcctcccagtacttgcccagcccttgaatcatgtggcttttcagtgaaaggaaagattctttttctaggaaaaatgagcctattttattttattttattttattttttgacacaaactgtagattttagcagccctggcccaaaggaatttgattacttttgttttaaacagtacaaaggggacactataattacaaaaacatccttaactgatttgagttgtttttatttctttggatatattttcagagtggtaaattgtgtgtgagaattacaaatgattattcttttagtggtttcttagcctctcttacagcccacggggatagtactgtacatcaataccttcatatgaaatttttatatgcaatgaaaataaaagcatgggttgattctgcctatttatgactcaatcttttacaaataaaagattattcattttaaattatagttcaatcagcatgtctctt

SEQ ID NO: 5481 - protein, 745 aa, Homo sapiens
MAQQTSPDTLTVPEVDNPHCPNPWLNEDLVKSLRENLLQHEKSKTARKSVSPKLSPVISPRNSPRLLRRMLLSSNIPKQRRFTVAHTCFDVDNGTSAGRSPLDPMTSPGSGLILQANFVHSQRRESFLYRSDSDYDLSPKSMSRNSSIASDIHGDDLIVTPFAQVLASLRTVRNNFAALTNLQDRAPSKRSPMCNQPSINKATITEEAYQKLASETLEELDWCLDQLETLQTRHSVSEMASNKFKRMLNRELTHLSEMSRSGNQVSEFISNTFLDKQHEVEIPSPTQKEKEKKKRPMSQISGVKKLMHSSSLTNSSIPRFGVKTEQEDVLAKELEDVNKWGLHVFRIAELSGNRPLTVIMHTIFQERDLLKTFKIPVDTLITYLMTLEDHYHADVAYHNNIHAADVVQSTHVLLSTPALEAVFTDLEILAAIFASAIHDVDHPGVSNQFLINTNSELALMYNDSSVLENHHLAVGFKLLQEENCDIFQNLTKKQRQSLRKMVIDIVLATDMSKHMNLLADLKTMVETKKVTSSGVLLLDNYSDRIQVLQNMVHCADLSNPTKPLQLYRQWTDRIMEEFFRQGDRERERGMEISPMCDKHNASVEKSQVGFIDYIVHPLWETWADLVHPDAQDILDTLEDNREWYQSTIPQSPSPAPDDPEEGRQGQTEKFQFELTLEEDGESDTEKDSGSQVEEDTSCSDSKTLCTQDSESTEIPLDEQVEEEAVGEEEESQPEACVIDDRSPDT

SEQ ID NO: 5482 - DNA, 7284 bp, Homo sapiens
tgcggcgcattagttccaatagtttaacaggctgctttgtagcacggacaaagccgtgcgagcgcggtgctttccctccttgttcatttgctatgcgagcttgtcagtgatctttggcaggggcttgggagaggaggggtgacgtttaatacgcttccgcggaggagtgcgctcgcctcctctgcacccagccccaggctctacagagagactgaggcaggcgactgaatgcactaacagcagcaggctcagacctgcttccctggacatttccgggaccgtgagcgagggaaccacgttgccctggattcttgccagctgtacaaagttgaccaggaaaatggctcagcagacaagcccggacactttaacagtacctgaagtggataatccgcattgtccaaacccgtggctgaacgaagaccttgtgaaatccttgcgagaaaacctgttgcagcatgagaagtccaagacagcgaggaaatcggtttctcccaagctctctccagtgatctctccgagaaattcccccaggcttctgcgcagaatgcttctcagcagcaacatccccaaacagcggcgtttcacggtggcacatacatgttttgatgtggacaatggcacatctgcgggacggagtcccttggatcccatgaccagcccaggatccgggctaattctccaagcaaattttgtccacagtcaacgacgggagtccttcctgtatcgatccgacagcgattatgacctctctccaaagtctatgtcccggaactcctccattgccagtgatatacacggagatgacttgattgtgactccatttgctcaggtcttggccagtctgcgaactgtacgaaacaactttgctgcattaactaatttgcaagatcgagcacctagcaaaagatcacccatgtgcaaccaaccatccatcaacaaagccaccataacagggctctataatgggatcattgcatttctctgattactaatgagaaggaggcctaccagaaactggccagcgagaccctggaggagctggactggtgtctggaccagctagagaccctacagaccaggcactccgtcagtgagatggcctccaacaagtttaaaaggatgcttaatcgggagctcacccatctctctgaaatgagtcggtctggaaatcaagtgtcagagtttatatcaaacacattcttagataagcaacatgaagtggaaattccttctccaactcagaaggaaaaggagaaaaagaaaagaccaatgtctcagatcagtggagtcaagaaattgatgcacagctctagtctgactaattcaagtatcccaaggtttggagttaaaactgaacaagaagatgtccttgccaaggaactagaagatgtgaacaaatggggtcttcatgttttcagaatagcagagttgtctggtaaccggcccttgactgttatcatgcacaccatttttcaggaacgggatttattaaaaacatttaaaattccagtagatactttaattacatatcttatgactctcgaagaccattaccatgctgatgtggcctatcacaacaatatccatgctgcagatgttgtccagtctactcatgtgctattatctacacctgctttggaggctgtgtttacagatttggagattcttgcagcaatttttgccagtgcaatacatgatgtagatcatcctggtgtgtccaatcaatttctgatcaatacaaactctgaacttgccttgatgtacaatgattcctcagtcttagagaaccatcatttggctgtgggctttaaattgcttcaggaagaaaactgtgacattttccagaatttgaccaaaaaacaaagacaatctttaaggaaaatggtcattgacatcgtacttgcaacagatatgtcaaaacacatgaatctactggctgatttgaagactatggttgaaactaagaaagtgacaagctctggagttcttcttcttgataattattccgataggattcaggttcttcagaatatggtgcactgtgcagatctgagcaacccaacaaagcctctccagctgtaccgccagtggacggaccggataatggaggagttcttccgccaaggagaccgagagagggaacgtggcatggagataagccccatgtgtgacaagcacaatgcttccgtggaaaaatcacaggtgggcttcatagactatattgttcatcccctctgggagacatgggcagacctcgtccaccctgacgcccaggatattttggacactttggaggacaatcgtgaatggtaccagagcacaatccctcagagcccctctcctgcacctgatgacccagaggagggccggcagggtcaaactgagaaattccagtttgaactaactttagaggaagatggtgagtcagacacggaaaaggacagtggcagtcaagtggaagaagacactagctgcagtgactccaagactctttgtactcaagactcagagtctactgaaattccccttgatgaacaggttgaagaggaggcagtaggggaagaagaggaaagccagcctgaagcctgtgtcatagatgatcgttctcctgacacgtaacagtgcaaaaactttcatgccttttttttttttaagtagaaaaattgtttccaaagtgcatgtcacatgccacaaccacggtcacacctcactgtcatctgccaggacgtttgttgaacaaaactgaccttgactactcagtccagcgctcaggaatatcgtaaccagttttttcacctccatgtcatccgagcaaggtggacatcttcacgaacagcgtttttaacaagatttcagcttggtagagctgacaaagcagataaaatctactccaaattattttcaagagagtgtgactcatcaggcagcccaaaagtttattggacttggggtttctattcctttttatttgtttgcaatattttcagaagaaaggcattgcacagagtgaacttaatggacgaagcaacaaatatgtcaagaacaggacatagcacgaatctgttaccagtaggaggaggatgagccacagaaattgcataattttctaatttcaagtcttcctgatacatgactgaatagtgtggttcagtgagctgcactgacctctacattttgtatgatatgtaaaacagattttttgtagagcttacttttattattaaatgtattgaggtattatatttaaaaaaaactatgttcagaacttcatctgccactggttatttttttctaaggagtaacttgcaagttttcagtacaaatctgtgctacactggataaaaatctaatttatgaattttacttgcaccttatagttcatagcaattaactgatttgtagtgattcattgtttgttttatataccaatgacttccatattttaaaagagaaaaacaactttatgttgcaggaaaccctttttgtaagtctttattatttactttgcattttgtttcactctttccagataagcagagttgctcttcaccagtgtttttcttcatgtgcaaagtgactatttgttctataatacttttatgtgtgttatatcaaatgtgtcttaagcttcatgcaaactcagtcatcagttcgtgttgtctgaagcaagtgggagatatataaatacccagtagctaaaatggtcagtcttttttagatgttttcctacttagtatctcctaataacgttttgctgtgtcactagatgttcatttcacaagtgcatgtctttctaataatccacacatttcatgctctaataatccacacatttcatgctcatttttattgtttttacagccagttatagtaagaaaaaggtttttccccttgtgctgctttataatttagcgtgtgtctgaaccttatccatgtttgctagatgaggtcttgtcaaatatatcactaccattgtcaccggtgaaaagaaacaggtagttaagttagggttaacattcatttcaaccacgaggttgtatatcatgactagcttttactcttggtttacagagaaaagttaaacagccaactaggcagtttttaagaatattaacaatatattaacaaacaccaatacaactaatcctatttggttttaatgatttcaccatgggattaagaactatatcaggaacatccctgagaaacggttttaagtgtagcaactactcttccttaatggacagccacataacgtgtaggaagtcctttatcacttatcctcgatccataagcatatcttgcagaggggaactacttctttaaacacatggagggaaagaagatgatgccactggcaccagagggttagtactgtgatgcatcctaaaatatttattatattggtaaaaattctggttaaataaaaaattagagatcactcttggctgatttcagcaccaggaactgtattacagttttagagattaattcctagtgtttacctgattatagcagttggcatcatggggcatttaattctgactttatccccacgtcagccttaataaagtcttctttaccttctctatgaagactttaaagcccaaataatcatttttcacattgatattcaagaattgagatagatagaagccaaagtgggtatctgacaagtggaaaatcaaacgtttaagaagaattacaactctgaaaagcatttatatgtggaacttctcaaggagcctcctggggactggaaagtaagtcatcagccaggcaaatgactcatgctgaagagagtccccatttcagtcccctgagatctagctgatgcttagatcctttgaaataaaaattatgtctttataactctgatcttttacataaagcagaagaggaatcaactagttaattgcaaggtttctactctgtttcctctgtaaagatcagatggtaatctttcaaataagaaaaaaataaagacgtatgtttgaccaagtagtttcacaagaatatttgggaacttgtttcttttaattttatttgtccctgagtgaagtctagaaagaaaggtaaagagtctagagtttattcctctttccaaaacattctcattcctctcctccctacacttagtatttcccccacagagtgcctagaatcttaataatgaataaaataaaaagcagcaatatgtcattaacaaatccagacctgaaagggtaaagggtttataactgcactaataaagagaggctctttttttttcttccagtttgttggtttttaatggtaccgtgttgtaaagatacccactaatggacaatcaaattgcagaaaaggctcaatatccaagagacagggactaatgcactgtacaatctgcttatccttgcccttctctcttgccaaagtgtgcttcagaaatatatactgctttaaaaaagaataaaagaatatccttttacaagtggctttacatttcctaaaatgccataagaaaatgcaatatctgggtactgtatggggaaaaaaatgtccaagtttgtgtaaaaccagtgcatttcagcttgcaagttactgaacacaataatgctgttttaattttgttttatatcagttaaaattcacaataatgtagatagaacaaattacagacaaggaaagaaaaaacttgaatgaaatggattttacagaaagctttatgataatttttgaatgcattatttattttttgtgccatgcattttttttctcaccaaatgaccttacctgtaatacagtcttgtttgtctgtttacaaccatgtatttattgcaatgtacatactgtaatgttaattgtaaattatctgttcttattaaaacatcatcccatgatgggatggtgttgatatatttggaaactcttggtgagagaatgaatggtgtgtatacatactctgtacatttttcttttctcctgtaatatagtcttgtcaccttagagcttgtttatggaagattcaagaaaactataaaatacttaaagatatataaatttaaaaaaacatagctgcaggtctttggtcccagggctgtgccttaactttaaccaatattttcttctgttttgctgcatttgaaaggtaacagtggagctagggctgggcattttacatccaggcttttaattgattagaattctgccaataggtggattttacaaaaccacagacaacctctgaaagattctgagacccttttgagacagaagctcttaagtacttcttgccagggagcagcactgcatgtgtgatggttgtttgccatctgttgatcaggaactacttcagctacttgcatttgattatttcctttttttttttttttaactcggaaacacaactggggaaatatattctttcccagtgattataaacaatctttttcttttttttaagtccttttggcttctagagctcataggaaaatggacttgatttgaaattggagccagagtttactcgtgttggttatctattcatcagcttcctgacatgttaagagaatacattaaagagaaaatactgttttttaatcctaaaatttttcttccactaagataaaccaaatgtccttacatatatgtaaacccatctatttaaacgcaaaggtgggttgatgtcagtttacatagcagaaagcattcactatcctctaagatttgtttctgcaaaactttcattgctttagaattttaaaatttcaccttgtacaatggccagcccctaaagcaggaaacatttataatggattatatggaaacatcctcccagtacttgcccagcccttgaatcatgtggcttttcagtgaaaggaaagattctttttctaggaaaaatgagcctattttattttattttattttattttttgacacaaactgtagattttagcagccctggcccaaaggaatttgattacttttgttttaaacagtacaaaggggacactataattacaaaaacatccttaactgatttgagttgtttttatttctttggatatattttcagagtggtaaattgtgtgtgagaattacaaatgattattcttttagtggtttcttagcctctcttacagcccacggggatagtactgtacatcaataccttcatatgaaatttttatatgcaatgaaaataaaagcatgggttgattctgcctatttatgactcaatcttttacaaataaaagattattcattttaaattatagttcaatcagcatgtctctt

SEQ ID NO: 5483 - protein, 507 aa, Homo sapiens; identical to SEQ ID NO: 5477

SEQ ID NO: 5484 - DNA, 7264 bp, Homo sapiens
cccctctcggtagccctgaggctctggcgccttcaagtgagaagctaagcaccagcctctgctgggctgcagaagcggcggcggcggcagcagcagcagcagcatcaggaaggcgctcgggccagcgcggtgaacccgggctgggcagcaggtcgcggagccgcgagccaggatggaggcagagggcagcagcgcgccggcccgggcgggcagcggagagggcagcgacagcgccggcggggccacgctcaaagcccccaagcatctctggaggcacgagcagcaccaccagtacccgctccggcagccccagttccgcctcctgcatccccatcaccacctgcccccgccgccgccaccctcgccccagccccagccccagtgtccgctacagccgccgccgccgccccccctgccgccgcccccgccgccgcccggggctgcccgcggccgctacgcctcgagcggggccaccggccgcgtccggcatcgcggctactcggacaccgagcgctacctgtactgtcgcgccatggaccgcacctcctacgcggtggagaccggccaccggcccggcctgaagaaatccaggatgtcctggccctcctcgttccagggactcaggcgttttgatgtggacaatggcacatctgcgggacggagtcccttggatcccatgaccagcccaggatccgggctaattctccaagcaaattttgtccacagtcaacgacgggagtccttcctgtatcgatccgacagcgattatgacctctctccaaagtctatgtcccggaactcctccattgccagtgatatacacggagatgacttgattgtgactccatttgctcaggtcttggccagtctgcgaactgtacgaaacaactttgctgcattaactaatttgcaagatcgagcacctagcaaaagatcacccatgtgcaaccaaccatccatcaacaaagccaccataacagaggaggcctaccagaaactggccagcgagaccctggaggagctggactggtgtctggaccagctagagaccctacagaccaggcactccgtcagtgagatggcctccaacaagtttaaaaggatgcttaatcgggagctcacccatctctctgaaatgagtcggtctggaaatcaagtgtcagagtttatatcaaacacattcttagataagcaacatgaagtggaaattccttctccaactcagaaggaaaaggagaaaaagaaaagaccaatgtctcagatcagtggagtcaagaaattgatgcacagctctagtctgactaattcaagtatcccaaggtttggagttaaaactgaacaagaagatgtccttgccaaggaactagaagatgtgaacaaatggggtcttcatgttttcagaatagcagagttgtctggtaaccggcccttgactgttatcatgcacaccatttttcaggaacgggatttattaaaaacatttaaaattccagtagatactttaattacatatcttatgactctcgaagaccattaccatgctgatgtggcctatcacaacaatatccatgctgcagatgttgtccagtctactcatgtgctattatctacacctgctttggaggctgtgtttacagatttggagattcttgcagcaatttttgccagtgcaatacatgatgtagatcatcctggtgtgtccaatcaatttctgatcaatacaaactctgaacttgccttgatgtacaatgattcctcagtcttagagaaccatcatttggctgtgggctttaaattgcttcaggaagaaaactgtgacattttccagaatttgaccaaaaaacaaagacaatctttaaggaaaatggtcattgacatcgtacttgcaacagatatgtcaaaacacatgaatctactggctgatttgaagactatggttgaaactaagaaagtgacaagctctggagttcttcttcttgataattattccgataggattcaggttcttcagaatatggtgcactgtgcagatctgagcaacccaacaaagcctctccagctgtaccgccagtggacggaccggataatggaggagttcttccgccaaggagaccgagagagggaacgtggcatggagataagccccatgtgtgacaagcacaatgcttccgtggaaaaatcacaggtgggcttcatagactatattgttcatcccctctgggagacatgggcagacctcgtccaccctgacgcccaggatattttggacactttggaggacaatcgtgaatggtaccagagcacaatccctcagagcccctctcctgcacctgatgacccagaggagggccggcagggtcaaactgagaaattccagtttgaactaactttagaggaagatggtgagtcagacacggaaaaggacagtggcagtcaagtggaagaagacactagctgcagtgactccaagactctttgtactcaagactcagagtctactgaaattccccttgatgaacaggttgaagaggaggcagtaggggaagaagaggaaagccagcctgaagcctgtgtcatagatgatcgttctcctgacacgtaacagtgcaaaaactttcatgccttttttttttttaagtagaaaaattgtttccaaagtgcatgtcacatgccacaaccacggtcacacctcactgtcatctgccaggacgtttgttgaacaaaactgaccttgactactcagtccagcgctcaggaatatcgtaaccagttttttcacctccatgtcatccgagcaaggtggacatcttcacgaacagcgtttttaacaagatttcagcttggtagagctgacaaagcagataaaatctactccaaattattttcaagagagtgtgactcatcaggcagcccaaaagtttattggacttggggtttctattcctttttatttgtttgcaatattttcagaagaaaggcattgcacagagtgaacttaatggacgaagcaacaaatatgtcaagaacaggacatagcacgaatctgttaccagtaggaggaggatgagccacagaaattgcataattttctaatttcaagtcttcctgatacatgactgaatagtgtggttcagtgagctgcactgacctctacattttgtatgatatgtaaaacagattttttgtagagcttacttttattattaaatgtattgaggtattatatttaaaaaaaactatgttcagaacttcatctgccactggttatttttttctaaggagtaacttgcaagttttcagtacaaatctgtgctacactggataaaaatctaatttatgaattttacttgcaccttatagttcatagcaattaactgatttgtagtgattcattgtttgttttatataccaatgacttccatattttaaaagagaaaaacaactttatgttgcaggaaaccctttttgtaagtctttattatttactttgcattttgtttcactctttccagataagcagagttgctcttcaccagtgtttttcttcatgtgcaaagtgactatttgttctataatacttttatgtgtgttatatcaaatgtgtcttaagcttcatgcaaactcagtcatcagttcgtgttgtctgaagcaagtgggagatatataaatacccagtagctaaaatggtcagtcttttttagatgttttcctacttagtatctcctaataacgttttgctgtgtcactagatgttcatttcacaagtgcatgtctttctaataatccacacatttcatgctctaataatccacacatttcatgctcatttttattgtttttacagccagttatagtaagaaaaaggtttttccccttgtgctgctttataatttagcgtgtgtctgaaccttatccatgtttgctagatgaggtcttgtcaaatatatcactaccattgtcaccggtgaaaagaaacaggtagttaagttagggttaacattcatttcaaccacgaggttgtatatcatgactagcttttactcttggtttacagagaaaagttaaacagccaactaggcagtttttaagaatattaacaatatattaacaaacaccaatacaactaatcctatttggttttaatgatttcaccatgggattaagaactatatcaggaacatccctgagaaacggttttaagtgtagcaactactcttccttaatggacagccacataacgtgtaggaagtcctttatcacttatcctcgatccataagcatatcttgcagaggggaactacttctttaaacacatggagggaaagaagatgatgccactggcaccagagggttagtactgtgatgcatcctaaaatatttattatattggtaaaaattctggttaaataaaaaattagagatcactcttggctgatttcagcaccaggaactgtattacagttttagagattaattcctagtgtttacctgattatagcagttggcatcatggggcatttaattctgactttatccccacgtcagccttaataaagtcttctttaccttctctatgaagactttaaagcccaaataatcatttttcacattgatattcaagaattgagatagatagaagccaaagtgggtatctgacaagtggaaaatcaaacgtttaagaagaattacaactctgaaaagcatttatatgtggaacttctcaaggagcctcctggggactggaaagtaagtcatcagccaggcaaatgactcatgctgaagagagtccccatttcagtcccctgagatctagctgatgcttagatcctttgaaataaaaattatgtctttataactctgatcttttacataaagcagaagaggaatcaactagttaattgcaaggtttctactctgtttcctctgtaaagatcagatggtaatctttcaaataagaaaaaaataaagacgtatgtttgaccaagtagtttcacaagaatatttgggaacttgtttcttttaattttatttgtccctgagtgaagtctagaaagaaaggtaaagagtctagagtttattcctctttccaaaacattctcattcctctcctccctacacttagtatttcccccacagagtgcctagaatcttaataatgaataaaataaaaagcagcaatatgtcattaacaaatccagacctgaaagggtaaagggtttataactgcactaataaagagaggctctttttttttcttccagtttgttggtttttaatggtaccgtgttgtaaagatacccactaatggacaatcaaattgcagaaaaggctcaatatccaagagacagggactaatgcactgtacaatctgcttatccttgcccttctctcttgccaaagtgtgcttcagaaatatatactgctttaaaaaagaataaaagaatatccttttacaagtggctttacatttcctaaaatgccataagaaaatgcaatatctgggtactgtatggggaaaaaaatgtccaagtttgtgtaaaaccagtgcatttcagcttgcaagttactgaacacaataatgctgttttaattttgttttatatcagttaaaattcacaataatgtagatagaacaaattacagacaaggaaagaaaaaacttgaatgaaatggattttacagaaagctttatgataatttttgaatgcattatttattttttgtgccatgcattttttttctcaccaaatgaccttacctgtaatacagtcttgtttgtctgtttacaaccatgtatttattgcaatgtacatactgtaatgttaattgtaaattatctgttcttattaaaacatcatcccatgatgggatggtgttgatatatttggaaactcttggtgagagaatgaatggtgtgtatacatactctgtacatttttcttttctcctgtaatatagtcttgtcaccttagagcttgtttatggaagattcaagaaaactataaaatacttaaagatatataaatttaaaaaaacatagctgcaggtctttggtcccagggctgtgccttaactttaaccaatattttcttctgttttgctgcatttgaaaggtaacagtggagctagggctgggcattttacatccaggcttttaattgattagaattctgccaataggtggattttacaaaaccacagacaacctctgaaagattctgagacccttttgagacagaagctcttaagtacttcttgccagggagcagcactgcatgtgtgatggttgtttgccatctgttgatcaggaactacttcagctacttgcatttgattatttcctttttttttttttttaactcggaaacacaactggggaaatatattctttcccagtgattataaacaatctttttcttttttttaagtccttttggcttctagagctcataggaaaatggacttgatttgaaattggagccagagtttactcgtgttggttatctattcatcagcttcctgacatgttaagagaatacattaaagagaaaatactgttttttaatcctaaaatttttcttccactaagataaaccaaatgtccttacatatatgtaaacccatctatttaaacgcaaaggtgggttgatgtcagtttacatagcagaaagcattcactatcctctaagatttgtttctgcaaaactttcattgctttagaattttaaaatttcaccttgtacaatggccagcccctaaagcaggaaacatttataatggattatatggaaacatcctcccagtacttgcccagcccttgaatcatgtggcttttcagtgaaaggaaagattctttttctaggaaaaatgagcctattttattttattttattttattttttgacacaaactgtagattttagcagccctggcccaaaggaatttgattacttttgttttaaacagtacaaaggggacactataattacaaaaacatccttaactgatttgagttgtttttatttctttggatatattttcagagtggtaaattgtgtgtgagaattacaaatgattattcttttagtggtttcttagcctctcttacagcccacggggatagtactgtacatcaataccttcatatgaaatttttatatgcaatgaaaataaaagcatgggttgattctgcctatttatgactcaatcttttacaaataaaagattattcattttaaattatagttcaatcagcatgtctctt

SEQ ID NO: 5485 - protein, 809 aa, Homo sapiens
MEAEGSSAPARAGSGEGSDSAGGATLKAPKHLWRHEQHHQYPLRQPQFRLLHPHHHLPPPPPPSPQPQPQCPLQPPPPPPLPPPPPPPGAARGRYASSGATGRVRHRGYSDTERYLYCRAMDRTSYAVETGHRPGLKKSRMSWPSSFQGLRRFDVDNGTSAGRSPLDPMTSPGSGLILQANFVHSQRRESFLYRSDSDYDLSPKSMSRNSSIASDIHGDDLIVTPFAQVLASLRTVRNNFAALTNLQDRAPSKRSPMCNQPSINKATITEEAYQKLASETLEELDWCLDQLETLQTRHSVSEMASNKFKRMLNRELTHLSEMSRSGNQVSEFISNTFLDKQHEVEIPSPTQKEKEKKKRPMSQISGVKKLMHSSSLTNSSIPRFGVKTEQEDVLAKELEDVNKWGLHVFRIAELSGNRPLTVIMHTIFQERDLLKTFKIPVDTLITYLMTLEDHYHADVAYHNNIHAADVVQSTHVLLSTPALEAVFTDLEILAAIFASAIHDVDHPGVSNQFLINTNSELALMYNDSSVLENHHLAVGFKLLQEENCDIFQNLTKKQRQSLRKMVIDIVLATDMSKHMNLLADLKTMVETKKVTSSGVLLLDNYSDRIQVLQNMVHCADLSNPTKPLQLYRQWTDRIMEEFFRQGDRERERGMEISPMCDKHNASVEKSQVGFIDYIVHPLWETWADLVHPDAQDILDTLEDNREWYQSTIPQSPSPAPDDPEEGRQGQTEKFQFELTLEEDGESDTEKDSGSQVEEDTSCSDSKTLCTQDSESTEIPLDEQVEEEAVGEEEESQPEACVIDDRSPDT

SEQ ID NO: 5486 - DNA, 7349 bp, Homo sapiens
ttctcactgccctgcggtgttttgaactgccttcttacagacgtcatacagcccttgaggaatagtttctgcctggtgagattgaatgatagttctcattcacaaaaccctggattctaagcagggacacacagaaattactttcgcaggtaaatcagcccacccagccaaagtgtggagagatttgttccttggctgacttctttgctccacggagaggagtgttttcctgtgcttgccctgaaatggaacttccttgacagctctcccgtgttacagtacctcccggtcattttctttttctctctctctacctgcgctcttcgagtgtcagaaacctttaaagctgttactatggaattgcaaaaaagagatcaagtgactctttcactatgctggtttcccttgtgacccagatgaagaatcaattcagaattcagttcctcccttggcattgcaagacacagaagaaactgtcacttcctaacagcctagtactggagtaaattcagtatgaaggaagaaagcgctcctgcgtgttagaaccttgcccatgagctggaccgaggacaggagatggactccaggaaaattggatttcttcaagcagcctcccttggaaatggaatatctttaaaatcttctttgcagaaagacagttagaatgtattaatcagaatagttgaagacttattttcctttttattttttttcaaaatgagcattattatgaagccaagatcccgatctacaagttccctaaggactgcagaggcagtttgttttgatgtggacaatggcacatctgcgggacggagtcccttggatcccatgaccagcccaggatccgggctaattctccaagcaaattttgtccacagtcaacgacgggagtccttcctgtatcgatccgacagcgattatgacctctctccaaagtctatgtcccggaactcctccattgccagtgatatacacggagatgacttgattgtgactccatttgctcaggtcttggccagtctgcgaactgtacgaaacaactttgctgcattaactaatttgcaagatcgagcacctagcaaaagatcacccatgtgcaaccaaccatccatcaacaaagccaccataacagaggaggcctaccagaaactggccagcgagaccctggaggagctggactggtgtctggaccagctagagaccctacagaccaggcactccgtcagtgagatggcctccaacaagtttaaaaggatgcttaatcgggagctcacccatctctctgaaatgagtcggtctggaaatcaagtgtcagagtttatatcaaacacattcttagataagcaacatgaagtggaaattccttctccaactcagaaggaaaaggagaaaaagaaaagaccaatgtctcagatcagtggagtcaagaaattgatgcacagctctagtctgactaattcaagtatcccaaggtttggagttaaaactgaacaagaagatgtccttgccaaggaactagaagatgtgaacaaatggggtcttcatgttttcagaatagcagagttgtctggtaaccggcccttgactgttatcatgcacaccatttttcaggaacgggatttattaaaaacatttaaaattccagtagatactttaattacatatcttatgactctcgaagaccattaccatgctgatgtggcctatcacaacaatatccatgctgcagatgttgtccagtctactcatgtgctattatctacacctgctttggaggctgtgtttacagatttggagattcttgcagcaatttttgccagtgcaatacatgatgtagatcatcctggtgtgtccaatcaatttctgatcaatacaaactctgaacttgccttgatgtacaatgattcctcagtcttagagaaccatcatttggctgtgggctttaaattgcttcaggaagaaaactgtgacattttccagaatttgaccaaaaaacaaagacaatctttaaggaaaatggtcattgacatcgtacttgcaacagatatgtcaaaacacatgaatctactggctgatttgaagactatggttgaaactaagaaagtgacaagctctggagttcttcttcttgataattattccgataggattcaggttcttcagaatatggtgcactgtgcagatctgagcaacccaacaaagcctctccagctgtaccgccagtggacggaccggataatggaggagttcttccgccaaggagaccgagagagggaacgtggcatggagataagccccatgtgtgacaagcacaatgcttccgtggaaaaatcacaggtgggcttcatagactatattgttcatcccctctgggagacatgggcagacctcgtccaccctgacgcccaggatattttggacactttggaggacaatcgtgaatggtaccagagcacaatccctcagagcccctctcctgcacctgatgacccagaggagggccggcagggtcaaactgagaaattccagtttgaactaactttagaggaagatggtgagtcagacacggaaaaggacagtggcagtcaagtggaagaagacactagctgcagtgactccaagactctttgtactcaagactcagagtctactgaaattccccttgatgaacaggttgaagaggaggcagtaggggaagaagaggaaagccagcctgaagcctgtgtcatagatgatcgttctcctgacacgtaacagtgcaaaaactttcatgccttttttttttttaagtagaaaaattgtttccaaagtgcatgtcacatgccacaaccacggtcacacctcactgtcatctgccaggacgtttgttgaacaaaactgaccttgactactcagtccagcgctcaggaatatcgtaaccagttttttcacctccatgtcatccgagcaaggtggacatcttcacgaacagcgtttttaacaagatttcagcttggtagagctgacaaagcagataaaatctactccaaattattttcaagagagtgtgactcatcaggcagcccaaaagtttattggacttggggtttctattcctttttatttgtttgcaatattttcagaagaaaggcattgcacagagtgaacttaatggacgaagcaacaaatatgtcaagaacaggacatagcacgaatctgttaccagtaggaggaggatgagccacagaaattgcataattttctaatttcaagtcttcctgatacatgactgaatagtgtggttcagtgagctgcactgacctctacattttgtatgatatgtaaaacagattttttgtagagcttacttttattattaaatgtattgaggtattatatttaaaaaaaactatgttcagaacttcatctgccactggttatttttttctaaggagtaacttgcaagttttcagtacaaatctgtgctacactggataaaaatctaatttatgaattttacttgcaccttatagttcatagcaattaactgatttgtagtgattcattgtttgttttatataccaatgacttccatattttaaaagagaaaaacaactttatgttgcaggaaaccctttttgtaagtctttattatttactttgcattttgtttcactctttccagataagcagagttgctcttcaccagtgtttttcttcatgtgcaaagtgactatttgttctataatacttttatgtgtgttatatcaaatgtgtcttaagcttcatgcaaactcagtcatcagttcgtgttgtctgaagcaagtgggagatatataaatacccagtagctaaaatggtcagtcttttttagatgttttcctacttagtatctcctaataacgttttgctgtgtcactagatgttcatttcacaagtgcatgtctttctaataatccacacatttcatgctctaataatccacacatttcatgctcatttttattgtttttacagccagttatagtaagaaaaaggtttttccccttgtgctgctttataatttagcgtgtgtctgaaccttatccatgtttgctagatgaggtcttgtcaaatatatcactaccattgtcaccggtgaaaagaaacaggtagttaagttagggttaacattcatttcaaccacgaggttgtatatcatgactagcttttactcttggtttacagagaaaagttaaacagccaactaggcagtttttaagaatattaacaatatattaacaaacaccaatacaactaatcctatttggttttaatgatttcaccatgggattaagaactatatcaggaacatccctgagaaacggttttaagtgtagcaactactcttccttaatggacagccacataacgtgtaggaagtcctttatcacttatcctcgatccataagcatatcttgcagaggggaactacttctttaaacacatggagggaaagaagatgatgccactggcaccagagggttagtactgtgatgcatcctaaaatatttattatattggtaaaaattctggttaaataaaaaattagagatcactcttggctgatttcagcaccaggaactgtattacagttttagagattaattcctagtgtttacctgattatagcagttggcatcatggggcatttaattctgactttatccccacgtcagccttaataaagtcttctttaccttctctatgaagactttaaagcccaaataatcatttttcacattgatattcaagaattgagatagatagaagccaaagtgggtatctgacaagtggaaaatcaaacgtttaagaagaattacaactctgaaaagcatttatatgtggaacttctcaaggagcctcctggggactggaaagtaagtcatcagccaggcaaatgactcatgctgaagagagtccccatttcagtcccctgagatctagctgatgcttagatcctttgaaataaaaattatgtctttataactctgatcttttacataaagcagaagaggaatcaactagttaattgcaaggtttctactctgtttcctctgtaaagatcagatggtaatctttcaaataagaaaaaaataaagacgtatgtttgaccaagtagtttcacaagaatatttgggaacttgtttcttttaattttatttgtccctgagtgaagtctagaaagaaaggtaaagagtctagagtttattcctctttccaaaacattctcattcctctcctccctacacttagtatttcccccacagagtgcctagaatcttaataatgaataaaataaaaagcagcaatatgtcattaacaaatccagacctgaaagggtaaagggtttataactgcactaataaagagaggctctttttttttcttccagtttgttggtttttaatggtaccgtgttgtaaagatacccactaatggacaatcaaattgcagaaaaggctcaatatccaagagacagggactaatgcactgtacaatctgcttatccttgcccttctctcttgccaaagtgtgcttcagaaatatatactgctttaaaaaagaataaaagaatatccttttacaagtggctttacatttcctaaaatgccataagaaaatgcaatatctgggtactgtatggggaaaaaaatgtccaagtttgtgtaaaaccagtgcatttcagcttgcaagttactgaacacaataatgctgttttaattttgttttatatcagttaaaattcacaataatgtagatagaacaaattacagacaaggaaagaaaaaacttgaatgaaatggattttacagaaagctttatgataatttttgaatgcattatttattttttgtgccatgcattttttttctcaccaaatgaccttacctgtaatacagtcttgtttgtctgtttacaaccatgtatttattgcaatgtacatactgtaatgttaattgtaaattatctgttcttattaaaacatcatcccatgatgggatggtgttgatatatttggaaactcttggtgagagaatgaatggtgtgtatacatactctgtacatttttcttttctcctgtaatatagtcttgtcaccttagagcttgtttatggaagattcaagaaaactataaaatacttaaagatatataaatttaaaaaaacatagctgcaggtctttggtcccagggctgtgccttaactttaaccaatattttcttctgttttgctgcatttgaaaggtaacagtggagctagggctgggcattttacatccaggcttttaattgattagaattctgccaataggtggattttacaaaaccacagacaacctctgaaagattctgagacccttttgagacagaagctcttaagtacttcttgccagggagcagcactgcatgtgtgatggttgtttgccatctgttgatcaggaactacttcagctacttgcatttgattatttcctttttttttttttttaactcggaaacacaactggggaaatatattctttcccagtgattataaacaatctttttcttttttttaagtccttttggcttctagagctcataggaaaatggacttgatttgaaattggagccagagtttactcgtgttggttatctattcatcagcttcctgacatgttaagagaatacattaaagagaaaatactgttttttaatcctaaaatttttcttccactaagataaaccaaatgtccttacatatatgtaaacccatctatttaaacgcaaaggtgggttgatgtcagtttacatagcagaaagcattcactatcctctaagatttgtttctgcaaaactttcattgctttagaattttaaaatttcaccttgtacaatggccagcccctaaagcaggaaacatttataatggattatatggaaacatcctcccagtacttgcccagcccttgaatcatgtggcttttcagtgaaaggaaagattctttttctaggaaaaatgagcctattttattttattttattttattttttgacacaaactgtagattttagcagccctggcccaaaggaatttgattacttttgttttaaacagtacaaaggggacactataattacaaaaacatccttaactgatttgagttgtttttatttctttggatatattttcagagtggtaaattgtgtgtgagaattacaaatgattattcttttagtggtttcttagcctctcttacagcccacggggatagtactgtacatcaataccttcatatgaaatttttatatgcaatgaaaataaaagcatgggttgattctgcct

SEQ ID NO: 5487 - protein, 679 aa, Homo sapiens; identical to SEQ ID NO: 5473

SEQ ID NO: 5488 - DNA, 6785 bp, Homo sapiens
actgcacaaaggaaatgccctcactcagctacaagtgcctcctgctccgtgcggggcctcagggccccagagccccgcaccagctctgacttctcgtggttcctggggatcttggcatcgtccttaaaaatggcttttgtttgggatcctctgggagccacggtgccaggaccatctacaagagccaaatcaagattgcgtttctcaaagtcctacagttttgatgtggacaatggcacatctgcgggacggagtcccttggatcccatgaccagcccaggatccgggctaattctccaagcaaattttgtccacagtcaacgacgggagtccttcctgtatcgatccgacagcgattatgacctctctccaaagtctatgtcccggaactcctccattgccagtgatatacacggagatgacttgattgtgactccatttgctcaggtcttggccagtctgcgaactgtacgaaacaactttgctgcattaactaatttgcaagatcgagcacctagcaaaagatcacccatgtgcaaccaaccatccatcaacaaagccaccataacagaggaggcctaccagaaactggccagcgagaccctggaggagctggactggtgtctggaccagctagagaccctacagaccaggcactccgtcagtgagatggcctccaacaagtttaaaaggatgcttaatcgggagctcacccatctctctgaaatgagtcggtctggaaatcaagtgtcagagtttatatcaaacacattcttagataagcaacatgaagtggaaattccttctccaactcagaaggaaaaggagaaaaagaaaagaccaatgtctcagatcagtggagtcaagaaattgatgcacagctctagtctgactaattcaagtatcccaaggtttggagttaaaactgaacaagaagatgtccttgccaaggaactagaagatgtgaacaaatggggtcttcatgttttcagaatagcagagttgtctggtaaccggcccttgactgttatcatgcacaccatttttcaggaacgggatttattaaaaacatttaaaattccagtagatactttaattacatatcttatgactctcgaagaccattaccatgctgatgtggcctatcacaacaatatccatgctgcagatgttgtccagtctactcatgtgctattatctacacctgctttggaggctgtgtttacagatttggagattcttgcagcaatttttgccagtgcaatacatgatgtagatcatcctggtgtgtccaatcaatttctgatcaatacaaactctgaacttgccttgatgtacaatgattcctcagtcttagagaaccatcatttggctgtgggctttaaattgcttcaggaagaaaactgtgacattttccagaatttgaccaaaaaacaaagacaatctttaaggaaaatggtcattgacatcgtacttgcaacagatatgtcaaaacacatgaatctactggctgatttgaagactatggttgaaactaagaaagtgacaagctctggagttcttcttcttgataattattccgataggattcaggttcttcagaatatggtgcactgtgcagatctgagcaacccaacaaagcctctccagctgtaccgccagtggacggaccggataatggaggagttcttccgccaaggagaccgagagagggaacgtggcatggagataagccccatgtgtgacaagcacaatgcttccgtggaaaaatcacaggtgggcttcatagactatattgttcatcccctctgggagacatgggcagacctcgtccaccctgacgcccaggatattttggacactttggaggacaatcgtgaatggtaccagagcacaatccctcagagcccctctcctgcacctgatgacccagaggagggccggcagggtcaaactgagaaattccagtttgaactaactttagaggaagatggtgagtcagacacggaaaaggacagtggcagtcaagtggaagaagacactagctgcagtgactccaagactctttgtactcaagactcagagtctactgaaattccccttgatgaacaggttgaagaggaggcagtaggggaagaagaggaaagccagcctgaagcctgtgtcatagatgatcgttctcctgacacgtaacagtgcaaaaactttcatgccttttttttttttaagtagaaaaattgtttccaaagtgcatgtcacatgccacaaccacggtcacacctcactgtcatctgccaggacgtttgttgaacaaaactgaccttgactactcagtccagcgctcaggaatatcgtaaccagttttttcacctccatgtcatccgagcaaggtggacatcttcacgaacagcgtttttaacaagatttcagcttggtagagctgacaaagcagataaaatctactccaaattattttcaagagagtgtgactcatcaggcagcccaaaagtttattggacttggggtttctattcctttttatttgtttgcaatattttcagaagaaaggcattgcacagagtgaacttaatggacgaagcaacaaatatgtcaagaacaggacatagcacgaatctgttaccagtaggaggaggatgagccacagaaattgcataattttctaatttcaagtcttcctgatacatgactgaatagtgtggttcagtgagctgcactgacctctacattttgtatgatatgtaaaacagattttttgtagagcttacttttattattaaatgtattgaggtattatatttaaaaaaaactatgttcagaacttcatctgccactggttatttttttctaaggagtaacttgcaagttttcagtacaaatctgtgctacactggataaaaatctaatttatgaattttacttgcaccttatagttcatagcaattaactgatttgtagtgattcattgtttgttttatataccaatgacttccatattttaaaagagaaaaacaactttatgttgcaggaaaccctttttgtaagtctttattatttactttgcattttgtttcactctttccagataagcagagttgctcttcaccagtgtttttcttcatgtgcaaagtgactatttgttctataatacttttatgtgtgttatatcaaatgtgtcttaagcttcatgcaaactcagtcatcagttcgtgttgtctgaagcaagtgggagatatataaatacccagtagctaaaatggtcagtcttttttagatgttttcctacttagtatctcctaataacgttttgctgtgtcactagatgttcatttcacaagtgcatgtctttctaataatccacacatttcatgctctaataatccacacatttcatgctcatttttattgtttttacagccagttatagtaagaaaaaggtttttccccttgtgctgctttataatttagcgtgtgtctgaaccttatccatgtttgctagatgaggtcttgtcaaatatatcactaccattgtcaccggtgaaaagaaacaggtagttaagttagggttaacattcatttcaaccacgaggttgtatatcatgactagcttttactcttggtttacagagaaaagttaaacagccaactaggcagtttttaagaatattaacaatatattaacaaacaccaatacaactaatcctatttggttttaatgatttcaccatgggattaagaactatatcaggaacatccctgagaaacggttttaagtgtagcaactactcttccttaatggacagccacataacgtgtaggaagtcctttatcacttatcctcgatccataagcatatcttgcagaggggaactacttctttaaacacatggagggaaagaagatgatgccactggcaccagagggttagtactgtgatgcatcctaaaatatttattatattggtaaaaattctggttaaataaaaaattagagatcactcttggctgatttcagcaccaggaactgtattacagttttagagattaattcctagtgtttacctgattatagcagttggcatcatggggcatttaattctgactttatccccacgtcagccttaataaagtcttctttaccttctctatgaagactttaaagcccaaataatcatttttcacattgatattcaagaattgagatagatagaagccaaagtgggtatctgacaagtggaaaatcaaacgtttaagaagaattacaactctgaaaagcatttatatgtggaacttctcaaggagcctcctggggactggaaagtaagtcatcagccaggcaaatgactcatgctgaagagagtccccatttcagtcccctgagatctagctgatgcttagatcctttgaaataaaaattatgtctttataactctgatcttttacataaagcagaagaggaatcaactagttaattgcaaggtttctactctgtttcctctgtaaagatcagatggtaatctttcaaataagaaaaaaataaagacgtatgtttgaccaagtagtttcacaagaatatttgggaacttgtttcttttaattttatttgtccctgagtgaagtctagaaagaaaggtaaagagtctagagtttattcctctttccaaaacattctcattcctctcctccctacacttagtatttcccccacagagtgcctagaatcttaataatgaataaaataaaaagcagcaatatgtcattaacaaatccagacctgaaagggtaaagggtttataactgcactaataaagagaggctctttttttttcttccagtttgttggtttttaatggtaccgtgttgtaaagatacccactaatggacaatcaaattgcagaaaaggctcaatatccaagagacagggactaatgcactgtacaatctgcttatccttgcccttctctcttgccaaagtgtgcttcagaaatatatactgctttaaaaaagaataaaagaatatccttttacaagtggctttacatttcctaaaatgccataagaaaatgcaatatctgggtactgtatggggaaaaaaatgtccaagtttgtgtaaaaccagtgcatttcagcttgcaagttactgaacacaataatgctgttttaattttgttttatatcagttaaaattcacaataatgtagatagaacaaattacagacaaggaaagaaaaaacttgaatgaaatggattttacagaaagctttatgataatttttgaatgcattatttattttttgtgccatgcattttttttctcaccaaatgaccttacctgtaatacagtcttgtttgtctgtttacaaccatgtatttattgcaatgtacatactgtaatgttaattgtaaattatctgttcttattaaaacatcatcccatgatgggatggtgttgatatatttggaaactcttggtgagagaatgaatggtgtgtatacatactctgtacatttttcttttctcctgtaatatagtcttgtcaccttagagcttgtttatggaagattcaagaaaactataaaatacttaaagatatataaatttaaaaaaacatagctgcaggtctttggtcccagggctgtgccttaactttaaccaatattttcttctgttttgctgcatttgaaaggtaacagtggagctagggctgggcattttacatccaggcttttaattgattagaattctgccaataggtggattttacaaaaccacagacaacctctgaaagattctgagacccttttgagacagaagctcttaagtacttcttgccagggagcagcactgcatgtgtgatggttgtttgccatctgttgatcaggaactacttcagctacttgcatttgattatttcctttttttttttttttaactcggaaacacaactggggaaatatattctttcccagtgattataaacaatctttttcttttttttaagtccttttggcttctagagctcataggaaaatggacttgatttgaaattggagccagagtttactcgtgttggttatctattcatcagcttcctgacatgttaagagaatacattaaagagaaaatactgttttttaatcctaaaatttttcttccactaagataaaccaaatgtccttacatatatgtaaacccatctatttaaacgcaaaggtgggttgatgtcagtttacatagcagaaagcattcactatcctctaagatttgtttctgcaaaactttcattgctttagaattttaaaatttcaccttgtacaatggccagcccctaaagcaggaaacatttataatggattatatggaaacatcctcccagtacttgcccagcccttgaatcatgtggcttttcagtgaaaggaaagattctttttctaggaaaaatgagcctattttattttattttattttattttttgacacaaactgtagattttagcagccctggcccaaaggaatttgattacttttgttttaaacagtacaaaggggacactataattacaaaaacatccttaactgatttgagttgtttttatttctttggatatattttcagagtggtaaattgtgtgtgagaattacaaatgattattcttttagtggtttcttagcctctcttacagcccacggggatagtactgtacatcaataccttcatatgaaatttttatatgcaatgaaaataaaagcatgggttgattctgcct

SEQ ID NO: 5489 - protein, 687 aa, Homo sapiens; identical to SEQ ID NO: 5475

SEQ ID NO: 5490 - DNA, 6279 bp, Homo sapiens
gacagaagatctgcgaacatgatgcacgtgaataattttccctttagaaggcattcctggatatgaggaggcctaccagaaactggccagcgagaccctggaggagctggactggtgtctggaccagctagagaccctacagaccaggcactccgtcagtgagatggcctccaacaagtttaaaaggatgcttaatcgggagctcacccatctctctgaaatgagtcggtctggaaatcaagtgtcagagtttatatcaaacacattcttagataagcaacatgaagtggaaattccttctccaactcagaaggaaaaggagaaaaagaaaagaccaatgtctcagatcagtggagtcaagaaattgatgcacagctctagtctgactaattcaagtatcccaaggtttggagttaaaactgaacaagaagatgtccttgccaaggaactagaagatgtgaacaaatggggtcttcatgttttcagaatagcagagttgtctggtaaccggcccttgactgttatcatgcacaccatttttcaggaacgggatttattaaaaacatttaaaattccagtagatactttaattacatatcttatgactctcgaagaccattaccatgctgatgtggcctatcacaacaatatccatgctgcagatgttgtccagtctactcatgtgctattatctacacctgctttggaggctgtgtttacagatttggagattcttgcagcaatttttgccagtgcaatacatgatgtagatcatcctggtgtgtccaatcaatttctgatcaatacaaactctgaacttgccttgatgtacaatgattcctcagtcttagagaaccatcatttggctgtgggctttaaattgcttcaggaagaaaactgtgacattttccagaatttgaccaaaaaacaaagacaatctttaaggaaaatggtcattgacatcgtacttgcaacagatatgtcaaaacacatgaatctactggctgatttgaagactatggttgaaactaagaaagtgacaagctctggagttcttcttcttgataattattccgataggattcaggttcttcagaatatggtgcactgtgcagatctgagcaacccaacaaagcctctccagctgtaccgccagtggacggaccggataatggaggagttcttccgccaaggagaccgagagagggaacgtggcatggagataagccccatgtgtgacaagcacaatgcttccgtggaaaaatcacaggtgggcttcatagactatattgttcatcccctctgggagacatgggcagacctcgtccaccctgacgcccaggatattttggacactttggaggacaatcgtgaatggtaccagagcacaatccctcagagcccctctcctgcacctgatgacccagaggagggccggcagggtcaaactgagaaattccagtttgaactaactttagaggaagatggtgagtcagacacggaaaaggacagtggcagtcaagtggaagaagacactagctgcagtgactccaagactctttgtactcaagactcagagtctactgaaattccccttgatgaacaggttgaagaggaggcagtaggggaagaagaggaaagccagcctgaagcctgtgtcatagatgatcgttctcctgacacgtaacagtgcaaaaactttcatgccttttttttttttaagtagaaaaattgtttccaaagtgcatgtcacatgccacaaccacggtcacacctcactgtcatctgccaggacgtttgttgaacaaaactgaccttgactactcagtccagcgctcaggaatatcgtaaccagttttttcacctccatgtcatccgagcaaggtggacatcttcacgaacagcgtttttaacaagatttcagcttggtagagctgacaaagcagataaaatctactccaaattattttcaagagagtgtgactcatcaggcagcccaaaagtttattggacttggggtttctattcctttttatttgtttgcaatattttcagaagaaaggcattgcacagagtgaacttaatggacgaagcaacaaatatgtcaagaacaggacatagcacgaatctgttaccagtaggaggaggatgagccacagaaattgcataattttctaatttcaagtcttcctgatacatgactgaatagtgtggttcagtgagctgcactgacctctacattttgtatgatatgtaaaacagattttttgtagagcttacttttattattaaatgtattgaggtattatatttaaaaaaaactatgttcagaacttcatctgccactggttatttttttctaaggagtaacttgcaagttttcagtacaaatctgtgctacactggataaaaatctaatttatgaattttacttgcaccttatagttcatagcaattaactgatttgtagtgattcattgtttgttttatataccaatgacttccatattttaaaagagaaaaacaactttatgttgcaggaaaccctttttgtaagtctttattatttactttgcattttgtttcactctttccagataagcagagttgctcttcaccagtgtttttcttcatgtgcaaagtgactatttgttctataatacttttatgtgtgttatatcaaatgtgtcttaagcttcatgcaaactcagtcatcagttcgtgttgtctgaagcaagtgggagatatataaatacccagtagctaaaatggtcagtcttttttagatgttttcctacttagtatctcctaataacgttttgctgtgtcactagatgttcatttcacaagtgcatgtctttctaataatccacacatttcatgctctaataatccacacatttcatgctcatttttattgtttttacagccagttatagtaagaaaaaggtttttccccttgtgctgctttataatttagcgtgtgtctgaaccttatccatgtttgctagatgaggtcttgtcaaatatatcactaccattgtcaccggtgaaaagaaacaggtagttaagttagggttaacattcatttcaaccacgaggttgtatatcatgactagcttttactcttggtttacagagaaaagttaaacagccaactaggcagtttttaagaatattaacaatatattaacaaacaccaatacaactaatcctatttggttttaatgatttcaccatgggattaagaactatatcaggaacatccctgagaaacggttttaagtgtagcaactactcttccttaatggacagccacataacgtgtaggaagtcctttatcacttatcctcgatccataagcatatcttgcagaggggaactacttctttaaacacatggagggaaagaagatgatgccactggcaccagagggttagtactgtgatgcatcctaaaatatttattatattggtaaaaattctggttaaataaaaaattagagatcactcttggctgatttcagcaccaggaactgtattacagttttagagattaattcctagtgtttacctgattatagcagttggcatcatggggcatttaattctgactttatccccacgtcagccttaataaagtcttctttaccttctctatgaagactttaaagcccaaataatcatttttcacattgatattcaagaattgagatagatagaagccaaagtgggtatctgacaagtggaaaatcaaacgtttaagaagaattacaactctgaaaagcatttatatgtggaacttctcaaggagcctcctggggactggaaagtaagtcatcagccaggcaaatgactcatgctgaagagagtccccatttcagtcccctgagatctagctgatgcttagatcctttgaaataaaaattatgtctttataactctgatcttttacataaagcagaagaggaatcaactagttaattgcaaggtttctactctgtttcctctgtaaagatcagatggtaatctttcaaataagaaaaaaataaagacgtatgtttgaccaagtagtttcacaagaatatttgggaacttgtttcttttaattttatttgtccctgagtgaagtctagaaagaaaggtaaagagtctagagtttattcctctttccaaaacattctcattcctctcctccctacacttagtatttcccccacagagtgcctagaatcttaataatgaataaaataaaaagcagcaatatgtcattaacaaatccagacctgaaagggtaaagggtttataactgcactaataaagagaggctctttttttttcttccagtttgttggtttttaatggtaccgtgttgtaaagatacccactaatggacaatcaaattgcagaaaaggctcaatatccaagagacagggactaatgcactgtacaatctgcttatccttgcccttctctcttgccaaagtgtgcttcagaaatatatactgctttaaaaaagaataaaagaatatccttttacaagtggctttacatttcctaaaatgccataagaaaatgcaatatctgggtactgtatggggaaaaaaatgtccaagtttgtgtaaaaccagtgcatttcagcttgcaagttactgaacacaataatgctgttttaattttgttttatatcagttaaaattcacaataatgtagatagaacaaattacagacaaggaaagaaaaaacttgaatgaaatggattttacagaaagctttatgataatttttgaatgcattatttattttttgtgccatgcattttttttctcaccaaatgaccttacctgtaatacagtcttgtttgtctgtttacaaccatgtatttattgcaatgtacatactgtaatgttaattgtaaattatctgttcttattaaaacatcatcccatgatgggatggtgttgatatatttggaaactcttggtgagagaatgaatggtgtgtatacatactctgtacatttttcttttctcctgtaatatagtcttgtcaccttagagcttgtttatggaagattcaagaaaactataaaatacttaaagatatataaatttaaaaaaacatagctgcaggtctttggtcccagggctgtgccttaactttaaccaatattttcttctgttttgctgcatttgaaaggtaacagtggagctagggctgggcattttacatccaggcttttaattgattagaattctgccaataggtggattttacaaaaccacagacaacctctgaaagattctgagacccttttgagacagaagctcttaagtacttcttgccagggagcagcactgcatgtgtgatggttgtttgccatctgttgatcaggaactacttcagctacttgcatttgattatttcctttttttttttttttaactcggaaacacaactggggaaatatattctttcccagtgattataaacaatctttttcttttttttaagtccttttggcttctagagctcataggaaaatggacttgatttgaaattggagccagagtttactcgtgttggttatctattcatcagcttcctgacatgttaagagaatacattaaagagaaaatactgttttttaatcctaaaatttttcttccactaagataaaccaaatgtccttacatatatgtaaacccatctatttaaacgcaaaggtgggttgatgtcagtttacatagcagaaagcattcactatcctctaagatttgtttctgcaaaactttcattgctttagaattttaaaatttcaccttgtacaatggccagcccctaaagcaggaaacatttataatggattatatggaaacatcctcccagtacttgcccagcccttgaatcatgtggcttttcagtgaaaggaaagattctttttctaggaaaaatgagcctattttattttattttattttattttttgacacaaactgtagattttagcagccctggcccaaaggaatttgattacttttgttttaaacagtacaaaggggacactataattacaaaaacatccttaactgatttgagttgtttttatttctttggatatattttcagagtggtaaattgtgtgtgagaattacaaatgattattcttttagtggtttcttagcctctcttacagcccacggggatagtactgtacatcaataccttcatatgaaatttttatatgcaatgaaaataaaagcatgggttgattctgcct

SEQ ID NO: 5491 - protein, 507 aa, Homo sapiens; identical to SEQ ID NO: 5477

SEQ ID NO: 5492 - DNA, 6738 bp, Homo sapiens
caatacttgttgcaataattgcccacgatagctgctcaaacaagagagttggaattcatctgtaaaaatcactacatgtaacgtaggagacaagaaaaatattaatgacagaagatctgcgaacatgatgcacgtgaataattttccctttagaaggcattcctggatatgttttgatgtggacaatggcacatctgcgggacggagtcccttggatcccatgaccagcccaggatccgggctaattctccaagcaaattttgtccacagtcaacgacgggagtccttcctgtatcgatccgacagcgattatgacctctctccaaagtctatgtcccggaactcctccattgccagtgatatacacggagatgacttgattgtgactccatttgctcaggtcttggccagtctgcgaactgtacgaaacaactttgctgcattaactaatttgcaagatcgagcacctagcaaaagatcacccatgtgcaaccaaccatccatcaacaaagccaccataacagaggaggcctaccagaaactggccagcgagaccctggaggagctggactggtgtctggaccagctagagaccctacagaccaggcactccgtcagtgagatggcctccaacaagtttaaaaggatgcttaatcgggagctcacccatctctctgaaatgagtcggtctggaaatcaagtgtcagagtttatatcaaacacattcttagataagcaacatgaagtggaaattccttctccaactcagaaggaaaaggagaaaaagaaaagaccaatgtctcagatcagtggagtcaagaaattgatgcacagctctagtctgactaattcaagtatcccaaggtttggagttaaaactgaacaagaagatgtccttgccaaggaactagaagatgtgaacaaatggggtcttcatgttttcagaatagcagagttgtctggtaaccggcccttgactgttatcatgcacaccatttttcaggaacgggatttattaaaaacatttaaaattccagtagatactttaattacatatcttatgactctcgaagaccattaccatgctgatgtggcctatcacaacaatatccatgctgcagatgttgtccagtctactcatgtgctattatctacacctgctttggaggctgtgtttacagatttggagattcttgcagcaatttttgccagtgcaatacatgatgtagatcatcctggtgtgtccaatcaatttctgatcaatacaaactctgaacttgccttgatgtacaatgattcctcagtcttagagaaccatcatttggctgtgggctttaaattgcttcaggaagaaaactgtgacattttccagaatttgaccaaaaaacaaagacaatctttaaggaaaatggtcattgacatcgtacttgcaacagatatgtcaaaacacatgaatctactggctgatttgaagactatggttgaaactaagaaagtgacaagctctggagttcttcttcttgataattattccgataggattcaggttcttcagaatatggtgcactgtgcagatctgagcaacccaacaaagcctctccagctgtaccgccagtggacggaccggataatggaggagttcttccgccaaggagaccgagagagggaacgtggcatggagataagccccatgtgtgacaagcacaatgcttccgtggaaaaatcacaggtgggcttcatagactatattgttcatcccctctgggagacatgggcagacctcgtccaccctgacgcccaggatattttggacactttggaggacaatcgtgaatggtaccagagcacaatccctcagagcccctctcctgcacctgatgacccagaggagggccggcagggtcaaactgagaaattccagtttgaactaactttagaggaagatggtgagtcagacacggaaaaggacagtggcagtcaagtggaagaagacactagctgcagtgactccaagactctttgtactcaagactcagagtctactgaaattccccttgatgaacaggttgaagaggaggcagtaggggaagaagaggaaagccagcctgaagcctgtgtcatagatgatcgttctcctgacacgtaacagtgcaaaaactttcatgccttttttttttttaagtagaaaaattgtttccaaagtgcatgtcacatgccacaaccacggtcacacctcactgtcatctgccaggacgtttgttgaacaaaactgaccttgactactcagtccagcgctcaggaatatcgtaaccagttttttcacctccatgtcatccgagcaaggtggacatcttcacgaacagcgtttttaacaagatttcagcttggtagagctgacaaagcagataaaatctactccaaattattttcaagagagtgtgactcatcaggcagcccaaaagtttattggacttggggtttctattcctttttatttgtttgcaatattttcagaagaaaggcattgcacagagtgaacttaatggacgaagcaacaaatatgtcaagaacaggacatagcacgaatctgttaccagtaggaggaggatgagccacagaaattgcataattttctaatttcaagtcttcctgatacatgactgaatagtgtggttcagtgagctgcactgacctctacattttgtatgatatgtaaaacagattttttgtagagcttacttttattattaaatgtattgaggtattatatttaaaaaaaactatgttcagaacttcatctgccactggttatttttttctaaggagtaacttgcaagttttcagtacaaatctgtgctacactggataaaaatctaatttatgaattttacttgcaccttatagttcatagcaattaactgatttgtagtgattcattgtttgttttatataccaatgacttccatattttaaaagagaaaaacaactttatgttgcaggaaaccctttttgtaagtctttattatttactttgcattttgtttcactctttccagataagcagagttgctcttcaccagtgtttttcttcatgtgcaaagtgactatttgttctataatacttttatgtgtgttatatcaaatgtgtcttaagcttcatgcaaactcagtcatcagttcgtgttgtctgaagcaagtgggagatatataaatacccagtagctaaaatggtcagtcttttttagatgttttcctacttagtatctcctaataacgttttgctgtgtcactagatgttcatttcacaagtgcatgtctttctaataatccacacatttcatgctctaataatccacacatttcatgctcatttttattgtttttacagccagttatagtaagaaaaaggtttttccccttgtgctgctttataatttagcgtgtgtctgaaccttatccatgtttgctagatgaggtcttgtcaaatatatcactaccattgtcaccggtgaaaagaaacaggtagttaagttagggttaacattcatttcaaccacgaggttgtatatcatgactagcttttactcttggtttacagagaaaagttaaacagccaactaggcagtttttaagaatattaacaatatattaacaaacaccaatacaactaatcctatttggttttaatgatttcaccatgggattaagaactatatcaggaacatccctgagaaacggttttaagtgtagcaactactcttccttaatggacagccacataacgtgtaggaagtcctttatcacttatcctcgatccataagcatatcttgcagaggggaactacttctttaaacacatggagggaaagaagatgatgccactggcaccagagggttagtactgtgatgcatcctaaaatatttattatattggtaaaaattctggttaaataaaaaattagagatcactcttggctgatttcagcaccaggaactgtattacagttttagagattaattcctagtgtttacctgattatagcagttggcatcatggggcatttaattctgactttatccccacgtcagccttaataaagtcttctttaccttctctatgaagactttaaagcccaaataatcatttttcacattgatattcaagaattgagatagatagaagccaaagtgggtatctgacaagtggaaaatcaaacgtttaagaagaattacaactctgaaaagcatttatatgtggaacttctcaaggagcctcctggggactggaaagtaagtcatcagccaggcaaatgactcatgctgaagagagtccccatttcagtcccctgagatctagctgatgcttagatcctttgaaataaaaattatgtctttataactctgatcttttacataaagcagaagaggaatcaactagttaattgcaaggtttctactctgtttcctctgtaaagatcagatggtaatctttcaaataagaaaaaaataaagacgtatgtttgaccaagtagtttcacaagaatatttgggaacttgtttcttttaattttatttgtccctgagtgaagtctagaaagaaaggtaaagagtctagagtttattcctctttccaaaacattctcattcctctcctccctacacttagtatttcccccacagagtgcctagaatcttaataatgaataaaataaaaagcagcaatatgtcattaacaaatccagacctgaaagggtaaagggtttataactgcactaataaagagaggctctttttttttcttccagtttgttggtttttaatggtaccgtgttgtaaagatacccactaatggacaatcaaattgcagaaaaggctcaatatccaagagacagggactaatgcactgtacaatctgcttatccttgcccttctctcttgccaaagtgtgcttcagaaatatatactgctttaaaaaagaataaaagaatatccttttacaagtggctttacatttcctaaaatgccataagaaaatgcaatatctgggtactgtatggggaaaaaaatgtccaagtttgtgtaaaaccagtgcatttcagcttgcaagttactgaacacaataatgctgttttaattttgttttatatcagttaaaattcacaataatgtagatagaacaaattacagacaaggaaagaaaaaacttgaatgaaatggattttacagaaagctttatgataatttttgaatgcattatttattttttgtgccatgcattttttttctcaccaaatgaccttacctgtaatacagtcttgtttgtctgtttacaaccatgtatttattgcaatgtacatactgtaatgttaattgtaaattatctgttcttattaaaacatcatcccatgatgggatggtgttgatatatttggaaactcttggtgagagaatgaatggtgtgtatacatactctgtacatttttcttttctcctgtaatatagtcttgtcaccttagagcttgtttatggaagattcaagaaaactataaaatacttaaagatatataaatttaaaaaaacatagctgcaggtctttggtcccagggctgtgccttaactttaaccaatattttcttctgttttgctgcatttgaaaggtaacagtggagctagggctgggcattttacatccaggcttttaattgattagaattctgccaataggtggattttacaaaaccacagacaacctctgaaagattctgagacccttttgagacagaagctcttaagtacttcttgccagggagcagcactgcatgtgtgatggttgtttgccatctgttgatcaggaactacttcagctacttgcatttgattatttcctttttttttttttttaactcggaaacacaactggggaaatatattctttcccagtgattataaacaatctttttcttttttttaagtccttttggcttctagagctcataggaaaatggacttgatttgaaattggagccagagtttactcgtgttggttatctattcatcagcttcctgacatgttaagagaatacattaaagagaaaatactgttttttaatcctaaaatttttcttccactaagataaaccaaatgtccttacatatatgtaaacccatctatttaaacgcaaaggtgggttgatgtcagtttacatagcagaaagcattcactatcctctaagatttgtttctgcaaaactttcattgctttagaattttaaaatttcaccttgtacaatggccagcccctaaagcaggaaacatttataatggattatatggaaacatcctcccagtacttgcccagcccttgaatcatgtggcttttcagtgaaaggaaagattctttttctaggaaaaatgagcctattttattttattttattttattttttgacacaaactgtagattttagcagccctggcccaaaggaatttgattacttttgttttaaacagtacaaaggggacactataattacaaaaacatccttaactgatttgagttgtttttatttctttggatatattttcagagtggtaaattgtgtgtgagaattacaaatgattattcttttagtggtttcttagcctctcttacagcccacggggatagtactgtacatcaataccttcatatgaaatttttatatgcaatgaaaataaaagcatgggttgattctgcct

SEQ ID NO: 5493 - protein, 673 aa, Homo sapiens; identical to SEQ ID NO: 636

SEQ ID NO: 5494 - DNA, 7170 bp, Homo sapiens
tgcggcgcattagttccaatagtttaacaggctgctttgtagcacggacaaagccgtgcgagcgcggtgctttccctccttgttcatttgctatgcgagcttgtcagtgatctttggcaggggcttgggagaggaggggtgacgtttaatacgcttccgcggaggagtgcgctcgcctcctctgcacccagccccaggctctacagagagactgaggcaggcgactgaatgcactaacagcagcaggctcagacctgcttccctggacatttccgggaccgtgagcgagggaaccacgttgccctggattcttgccagctgtacaaagttgaccaggaaaatggctcagcagacaagcccggacactttaacagtacctgaagtggataatccgcattgtccaaacccgtggctgaacgaagaccttgtgaaatccttgcgagaaaacctgttgcagcatgagaagtccaagacagcgaggaaatcggtttctcccaagctctctccagtgatctctccgagaaattcccccaggcttctgcgcagaatgcttctcagcagcaacatccccaaacagcggcgtttcacggtggcacatacatgttttgatgtggacaatggcacatctgcgggacggagtcccttggatcccatgaccagcccaggatccgggctaattctccaagcaaattttgtccacagtcaacgacgggagtccttcctgtatcgatccgacagcgattatgacctctctccaaagtctatgtcccggaactcctccattgccagtgatatacacggagatgacttgattgtgactccatttgctcaggtcttggccagtctgcgaactgtacgaaacaactttgctgcattaactaatttgcaagatcgagcacctagcaaaagatcacccatgtgcaaccaaccatccatcaacaaagccaccataacagaggaggcctaccagaaactggccagcgagaccctggaggagctggactggtgtctggaccagctagagaccctacagaccaggcactccgtcagtgagatggcctccaacaagtttaaaaggatgcttaatcgggagctcacccatctctctgaaatgagtcggtctggaaatcaagtgtcagagtttatatcaaacacattcttagataagcaacatgaagtggaaattccttctccaactcagaaggaaaaggagaaaaagaaaagaccaatgtctcagatcagtggagtcaagaaattgatgcacagctctagtctgactaattcaagtatcccaaggtttggagttaaaactgaacaagaagatgtccttgccaaggaactagaagatgtgaacaaatggggtcttcatgttttcagaatagcagagttgtctggtaaccggcccttgactgttatcatgcacaccatttttcaggaacgggatttattaaaaacatttaaaattccagtagatactttaattacatatcttatgactctcgaagaccattaccatgctgatgtggcctatcacaacaatatccatgctgcagatgttgtccagtctactcatgtgctattatctacacctgctttggaggctgtgtttacagatttggagattcttgcagcaatttttgccagtgcaatacatgatgtagatcatcctggtgtgtccaatcaatttctgatcaatacaaactctgaacttgccttgatgtacaatgattcctcagtcttagagaaccatcatttggctgtgggctttaaattgcttcaggaagaaaactgtgacattttccagaatttgaccaaaaaacaaagacaatctttaaggaaaatggtcattgacatcgtacttgcaacagatatgtcaaaacacatgaatctactggctgatttgaagactatggttgaaactaagaaagtgacaagctctggagttcttcttcttgataattattccgataggattcaggttcttcagaatatggtgcactgtgcagatctgagcaacccaacaaagcctctccagctgtaccgccagtggacggaccggataatggaggagttcttccgccaaggagaccgagagagggaacgtggcatggagataagccccatgtgtgacaagcacaatgcttccgtggaaaaatcacaggtgggcttcatagactatattgttcatcccctctgggagacatgggcagacctcgtccaccctgacgcccaggatattttggacactttggaggacaatcgtgaatggtaccagagcacaatccctcagagcccctctcctgcacctgatgacccagaggagggccggcagggtcaaactgagaaattccagtttgaactaactttagaggaagatggtgagtcagacacggaaaaggacagtggcagtcaagtggaagaagacactagctgcagtgactccaagactctttgtactcaagactcagagtctactgaaattccccttgatgaacaggttgaagaggaggcagtaggggaagaagaggaaagccagcctgaagcctgtgtcatagatgatcgttctcctgacacgtaacagtgcaaaaactttcatgccttttttttttttaagtagaaaaattgtttccaaagtgcatgtcacatgccacaaccacggtcacacctcactgtcatctgccaggacgtttgttgaacaaaactgaccttgactactcagtccagcgctcaggaatatcgtaaccagttttttcacctccatgtcatccgagcaaggtggacatcttcacgaacagcgtttttaacaagatttcagcttggtagagctgacaaagcagataaaatctactccaaattattttcaagagagtgtgactcatcaggcagcccaaaagtttattggacttggggtttctattcctttttatttgtttgcaatattttcagaagaaaggcattgcacagagtgaacttaatggacgaagcaacaaatatgtcaagaacaggacatagcacgaatctgttaccagtaggaggaggatgagccacagaaattgcataattttctaatttcaagtcttcctgatacatgactgaatagtgtggttcagtgagctgcactgacctctacattttgtatgatatgtaaaacagattttttgtagagcttacttttattattaaatgtattgaggtattatatttaaaaaaaactatgttcagaacttcatctgccactggttatttttttctaaggagtaacttgcaagttttcagtacaaatctgtgctacactggataaaaatctaatttatgaattttacttgcaccttatagttcatagcaattaactgatttgtagtgattcattgtttgttttatataccaatgacttccatattttaaaagagaaaaacaactttatgttgcaggaaaccctttttgtaagtctttattatttactttgcattttgtttcactctttccagataagcagagttgctcttcaccagtgtttttcttcatgtgcaaagtgactatttgttctataatacttttatgtgtgttatatcaaatgtgtcttaagcttcatgcaaactcagtcatcagttcgtgttgtctgaagcaagtgggagatatataaatacccagtagctaaaatggtcagtcttttttagatgttttcctacttagtatctcctaataacgttttgctgtgtcactagatgttcatttcacaagtgcatgtctttctaataatccacacatttcatgctctaataatccacacatttcatgctcatttttattgtttttacagccagttatagtaagaaaaaggtttttccccttgtgctgctttataatttagcgtgtgtctgaaccttatccatgtttgctagatgaggtcttgtcaaatatatcactaccattgtcaccggtgaaaagaaacaggtagttaagttagggttaacattcatttcaaccacgaggttgtatatcatgactagcttttactcttggtttacagagaaaagttaaacagccaactaggcagtttttaagaatattaacaatatattaacaaacaccaatacaactaatcctatttggttttaatgatttcaccatgggattaagaactatatcaggaacatccctgagaaacggttttaagtgtagcaactactcttccttaatggacagccacataacgtgtaggaagtcctttatcacttatcctcgatccataagcatatcttgcagaggggaactacttctttaaacacatggagggaaagaagatgatgccactggcaccagagggttagtactgtgatgcatcctaaaatatttattatattggtaaaaattctggttaaataaaaaattagagatcactcttggctgatttcagcaccaggaactgtattacagttttagagattaattcctagtgtttacctgattatagcagttggcatcatggggcatttaattctgactttatccccacgtcagccttaataaagtcttctttaccttctctatgaagactttaaagcccaaataatcatttttcacattgatattcaagaattgagatagatagaagccaaagtgggtatctgacaagtggaaaatcaaacgtttaagaagaattacaactctgaaaagcatttatatgtggaacttctcaaggagcctcctggggactggaaagtaagtcatcagccaggcaaatgactcatgctgaagagagtccccatttcagtcccctgagatctagctgatgcttagatcctttgaaataaaaattatgtctttataactctgatcttttacataaagcagaagaggaatcaactagttaattgcaaggtttctactctgtttcctctgtaaagatcagatggtaatctttcaaataagaaaaaaataaagacgtatgtttgaccaagtagtttcacaagaatatttgggaacttgtttcttttaattttatttgtccctgagtgaagtctagaaagaaaggtaaagagtctagagtttattcctctttccaaaacattctcattcctctcctccctacacttagtatttcccccacagagtgcctagaatcttaataatgaataaaataaaaagcagcaatatgtcattaacaaatccagacctgaaagggtaaagggtttataactgcactaataaagagaggctctttttttttcttccagtttgttggtttttaatggtaccgtgttgtaaagatacccactaatggacaatcaaattgcagaaaaggctcaatatccaagagacagggactaatgcactgtacaatctgcttatccttgcccttctctcttgccaaagtgtgcttcagaaatatatactgctttaaaaaagaataaaagaatatccttttacaagtggctttacatttcctaaaatgccataagaaaatgcaatatctgggtactgtatggggaaaaaaatgtccaagtttgtgtaaaaccagtgcatttcagcttgcaagttactgaacacaataatgctgttttaattttgttttatatcagttaaaattcacaataatgtagatagaacaaattacagacaaggaaagaaaaaacttgaatgaaatggattttacagaaagctttatgataatttttgaatgcattatttattttttgtgccatgcattttttttctcaccaaatgaccttacctgtaatacagtcttgtttgtctgtttacaaccatgtatttattgcaatgtacatactgtaatgttaattgtaaattatctgttcttattaaaacatcatcccatgatgggatggtgttgatatatttggaaactcttggtgagagaatgaatggtgtgtatacatactctgtacatttttcttttctcctgtaatatagtcttgtcaccttagagcttgtttatggaagattcaagaaaactataaaatacttaaagatatataaatttaaaaaaacatagctgcaggtctttggtcccagggctgtgccttaactttaaccaatattttcttctgttttgctgcatttgaaaggtaacagtggagctagggctgggcattttacatccaggcttttaattgattagaattctgccaataggtggattttacaaaaccacagacaacctctgaaagattctgagacccttttgagacagaagctcttaagtacttcttgccagggagcagcactgcatgtgtgatggttgtttgccatctgttgatcaggaactacttcagctacttgcatttgattatttcctttttttttttttttaactcggaaacacaactggggaaatatattctttcccagtgattataaacaatctttttcttttttttaagtccttttggcttctagagctcataggaaaatggacttgatttgaaattggagccagagtttactcgtgttggttatctattcatcagcttcctgacatgttaagagaatacattaaagagaaaatactgttttttaatcctaaaatttttcttccactaagataaaccaaatgtccttacatatatgtaaacccatctatttaaacgcaaaggtgggttgatgtcagtttacatagcagaaagcattcactatcctctaagatttgtttctgcaaaactttcattgctttagaattttaaaatttcaccttgtacaatggccagcccctaaagcaggaaacatttataatggattatatggaaacatcctcccagtacttgcccagcccttgaatcatgtggcttttcagtgaaaggaaagattctttttctaggaaaaatgagcctattttattttattttattttattttttgacacaaactgtagattttagcagccctggcccaaaggaatttgattacttttgttttaaacagtacaaaggggacactataattacaaaaacatccttaactgatttgagttgtttttatttctttggatatattttcagagtggtaaattgtgtgtgagaattacaaatgattattcttttagtggtttcttagcctctcttacagcccacggggatagtactgtacatcaataccttcatatgaaatttttatatgcaatgaaaataaaagcatgggttgattctgcct

SEQ ID NO: 5495 - protein, 745 aa, Homo sapiens; identical to SEQ ID NO: 5481

SEQ ID NO: 5496 - DNA, 7214 bp, Homo sapiens
tgcggcgcattagttccaatagtttaacaggctgctttgtagcacggacaaagccgtgcgagcgcggtgctttccctccttgttcatttgctatgcgagcttgtcagtgatctttggcaggggcttgggagaggaggggtgacgtttaatacgcttccgcggaggagtgcgctcgcctcctctgcacccagccccaggctctacagagagactgaggcaggcgactgaatgcactaacagcagcaggctcagacctgcttccctggacatttccgggaccgtgagcgagggaaccacgttgccctggattcttgccagctgtacaaagttgaccaggaaaatggctcagcagacaagcccggacactttaacagtacctgaagtggataatccgcattgtccaaacccgtggctgaacgaagaccttgtgaaatccttgcgagaaaacctgttgcagcatgagaagtccaagacagcgaggaaatcggtttctcccaagctctctccagtgatctctccgagaaattcccccaggcttctgcgcagaatgcttctcagcagcaacatccccaaacagcggcgtttcacggtggcacatacatgttttgatgtggacaatggcacatctgcgggacggagtcccttggatcccatgaccagcccaggatccgggctaattctccaagcaaattttgtccacagtcaacgacgggagtccttcctgtatcgatccgacagcgattatgacctctctccaaagtctatgtcccggaactcctccattgccagtgatatacacggagatgacttgattgtgactccatttgctcaggtcttggccagtctgcgaactgtacgaaacaactttgctgcattaactaatttgcaagatcgagcacctagcaaaagatcacccatgtgcaaccaaccatccatcaacaaagccaccataacagggctctataatgggatcattgcatttctctgattactaatgagaaggaggcctaccagaaactggccagcgagaccctggaggagctggactggtgtctggaccagctagagaccctacagaccaggcactccgtcagtgagatggcctccaacaagtttaaaaggatgcttaatcgggagctcacccatctctctgaaatgagtcggtctggaaatcaagtgtcagagtttatatcaaacacattcttagataagcaacatgaagtggaaattccttctccaactcagaaggaaaaggagaaaaagaaaagaccaatgtctcagatcagtggagtcaagaaattgatgcacagctctagtctgactaattcaagtatcccaaggtttggagttaaaactgaacaagaagatgtccttgccaaggaactagaagatgtgaacaaatggggtcttcatgttttcagaatagcagagttgtctggtaaccggcccttgactgttatcatgcacaccatttttcaggaacgggatttattaaaaacatttaaaattccagtagatactttaattacatatcttatgactctcgaagaccattaccatgctgatgtggcctatcacaacaatatccatgctgcagatgttgtccagtctactcatgtgctattatctacacctgctttggaggctgtgtttacagatttggagattcttgcagcaatttttgccagtgcaatacatgatgtagatcatcctggtgtgtccaatcaatttctgatcaatacaaactctgaacttgccttgatgtacaatgattcctcagtcttagagaaccatcatttggctgtgggctttaaattgcttcaggaagaaaactgtgacattttccagaatttgaccaaaaaacaaagacaatctttaaggaaaatggtcattgacatcgtacttgcaacagatatgtcaaaacacatgaatctactggctgatttgaagactatggttgaaactaagaaagtgacaagctctggagttcttcttcttgataattattccgataggattcaggttcttcagaatatggtgcactgtgcagatctgagcaacccaacaaagcctctccagctgtaccgccagtggacggaccggataatggaggagttcttccgccaaggagaccgagagagggaacgtggcatggagataagccccatgtgtgacaagcacaatgcttccgtggaaaaatcacaggtgggcttcatagactatattgttcatcccctctgggagacatgggcagacctcgtccaccctgacgcccaggatattttggacactttggaggacaatcgtgaatggtaccagagcacaatccctcagagcccctctcctgcacctgatgacccagaggagggccggcagggtcaaactgagaaattccagtttgaactaactttagaggaagatggtgagtcagacacggaaaaggacagtggcagtcaagtggaagaagacactagctgcagtgactccaagactctttgtactcaagactcagagtctactgaaattccccttgatgaacaggttgaagaggaggcagtaggggaagaagaggaaagccagcctgaagcctgtgtcatagatgatcgttctcctgacacgtaacagtgcaaaaactttcatgccttttttttttttaagtagaaaaattgtttccaaagtgcatgtcacatgccacaaccacggtcacacctcactgtcatctgccaggacgtttgttgaacaaaactgaccttgactactcagtccagcgctcaggaatatcgtaaccagttttttcacctccatgtcatccgagcaaggtggacatcttcacgaacagcgtttttaacaagatttcagcttggtagagctgacaaagcagataaaatctactccaaattattttcaagagagtgtgactcatcaggcagcccaaaagtttattggacttggggtttctattcctttttatttgtttgcaatattttcagaagaaaggcattgcacagagtgaacttaatggacgaagcaacaaatatgtcaagaacaggacatagcacgaatctgttaccagtaggaggaggatgagccacagaaattgcataattttctaatttcaagtcttcctgatacatgactgaatagtgtggttcagtgagctgcactgacctctacattttgtatgatatgtaaaacagattttttgtagagcttacttttattattaaatgtattgaggtattatatttaaaaaaaactatgttcagaacttcatctgccactggttatttttttctaaggagtaacttgcaagttttcagtacaaatctgtgctacactggataaaaatctaatttatgaattttacttgcaccttatagttcatagcaattaactgatttgtagtgattcattgtttgttttatataccaatgacttccatattttaaaagagaaaaacaactttatgttgcaggaaaccctttttgtaagtctttattatttactttgcattttgtttcactctttccagataagcagagttgctcttcaccagtgtttttcttcatgtgcaaagtgactatttgttctataatacttttatgtgtgttatatcaaatgtgtcttaagcttcatgcaaactcagtcatcagttcgtgttgtctgaagcaagtgggagatatataaatacccagtagctaaaatggtcagtcttttttagatgttttcctacttagtatctcctaataacgttttgctgtgtcactagatgttcatttcacaagtgcatgtctttctaataatccacacatttcatgctctaataatccacacatttcatgctcatttttattgtttttacagccagttatagtaagaaaaaggtttttccccttgtgctgctttataatttagcgtgtgtctgaaccttatccatgtttgctagatgaggtcttgtcaaatatatcactaccattgtcaccggtgaaaagaaacaggtagttaagttagggttaacattcatttcaaccacgaggttgtatatcatgactagcttttactcttggtttacagagaaaagttaaacagccaactaggcagtttttaagaatattaacaatatattaacaaacaccaatacaactaatcctatttggttttaatgatttcaccatgggattaagaactatatcaggaacatccctgagaaacggttttaagtgtagcaactactcttccttaatggacagccacataacgtgtaggaagtcctttatcacttatcctcgatccataagcatatcttgcagaggggaactacttctttaaacacatggagggaaagaagatgatgccactggcaccagagggttagtactgtgatgcatcctaaaatatttattatattggtaaaaattctggttaaataaaaaattagagatcactcttggctgatttcagcaccaggaactgtattacagttttagagattaattcctagtgtttacctgattatagcagttggcatcatggggcatttaattctgactttatccccacgtcagccttaataaagtcttctttaccttctctatgaagactttaaagcccaaataatcatttttcacattgatattcaagaattgagatagatagaagccaaagtgggtatctgacaagtggaaaatcaaacgtttaagaagaattacaactctgaaaagcatttatatgtggaacttctcaaggagcctcctggggactggaaagtaagtcatcagccaggcaaatgactcatgctgaagagagtccccatttcagtcccctgagatctagctgatgcttagatcctttgaaataaaaattatgtctttataactctgatcttttacataaagcagaagaggaatcaactagttaattgcaaggtttctactctgtttcctctgtaaagatcagatggtaatctttcaaataagaaaaaaataaagacgtatgtttgaccaagtagtttcacaagaatatttgggaacttgtttcttttaattttatttgtccctgagtgaagtctagaaagaaaggtaaagagtctagagtttattcctctttccaaaacattctcattcctctcctccctacacttagtatttcccccacagagtgcctagaatcttaataatgaataaaataaaaagcagcaatatgtcattaacaaatccagacctgaaagggtaaagggtttataactgcactaataaagagaggctctttttttttcttccagtttgttggtttttaatggtaccgtgttgtaaagatacccactaatggacaatcaaattgcagaaaaggctcaatatccaagagacagggactaatgcactgtacaatctgcttatccttgcccttctctcttgccaaagtgtgcttcagaaatatatactgctttaaaaaagaataaaagaatatccttttacaagtggctttacatttcctaaaatgccataagaaaatgcaatatctgggtactgtatggggaaaaaaatgtccaagtttgtgtaaaaccagtgcatttcagcttgcaagttactgaacacaataatgctgttttaattttgttttatatcagttaaaattcacaataatgtagatagaacaaattacagacaaggaaagaaaaaacttgaatgaaatggattttacagaaagctttatgataatttttgaatgcattatttattttttgtgccatgcattttttttctcaccaaatgaccttacctgtaatacagtcttgtttgtctgtttacaaccatgtatttattgcaatgtacatactgtaatgttaattgtaaattatctgttcttattaaaacatcatcccatgatgggatggtgttgatatatttggaaactcttggtgagagaatgaatggtgtgtatacatactctgtacatttttcttttctcctgtaatatagtcttgtcaccttagagcttgtttatggaagattcaagaaaactataaaatacttaaagatatataaatttaaaaaaacatagctgcaggtctttggtcccagggctgtgccttaactttaaccaatattttcttctgttttgctgcatttgaaaggtaacagtggagctagggctgggcattttacatccaggcttttaattgattagaattctgccaataggtggattttacaaaaccacagacaacctctgaaagattctgagacccttttgagacagaagctcttaagtacttcttgccagggagcagcactgcatgtgtgatggttgtttgccatctgttgatcaggaactacttcagctacttgcatttgattatttcctttttttttttttttaactcggaaacacaactggggaaatatattctttcccagtgattataaacaatctttttcttttttttaagtccttttggcttctagagctcataggaaaatggacttgatttgaaattggagccagagtttactcgtgttggttatctattcatcagcttcctgacatgttaagagaatacattaaagagaaaatactgttttttaatcctaaaatttttcttccactaagataaaccaaatgtccttacatatatgtaaacccatctatttaaacgcaaaggtgggttgatgtcagtttacatagcagaaagcattcactatcctctaagatttgtttctgcaaaactttcattgctttagaattttaaaatttcaccttgtacaatggccagcccctaaagcaggaaacatttataatggattatatggaaacatcctcccagtacttgcccagcccttgaatcatgtggcttttcagtgaaaggaaagattctttttctaggaaaaatgagcctattttattttattttattttattttttgacacaaactgtagattttagcagccctggcccaaaggaatttgattacttttgttttaaacagtacaaaggggacactataattacaaaaacatccttaactgatttgagttgtttttatttctttggatatattttcagagtggtaaattgtgtgtgagaattacaaatgattattcttttagtggtttcttagcctctcttacagcccacggggatagtactgtacatcaataccttcatatgaaatttttatatgcaatgaaaataaaagcatgggttgattctgcct

SEQ ID NO: 5497 - protein, 507 aa, Homo sapiens; identical to SEQ ID NO: 5477

SEQ ID NO: 5498 - DNA, 7194 bp, Homo sapiens
cccctctcggtagccctgaggctctggcgccttcaagtgagaagctaagcaccagcctctgctgggctgcagaagcggcggcggcggcagcagcagcagcagcatcaggaaggcgctcgggccagcgcggtgaacccgggctgggcagcaggtcgcggagccgcgagccaggatggaggcagagggcagcagcgcgccggcccgggcgggcagcggagagggcagcgacagcgccggcggggccacgctcaaagcccccaagcatctctggaggcacgagcagcaccaccagtacccgctccggcagccccagttccgcctcctgcatccccatcaccacctgcccccgccgccgccaccctcgccccagccccagccccagtgtccgctacagccgccgccgccgccccccctgccgccgcccccgccgccgcccggggctgcccgcggccgctacgcctcgagcggggccaccggccgcgtccggcatcgcggctactcggacaccgagcgctacctgtactgtcgcgccatggaccgcacctcctacgcggtggagaccggccaccggcccggcctgaagaaatccaggatgtcctggccctcctcgttccagggactcaggcgttttgatgtggacaatggcacatctgcgggacggagtcccttggatcccatgaccagcccaggatccgggctaattctccaagcaaattttgtccacagtcaacgacgggagtccttcctgtatcgatccgacagcgattatgacctctctccaaagtctatgtcccggaactcctccattgccagtgatatacacggagatgacttgattgtgactccatttgctcaggtcttggccagtctgcgaactgtacgaaacaactttgctgcattaactaatttgcaagatcgagcacctagcaaaagatcacccatgtgcaaccaaccatccatcaacaaagccaccataacagaggaggcctaccagaaactggccagcgagaccctggaggagctggactggtgtctggaccagctagagaccctacagaccaggcactccgtcagtgagatggcctccaacaagtttaaaaggatgcttaatcgggagctcacccatctctctgaaatgagtcggtctggaaatcaagtgtcagagtttatatcaaacacattcttagataagcaacatgaagtggaaattccttctccaactcagaaggaaaaggagaaaaagaaaagaccaatgtctcagatcagtggagtcaagaaattgatgcacagctctagtctgactaattcaagtatcccaaggtttggagttaaaactgaacaagaagatgtccttgccaaggaactagaagatgtgaacaaatggggtcttcatgttttcagaatagcagagttgtctggtaaccggcccttgactgttatcatgcacaccatttttcaggaacgggatttattaaaaacatttaaaattccagtagatactttaattacatatcttatgactctcgaagaccattaccatgctgatgtggcctatcacaacaatatccatgctgcagatgttgtccagtctactcatgtgctattatctacacctgctttggaggctgtgtttacagatttggagattcttgcagcaatttttgccagtgcaatacatgatgtagatcatcctggtgtgtccaatcaatttctgatcaatacaaactctgaacttgccttgatgtacaatgattcctcagtcttagagaaccatcatttggctgtgggctttaaattgcttcaggaagaaaactgtgacattttccagaatttgaccaaaaaacaaagacaatctttaaggaaaatggtcattgacatcgtacttgcaacagatatgtcaaaacacatgaatctactggctgatttgaagactatggttgaaactaagaaagtgacaagctctggagttcttcttcttgataattattccgataggattcaggttcttcagaatatggtgcactgtgcagatctgagcaacccaacaaagcctctccagctgtaccgccagtggacggaccggataatggaggagttcttccgccaaggagaccgagagagggaacgtggcatggagataagccccatgtgtgacaagcacaatgcttccgtggaaaaatcacaggtgggcttcatagactatattgttcatcccctctgggagacatgggcagacctcgtccaccctgacgcccaggatattttggacactttggaggacaatcgtgaatggtaccagagcacaatccctcagagcccctctcctgcacctgatgacccagaggagggccggcagggtcaaactgagaaattccagtttgaactaactttagaggaagatggtgagtcagacacggaaaaggacagtggcagtcaagtggaagaagacactagctgcagtgactccaagactctttgtactcaagactcagagtctactgaaattccccttgatgaacaggttgaagaggaggcagtaggggaagaagaggaaagccagcctgaagcctgtgtcatagatgatcgttctcctgacacgtaacagtgcaaaaactttcatgccttttttttttttaagtagaaaaattgtttccaaagtgcatgtcacatgccacaaccacggtcacacctcactgtcatctgccaggacgtttgttgaacaaaactgaccttgactactcagtccagcgctcaggaatatcgtaaccagttttttcacctccatgtcatccgagcaaggtggacatcttcacgaacagcgtttttaacaagatttcagcttggtagagctgacaaagcagataaaatctactccaaattattttcaagagagtgtgactcatcaggcagcccaaaagtttattggacttggggtttctattcctttttatttgtttgcaatattttcagaagaaaggcattgcacagagtgaacttaatggacgaagcaacaaatatgtcaagaacaggacatagcacgaatctgttaccagtaggaggaggatgagccacagaaattgcataattttctaatttcaagtcttcctgatacatgactgaatagtgtggttcagtgagctgcactgacctctacattttgtatgatatgtaaaacagattttttgtagagcttacttttattattaaatgtattgaggtattatatttaaaaaaaactatgttcagaacttcatctgccactggttatttttttctaaggagtaacttgcaagttttcagtacaaatctgtgctacactggataaaaatctaatttatgaattttacttgcaccttatagttcatagcaattaactgatttgtagtgattcattgtttgttttatataccaatgacttccatattttaaaagagaaaaacaactttatgttgcaggaaaccctttttgtaagtctttattatttactttgcattttgtttcactctttccagataagcagagttgctcttcaccagtgtttttcttcatgtgcaaagtgactatttgttctataatacttttatgtgtgttatatcaaatgtgtcttaagcttcatgcaaactcagtcatcagttcgtgttgtctgaagcaagtgggagatatataaatacccagtagctaaaatggtcagtcttttttagatgttttcctacttagtatctcctaataacgttttgctgtgtcactagatgttcatttcacaagtgcatgtctttctaataatccacacatttcatgctctaataatccacacatttcatgctcatttttattgtttttacagccagttatagtaagaaaaaggtttttccccttgtgctgctttataatttagcgtgtgtctgaaccttatccatgtttgctagatgaggtcttgtcaaatatatcactaccattgtcaccggtgaaaagaaacaggtagttaagttagggttaacattcatttcaaccacgaggttgtatatcatgactagcttttactcttggtttacagagaaaagttaaacagccaactaggcagtttttaagaatattaacaatatattaacaaacaccaatacaactaatcctatttggttttaatgatttcaccatgggattaagaactatatcaggaacatccctgagaaacggttttaagtgtagcaactactcttccttaatggacagccacataacgtgtaggaagtcctttatcacttatcctcgatccataagcatatcttgcagaggggaactacttctttaaacacatggagggaaagaagatgatgccactggcaccagagggttagtactgtgatgcatcctaaaatatttattatattggtaaaaattctggttaaataaaaaattagagatcactcttggctgatttcagcaccaggaactgtattacagttttagagattaattcctagtgtttacctgattatagcagttggcatcatggggcatttaattctgactttatccccacgtcagccttaataaagtcttctttaccttctctatgaagactttaaagcccaaataatcatttttcacattgatattcaagaattgagatagatagaagccaaagtgggtatctgacaagtggaaaatcaaacgtttaagaagaattacaactctgaaaagcatttatatgtggaacttctcaaggagcctcctggggactggaaagtaagtcatcagccaggcaaatgactcatgctgaagagagtccccatttcagtcccctgagatctagctgatgcttagatcctttgaaataaaaattatgtctttataactctgatcttttacataaagcagaagaggaatcaactagttaattgcaaggtttctactctgtttcctctgtaaagatcagatggtaatctttcaaataagaaaaaaataaagacgtatgtttgaccaagtagtttcacaagaatatttgggaacttgtttcttttaattttatttgtccctgagtgaagtctagaaagaaaggtaaagagtctagagtttattcctctttccaaaacattctcattcctctcctccctacacttagtatttcccccacagagtgcctagaatcttaataatgaataaaataaaaagcagcaatatgtcattaacaaatccagacctgaaagggtaaagggtttataactgcactaataaagagaggctctttttttttcttccagtttgttggtttttaatggtaccgtgttgtaaagatacccactaatggacaatcaaattgcagaaaaggctcaatatccaagagacagggactaatgcactgtacaatctgcttatccttgcccttctctcttgccaaagtgtgcttcagaaatatatactgctttaaaaaagaataaaagaatatccttttacaagtggctttacatttcctaaaatgccataagaaaatgcaatatctgggtactgtatggggaaaaaaatgtccaagtttgtgtaaaaccagtgcatttcagcttgcaagttactgaacacaataatgctgttttaattttgttttatatcagttaaaattcacaataatgtagatagaacaaattacagacaaggaaagaaaaaacttgaatgaaatggattttacagaaagctttatgataatttttgaatgcattatttattttttgtgccatgcattttttttctcaccaaatgaccttacctgtaatacagtcttgtttgtctgtttacaaccatgtatttattgcaatgtacatactgtaatgttaattgtaaattatctgttcttattaaaacatcatcccatgatgggatggtgttgatatatttggaaactcttggtgagagaatgaatggtgtgtatacatactctgtacatttttcttttctcctgtaatatagtcttgtcaccttagagcttgtttatggaagattcaagaaaactataaaatacttaaagatatataaatttaaaaaaacatagctgcaggtctttggtcccagggctgtgccttaactttaaccaatattttcttctgttttgctgcatttgaaaggtaacagtggagctagggctgggcattttacatccaggcttttaattgattagaattctgccaataggtggattttacaaaaccacagacaacctctgaaagattctgagacccttttgagacagaagctcttaagtacttcttgccagggagcagcactgcatgtgtgatggttgtttgccatctgttgatcaggaactacttcagctacttgcatttgattatttcctttttttttttttttaactcggaaacacaactggggaaatatattctttcccagtgattataaacaatctttttcttttttttaagtccttttggcttctagagctcataggaaaatggacttgatttgaaattggagccagagtttactcgtgttggttatctattcatcagcttcctgacatgttaagagaatacattaaagagaaaatactgttttttaatcctaaaatttttcttccactaagataaaccaaatgtccttacatatatgtaaacccatctatttaaacgcaaaggtgggttgatgtcagtttacatagcagaaagcattcactatcctctaagatttgtttctgcaaaactttcattgctttagaattttaaaatttcaccttgtacaatggccagcccctaaagcaggaaacatttataatggattatatggaaacatcctcccagtacttgcccagcccttgaatcatgtggcttttcagtgaaaggaaagattctttttctaggaaaaatgagcctattttattttattttattttattttttgacacaaactgtagattttagcagccctggcccaaaggaatttgattacttttgttttaaacagtacaaaggggacactataattacaaaaacatccttaactgatttgagttgtttttatttctttggatatattttcagagtggtaaattgtgtgtgagaattacaaatgattattcttttagtggtttcttagcctctcttacagcccacggggatagtactgtacatcaataccttcatatgaaatttttatatgcaatgaaaataaaagcatgggttgattctgcct

SEQ ID NO: 5499 - protein, 809 aa, Homo sapiens; identical to SEQ ID NO: 5485

SEQ ID NO: 5500 - DNA, 3401 bp, Homo sapiens
ttctcactgccctgcggtgttttgaactgccttcttacagacgtcatacagcccttgaggaatagtttctgcctggtgagattgaatgatagttctcattcacaaaaccctggattctaagcagggacacacagaaattactttcgcaggtaaatcagcccacccagccaaagtgtggagagatttgttccttggctgacttctttgctccacggagaggagtgttttcctgtgcttgccctgaaatggaacttccttgacagctctcccgtgttacagtacctcccggtcattttctttttctctctctctacctgcgctcttcgagtgtcagaaacctttaaagctgttactatggaattgcaaaaaagagatcaagtgactctttcactatgctggtttcccttgtgacccagatgaagaatcaattcagaattcagttcctcccttggcattgcaagacacagaagaaactgtcacttcctaacagcctagtactggagtaaattcagtatgaaggaagaaagcgctcctgcgtgttagaaccttgcccatgagctggaccgaggacaggagatggactccaggaaaattggatttcttcaagcagcctcccttggaaatggaatatctttaaaatcttctttgcagaaagacagttagaatgtattaatcagaatagttgaagacttattttcctttttattttttttcaaaatgagcattattatgaagccaagatcccgatctacaagttccctaaggactgcagaggcagtttgttttgatgtggacaatggcacatctgcgggacggagtcccttggatcccatgaccagcccaggatccgggctaattctccaagcaaattttgtccacagtcaacgacgggagtccttcctgtatcgatccgacagcgattatgacctctctccaaagtctatgtcccggaactcctccattgccagtgatatacacggagatgacttgattgtgactccatttgctcaggtcttggccagtctgcgaactgtacgaaacaactttgctgcattaactaatttgcaagatcgagcacctagcaaaagatcacccatgtgcaaccaaccatccatcaacaaagccaccataacagaggaggcctaccagaaactggccagcgagaccctggaggagctggactggtgtctggaccagctagagaccctacagaccaggcactccgtcagtgagatggcctccaacaagtttaaaaggatgcttaatcgggagctcacccatctctctgaaatgagtcggtctggaaatcaagtgtcagagtttatatcaaacacattcttagataagcaacatgaagtggaaattccttctccaactcagaaggaaaaggagaaaaagaaaagaccaatgtctcagatcagtggagtcaagaaattgatgcacagctctagtctgactaattcaagtatcccaaggtttggagttaaaactgaacaagaagatgtccttgccaaggaactagaagatgtgaacaaatggggtcttcatgttttcagaatagcagagttgtctggtaaccggcccttgactgttatcatgcacaccatttttcaggaacgggatttattaaaaacatttaaaattccagtagatactttaattacatatcttatgactctcgaagaccattaccatgctgatgtggcctatcacaacaatatccatgctgcagatgttgtccagtctactcatgtgctattatctacacctgctttggaggctgtgtttacagatttggagattcttgcagcaatttttgccagtgcaatacatgatgtagatcatcctggtgtgtccaatcaatttctgatcaatacaaactctgaacttgccttgatgtacaatgattcctcagtcttagagaaccatcatttggctgtgggctttaaattgcttcaggaagaaaactgtgacattttccagaatttgaccaaaaaacaaagacaatctttaaggaaaatggtcattgacatcgtacttgcaacagatatgtcaaaacacatgaatctactggctgatttgaagactatggttgaaactaagaaagtgacaagctctggagttcttcttcttgataattattccgataggattcaggttcttcagaatatggtgcactgtgcagatctgagcaacccaacaaagcctctccagctgtaccgccagtggacggaccggataatggaggagttcttccgccaaggagaccgagagagggaacgtggcatggagataagccccatgtgtgacaagcacaatgcttccgtggaaaaatcacaggtgggcttcatagactatattgttcatcccctctgggagacatgggcagacctcgtccaccctgacgcccaggatattttggacactttggaggacaatcgtgaatggtaccagagcacaatccctcagagcccctctcctgcacctgatgacccagaggagggccggcagggtcaaactgagaaattccagtttgaactaactttagaggaagatggtgagtcagacacggaaaaggacagtggcagtcaagtggaagaagacactagctgcagtgactccaagactctttgtactcaagactcagagtctactgaaattccccttgatgaacaggttgaagaggaggcagtaggggaagaagaggaaagccagcctgaagcctgtgtcatagatgatcgttctcctgacacgtaacagtgcaaaaactttcatgccttttttttttttaagtagaaaaattgtttccaaagtgcatgtcacatgccacaaccacggtcacacctcactgtcatctgccaggacgtttgttgaacaaaactgaccttgactactcagtccagcgctcaggaatatcgtaaccagttttttcacctccatgtcatccgagcaaggtggacatcttcacgaacagcgtttttaacaagatttcagcttggtagagctgacaaagcagataaaatctactccaaattattttcaagagagtgtgactcatcaggcagcccaaaagtttattggacttggggtttctattcctttttatttgtttgcaatattttcagaagaaaggcattgcacagagtgaacttaatggacgaagcaacaaatatgtcaagaacaggacatagcacgaatctgttaccagtaggaggaggatgagccacagaaattgcataattttctaatttcaagtcttcctgatacatgactgaatagtgtggttcagtgagctgcactgacctctacattttgtatgatatgtaaaacagattttttgtagagcttacttttattattaaatgtattgaggtattatatttaaaaaaaactatgttcag

SEQ ID NO: 5501 - protein, 679 aa, Homo sapiens; identical to SEQ ID NO: 5473

SEQ ID NO: 5502 - DNA, 2837 bp, Homo sapiens
actgcacaaaggaaatgccctcactcagctacaagtgcctcctgctccgtgcggggcctcagggccccagagccccgcaccagctctgacttctcgtggttcctggggatcttggcatcgtccttaaaaatggcttttgtttgggatcctctgggagccacggtgccaggaccatctacaagagccaaatcaagattgcgtttctcaaagtcctacagttttgatgtggacaatggcacatctgcgggacggagtcccttggatcccatgaccagcccaggatccgggctaattctccaagcaaattttgtccacagtcaacgacgggagtccttcctgtatcgatccgacagcgattatgacctctctccaaagtctatgtcccggaactcctccattgccagtgatatacacggagatgacttgattgtgactccatttgctcaggtcttggccagtctgcgaactgtacgaaacaactttgctgcattaactaatttgcaagatcgagcacctagcaaaagatcacccatgtgcaaccaaccatccatcaacaaagccaccataacagaggaggcctaccagaaactggccagcgagaccctggaggagctggactggtgtctggaccagctagagaccctacagaccaggcactccgtcagtgagatggcctccaacaagtttaaaaggatgcttaatcgggagctcacccatctctctgaaatgagtcggtctggaaatcaagtgtcagagtttatatcaaacacattcttagataagcaacatgaagtggaaattccttctccaactcagaaggaaaaggagaaaaagaaaagaccaatgtctcagatcagtggagtcaagaaattgatgcacagctctagtctgactaattcaagtatcccaaggtttggagttaaaactgaacaagaagatgtccttgccaaggaactagaagatgtgaacaaatggggtcttcatgttttcagaatagcagagttgtctggtaaccggcccttgactgttatcatgcacaccatttttcaggaacgggatttattaaaaacatttaaaattccagtagatactttaattacatatcttatgactctcgaagaccattaccatgctgatgtggcctatcacaacaatatccatgctgcagatgttgtccagtctactcatgtgctattatctacacctgctttggaggctgtgtttacagatttggagattcttgcagcaatttttgccagtgcaatacatgatgtagatcatcctggtgtgtccaatcaatttctgatcaatacaaactctgaacttgccttgatgtacaatgattcctcagtcttagagaaccatcatttggctgtgggctttaaattgcttcaggaagaaaactgtgacattttccagaatttgaccaaaaaacaaagacaatctttaaggaaaatggtcattgacatcgtacttgcaacagatatgtcaaaacacatgaatctactggctgatttgaagactatggttgaaactaagaaagtgacaagctctggagttcttcttcttgataattattccgataggattcaggttcttcagaatatggtgcactgtgcagatctgagcaacccaacaaagcctctccagctgtaccgccagtggacggaccggataatggaggagttcttccgccaaggagaccgagagagggaacgtggcatggagataagccccatgtgtgacaagcacaatgcttccgtggaaaaatcacaggtgggcttcatagactatattgttcatcccctctgggagacatgggcagacctcgtccaccctgacgcccaggatattttggacactttggaggacaatcgtgaatggtaccagagcacaatccctcagagcccctctcctgcacctgatgacccagaggagggccggcagggtcaaactgagaaattccagtttgaactaactttagaggaagatggtgagtcagacacggaaaaggacagtggcagtcaagtggaagaagacactagctgcagtgactccaagactctttgtactcaagactcagagtctactgaaattccccttgatgaacaggttgaagaggaggcagtaggggaagaagaggaaagccagcctgaagcctgtgtcatagatgatcgttctcctgacacgtaacagtgcaaaaactttcatgccttttttttttttaagtagaaaaattgtttccaaagtgcatgtcacatgccacaaccacggtcacacctcactgtcatctgccaggacgtttgttgaacaaaactgaccttgactactcagtccagcgctcaggaatatcgtaaccagttttttcacctccatgtcatccgagcaaggtggacatcttcacgaacagcgtttttaacaagatttcagcttggtagagctgacaaagcagataaaatctactccaaattattttcaagagagtgtgactcatcaggcagcccaaaagtttattggacttggggtttctattcctttttatttgtttgcaatattttcagaagaaaggcattgcacagagtgaacttaatggacgaagcaacaaatatgtcaagaacaggacatagcacgaatctgttaccagtaggaggaggatgagccacagaaattgcataattttctaatttcaagtcttcctgatacatgactgaatagtgtggttcagtgagctgcactgacctctacattttgtatgatatgtaaaacagattttttgtagagcttacttttattattaaatgtattgaggtattatatttaaaaaaaactatgttcag

SEQ ID NO: 5503 - protein, 687 aa, Homo sapiens; identical to SEQ ID NO: 5475

SEQ ID NO: 5504 - DNA, 2331 bp, Homo sapiens
gacagaagatctgcgaacatgatgcacgtgaataattttccctttagaaggcattcctggatatgaggaggcctaccagaaactggccagcgagaccctggaggagctggactggtgtctggaccagctagagaccctacagaccaggcactccgtcagtgagatggcctccaacaagtttaaaaggatgcttaatcgggagctcacccatctctctgaaatgagtcggtctggaaatcaagtgtcagagtttatatcaaacacattcttagataagcaacatgaagtggaaattccttctccaactcagaaggaaaaggagaaaaagaaaagaccaatgtctcagatcagtggagtcaagaaattgatgcacagctctagtctgactaattcaagtatcccaaggtttggagttaaaactgaacaagaagatgtccttgccaaggaactagaagatgtgaacaaatggggtcttcatgttttcagaatagcagagttgtctggtaaccggcccttgactgttatcatgcacaccatttttcaggaacgggatttattaaaaacatttaaaattccagtagatactttaattacatatcttatgactctcgaagaccattaccatgctgatgtggcctatcacaacaatatccatgctgcagatgttgtccagtctactcatgtgctattatctacacctgctttggaggctgtgtttacagatttggagattcttgcagcaatttttgccagtgcaatacatgatgtagatcatcctggtgtgtccaatcaatttctgatcaatacaaactctgaacttgccttgatgtacaatgattcctcagtcttagagaaccatcatttggctgtgggctttaaattgcttcaggaagaaaactgtgacattttccagaatttgaccaaaaaacaaagacaatctttaaggaaaatggtcattgacatcgtacttgcaacagatatgtcaaaacacatgaatctactggctgatttgaagactatggttgaaactaagaaagtgacaagctctggagttcttcttcttgataattattccgataggattcaggttcttcagaatatggtgcactgtgcagatctgagcaacccaacaaagcctctccagctgtaccgccagtggacggaccggataatggaggagttcttccgccaaggagaccgagagagggaacgtggcatggagataagccccatgtgtgacaagcacaatgcttccgtggaaaaatcacaggtgggcttcatagactatattgttcatcccctctgggagacatgggcagacctcgtccaccctgacgcccaggatattttggacactttggaggacaatcgtgaatggtaccagagcacaatccctcagagcccctctcctgcacctgatgacccagaggagggccggcagggtcaaactgagaaattccagtttgaactaactttagaggaagatggtgagtcagacacggaaaaggacagtggcagtcaagtggaagaagacactagctgcagtgactccaagactctttgtactcaagactcagagtctactgaaattccccttgatgaacaggttgaagaggaggcagtaggggaagaagaggaaagccagcctgaagcctgtgtcatagatgatcgttctcctgacacgtaacagtgcaaaaactttcatgccttttttttttttaagtagaaaaattgtttccaaagtgcatgtcacatgccacaaccacggtcacacctcactgtcatctgccaggacgtttgttgaacaaaactgaccttgactactcagtccagcgctcaggaatatcgtaaccagttttttcacctccatgtcatccgagcaaggtggacatcttcacgaacagcgtttttaacaagatttcagcttggtagagctgacaaagcagataaaatctactccaaattattttcaagagagtgtgactcatcaggcagcccaaaagtttattggacttggggtttctattcctttttatttgtttgcaatattttcagaagaaaggcattgcacagagtgaacttaatggacgaagcaacaaatatgtcaagaacaggacatagcacgaatctgttaccagtaggaggaggatgagccacagaaattgcataattttctaatttcaagtcttcctgatacatgactgaatagtgtggttcagtgagctgcactgacctctacattttgtatgatatgtaaaacagattttttgtagagcttacttttattattaaatgtattgaggtattatatttaaaaaaaactatgttcag

SEQ ID NO: 5505 - protein, 507 aa, Homo sapiens; identical to SEQ ID NO: 5477

SEQ ID NO: 5506 - DNA, 2740 bp, Homo sapiens
ggaattcatctgtaaaaatcactacatgtaacgtaggagacaagaaaaatattaatgacagaagatctgcgaacatgatgcacgtgaataattttccctttagaaggcattcctggatatgttttgatgtggacaatggcacatctgcgggacggagtcccttggatcccatgaccagcccaggatccgggctaattctccaagcaaattttgtccacagtcaacgacgggagtccttcctgtatcgatccgacagcgattatgacctctctccaaagtctatgtcccggaactcctccattgccagtgatatacacggagatgacttgattgtgactccatttgctcaggtcttggccagtctgcgaactgtacgaaacaactttgctgcattaactaatttgcaagatcgagcacctagcaaaagatcacccatgtgcaaccaaccatccatcaacaaagccaccataacagaggaggcctaccagaaactggccagcgagaccctggaggagctggactggtgtctggaccagctagagaccctacagaccaggcactccgtcagtgagatggcctccaacaagtttaaaaggatgcttaatcgggagctcacccatctctctgaaatgagtcggtctggaaatcaagtgtcagagtttatatcaaacacattcttagataagcaacatgaagtggaaattccttctccaactcagaaggaaaaggagaaaaagaaaagaccaatgtctcagatcagtggagtcaagaaattgatgcacagctctagtctgactaattcaagtatcccaaggtttggagttaaaactgaacaagaagatgtccttgccaaggaactagaagatgtgaacaaatggggtcttcatgttttcagaatagcagagttgtctggtaaccggcccttgactgttatcatgcacaccatttttcaggaacgggatttattaaaaacatttaaaattccagtagatactttaattacatatcttatgactctcgaagaccattaccatgctgatgtggcctatcacaacaatatccatgctgcagatgttgtccagtctactcatgtgctattatctacacctgctttggaggctgtgtttacagatttggagattcttgcagcaatttttgccagtgcaatacatgatgtagatcatcctggtgtgtccaatcaatttctgatcaatacaaactctgaacttgccttgatgtacaatgattcctcagtcttagagaaccatcatttggctgtgggctttaaattgcttcaggaagaaaactgtgacattttccagaatttgaccaaaaaacaaagacaatctttaaggaaaatggtcattgacatcgtacttgcaacagatatgtcaaaacacatgaatctactggctgatttgaagactatggttgaaactaagaaagtgacaagctctggagttcttcttcttgataattattccgataggattcaggttcttcagaatatggtgcactgtgcagatctgagcaacccaacaaagcctctccagctgtaccgccagtggacggaccggataatggaggagttcttccgccaaggagaccgagagagggaacgtggcatggagataagccccatgtgtgacaagcacaatgcttccgtggaaaaatcacaggtgggcttcatagactatattgttcatcccctctgggagacatgggcagacctcgtccaccctgacgcccaggatattttggacactttggaggacaatcgtgaatggtaccagagcacaatccctcagagcccctctcctgcacctgatgacccagaggagggccggcagggtcaaactgagaaattccagtttgaactaactttagaggaagatggtgagtcagacacggaaaaggacagtggcagtcaagtggaagaagacactagctgcagtgactccaagactctttgtactcaagactcagagtctactgaaattccccttgatgaacaggttgaagaggaggcagtaggggaagaagaggaaagccagcctgaagcctgtgtcatagatgatcgttctcctgacacgtaacagtgcaaaaactttcatgccttttttttttttaagtagaaaaattgtttccaaagtgcatgtcacatgccacaaccacggtcacacctcactgtcatctgccaggacgtttgttgaacaaaactgaccttgactactcagtccagcgctcaggaatatcgtaaccagttttttcacctccatgtcatccgagcaaggtggacatcttcacgaacagcgtttttaacaagatttcagcttggtagagctgacaaagcagataaaatctactccaaattattttcaagagagtgtgactcatcaggcagcccaaaagtttattggacttggggtttctattcctttttatttgtttgcaatattttcagaagaaaggcattgcacagagtgaacttaatggacgaagcaacaaatatgtcaagaacaggacatagcacgaatctgttaccagtaggaggaggatgagccacagaaattgcataattttctaatttcaagtcttcctgatacatgactgaatagtgtggttcagtgagctgcactgacctctacattttgtatgatatgtaaaacagattttttgtagagcttacttttattattaaatgtattgaggtattatatttaaaaaaaactatgttcag

SEQ ID NO: 5507 - protein, 673 aa, Homo sapiens; identical to SEQ ID NO: 636

SEQ ID NO: 5508 - DNA, 3266 bp, Homo sapiens
tgcggcgcattagttccaatagtttaacaggctgctttgtagcacggacaaagccgtgcgagcgcggtgctttccctccttgttcatttgctatgcgagcttgtcagtgatctttggcaggggcttgggagaggaggggtgacgtttaatacgcttccgcggaggagtgcgctcgcctcctctgcacccagccccaggctctacagagagactgaggcaggcgactgaatgcactaacagcagcaggctcagacctgcttccctggacatttccgggaccgtgagcgagggaaccacgttgccctggattcttgccagctgtacaaagttgaccaggaaaatggctcagcagacaagcccggacactttaacagtacctgaagtggataatccgcattgtccaaacccgtggctgaacgaagaccttgtgaaatccttgcgagaaaacctgttgcagcatgagaagtccaagacagcgaggaaatcggtttctcccaagctctctccagtgatctctccgagaaattcccccaggcttctgcgcagaatgcttctcagcagcaacatccccaaacagcggcgtttcacggtggcacatacatgttttgatgtggacaatggcacatctgcgggacggagtcccttggatcccatgaccagcccaggatccgggctaattctccaagcaaattttgtccacagtcaacgacgggagtccttcctgtatcgatccgacagcgattatgacctctctccaaagtctatgtcccggaactcctccattgccagtgatatacacggagatgacttgattgtgactccatttgctcaggtcttggccagtctgcgaactgtacgaaacaactttgctgcattaactaatttgcaagatcgagcacctagcaaaagatcacccatgtgcaaccaaccatccatcaacaaagccaccataacagggctctataatgggatcattgcatttctctgattactaatgagaaggaggcctaccagaaactggccagcgagaccctggaggagctggactggtgtctggaccagctagagaccctacagaccaggcactccgtcagtgagatggcctccaacaagtttaaaaggatgcttaatcgggagctcacccatctctctgaaatgagtcggtctggaaatcaagtgtcagagtttatatcaaacacattcttagataagcaacatgaagtggaaattccttctccaactcagaaggaaaaggagaaaaagaaaagaccaatgtctcagatcagtggagtcaagaaattgatgcacagctctagtctgactaattcaagtatcccaaggtttggagttaaaactgaacaagaagatgtccttgccaaggaactagaagatgtgaacaaatggggtcttcatgttttcagaatagcagagttgtctggtaaccggcccttgactgttatcatgcacaccatttttcaggaacgggatttattaaaaacatttaaaattccagtagatactttaattacatatcttatgactctcgaagaccattaccatgctgatgtggcctatcacaacaatatccatgctgcagatgttgtccagtctactcatgtgctattatctacacctgctttggaggctgtgtttacagatttggagattcttgcagcaatttttgccagtgcaatacatgatgtagatcatcctggtgtgtccaatcaatttctgatcaatacaaactctgaacttgccttgatgtacaatgattcctcagtcttagagaaccatcatttggctgtgggctttaaattgcttcaggaagaaaactgtgacattttccagaatttgaccaaaaaacaaagacaatctttaaggaaaatggtcattgacatcgtacttgcaacagatatgtcaaaacacatgaatctactggctgatttgaagactatggttgaaactaagaaagtgacaagctctggagttcttcttcttgataattattccgataggattcaggttcttcagaatatggtgcactgtgcagatctgagcaacccaacaaagcctctccagctgtaccgccagtggacggaccggataatggaggagttcttccgccaaggagaccgagagagggaacgtggcatggagataagccccatgtgtgacaagcacaatgcttccgtggaaaaatcacaggtgggcttcatagactatattgttcatcccctctgggagacatgggcagacctcgtccaccctgacgcccaggatattttggacactttggaggacaatcgtgaatggtaccagagcacaatccctcagagcccctctcctgcacctgatgacccagaggagggccggcagggtcaaactgagaaattccagtttgaactaactttagaggaagatggtgagtcagacacggaaaaggacagtggcagtcaagtggaagaagacactagctgcagtgactccaagactctttgtactcaagactcagagtctactgaaattccccttgatgaacaggttgaagaggaggcagtaggggaagaagaggaaagccagcctgaagcctgtgtcatagatgatcgttctcctgacacgtaacagtgcaaaaactttcatgccttttttttttttaagtagaaaaattgtttccaaagtgcatgtcacatgccacaaccacggtcacacctcactgtcatctgccaggacgtttgttgaacaaaactgaccttgactactcagtccagcgctcaggaatatcgtaaccagttttttcacctccatgtcatccgagcaaggtggacatcttcacgaacagcgtttttaacaagatttcagcttggtagagctgacaaagcagataaaatctactccaaattattttcaagagagtgtgactcatcaggcagcccaaaagtttattggacttggggtttctattcctttttatttgtttgcaatattttcagaagaaaggcattgcacagagtgaacttaatggacgaagcaacaaatatgtcaagaacaggacatagcacgaatctgttaccagtaggaggaggatgagccacagaaattgcataattttctaatttcaagtcttcctgatacatgactgaatagtgtggttcagtgagctgcactgacctctacattttgtatgatatgtaaaacagattttttgtagagcttacttttattattaaatgtattgaggtattatatttaaaaaaaactatgttcag

SEQ ID NO: 5509 - protein, 507 aa, Homo sapiens; identical to SEQ ID NO: 5477

SEQ ID NO: 5510 - DNA, 574 bp, Homo sapiens
cggccgctacgcctcgagcggggccaccggccgcgtccggcatcgcggctactcggacaccgagcgctacctgtactgtcgcgccatggaccgcacctcctacgcggtggagaccggccaccggcccggcctgaagaaatccaggatgtcctggccctcctcgttccagggactcaggcgttttgatgtggacaatggcacatctgcgggacggagtcccttggatcccatgaccagcccaggatccgggctaattctccaagcaaattttgtccacagtcaacgacgggagtccttcctgtatcgatccgacagcgattatgacctctctccaaagtctatgtcccggaactcctccattgccagtgatatacacggagatgacttgattgtgactccatttgctcaggtcttggccagtctgcgaactgtacgaaacaactttgctgcattaactaatttgcaagatcgagcacctagcaaaagatcacccatgtgcaaccaaccatccatcaacaaagccaccataacagtttaaaaggatgcttaatcgggagctcacccatctctctga

SEQ ID NO: 5511 - protein, 150 aa, Homo sapiens
MDRTSYAVETGHRPGLKKSRMSWPSSFQGLRRFDVDNGTSAGRSPLDPMTSPGSGLILQANFVHSQRRESFLYRSDSDYDLSPKSMSRNSSIASDIHGDDLIVTPFAQVLASLRTVRNNFAALTNLQDRAPSKRSPMCNQPSINKATITV

SEQ ID NO: 5512 - DNA, 1230 bp, Homo sapiens
tgcggcgcattagttccaatagtttaacaggctgctttgtagcacggacaaagccgtgcgagcgcggtgctttccctccttgttcatttgctatgcgagcttgtcagtgatctttggcaggggcttgggagaggaggggtgacgtttaatacgcttccgcggaggagtgcgctcgcctcctctgcacccagccccaggctctacagagagactgaggcaggcgactgaatgcactaacagcagcaggctcagacctgcttccctggacatttccgggaccgtgagcgagggaaccacgttgccctggattcttgccagctgtacaaagttgaccaggaaaatggctcagcagacaagcccggacactttaacagtacctgaagtggataatccgcattgtccaaacccgtggctgaacgaagaccttgtgaaatccttgcgagaaaacctgttgcagcatgagaagtccaagacagcgaggaaatcggtttctcccaagctctctccagtgatctctccgagaaattcccccaggcttctgcgcagaatgcttctcagcagcaacatccccaaacagcggcgtttcacggtggcacatacatgttttgatgtggacaatggcacatctgcgggacggagtcccttggatcccatgaccagcccaggatccgggctaattctccaagcaaattttgtccacagtcaacgacgggagtccttcctgtatcgatccgacagcgattatgacctctctccaaagtctatgtcccggaactcctccattgccagtgatatacacggagatgacttgattgtgactccatttgctcaggtcttggccagtctgcgaactgtacgaaacaactttgctgcattaactaatttgcaagatcgagcacctagcaaaagatcacccatgtgcaaccaaccatccatcaacaaagccaccataacaggatcctggatggaattgaacccatatacgttacttgacatgtgaaacacgtgtgaccctggcagatgatttggctgaccttgaaaactacagctgtttagtcactttgaaaacaatgcaatacaagtgatttactaggcttcagttttaaccattttatgctgactggtggaaattctaacccttcagaaagaaaaaaaaattgtgaagcaatggaaatgtaccatcctgggtattaatgtcattaattttcaatacattttctcacaaaaagt

SEQ ID NO: 5513 - protein, 219 aa, Homo sapiens
MAQQTSPDTLTVPEVDNPHCPNPWLNEDLVKSLRENLLQHEKSKTARKSVSPKLSPVISPRNSPRLLRRMLLSSNIPKQRRFTVAHTCFDVDNGTSAGRSPLDPMTSPGSGLILQANFVHSQRRESFLYRSDSDYDLSPKSMSRNSSIASDIHGDDLIVTPFAQVLASLRTVRNNFAALTNLQDRAPSKRSPMCNQPSINKATITGSWMELNPYTLLDM

SEQ ID NO: 5514 - DNA, 522 bp, Homo sapiens
agatggtcaagggttctctcactgaagtcactgcattgctggttccttccacagcaccccttactaatatctacagtaagaggccaaaagtaaaactcaggccccactgctggaacaccatttctactattgcatatcctgtgtgcctaaaaagcaacagtgaccctggctgatgatcaagaagcccctctttttacccagggagttggacaattgttaacatcccagaagacatatttttaacccagttgctgggaagaacatgtgctgaagtataaggatggaatcactgtaattctctatgggaactcatgaaagtggaacttgccgtttaatattgaacgacactgagcacagagttattgatgatttctaatgcgggatttggtttatttttcagacacggagatgacttgattgtgactccatttgctcaggtcttggccagtctgcgaactgtacgaaacaactttgctgcattaactaatttgcaagatcgagcacctagcaagtaagatatcc

SEQ ID NO: 5515 - protein, 49 aa, Homo sapiens
MISNAGFGLFFRHGDDLIVTPFAQVLASLRTVRNNFAALTNLQDRAPSK

SEQ ID NO: 5516 - DNA, 765 bp, Homo sapiens
gattgaatgatagttctcattcacaaaaccctggattctaagcagggacacacagaaattactttcgcaggtaaatcagcccacccagccaaagtgtggagagatttgttccttggctgacttctttgctccacggagaggagtgttttcctgtgcttgccctgaaatggaacttccttgacagctctcccgtgttacagtacctcccggtcattttctttttctctctctctacctgcgctcttcgagtgtcagaaacctttaaagctgttactatggaattgcaaaaaagagatcaagtgactctttcactatgctggtttcccttgtgacccagatgaagaatcaattcagaattcagttcctcccttggcattgcaagacacagaagaaactgtcacttcctaacagcctagtactggagtaaattcagtatgaaggaagaaagcgctcctgcgtgttagaaccttgcccatgagctggaccgaggacaggagatggactccaggaaaattggatttcttcaagcagcctcccttggaaatggaatatctttaaaatcttctttgcagaaagacagttagaatgtattaatcagaatagttgaagacttattttcctttttattttttttcaaaatgagcattattatgaagccaagatcccgatctacaagttccctaaggactgcagaggcagtttgagacagtgtctccctatgttgcccaagctggattcaaacaatctgcctgcctcagcctccca

SEQ ID NO: 5517 - protein, 37 aa, Homo sapiens
MIVLIHKTLDSKQGHTEITFAGKSAHPAKVWRDLFLG

SEQ ID NO: 5518 - DNA, 536 bp, Homo sapiens
cactacattccagtaatgaagaggaagaccctttccgcggaatggaaccctatcttgtccggagactttcatgtcgcaatattcagcttccccctctcgccttcagacagttggaacaagctgacttgaaaagtgaatcagagaacattcaacgaccaaccagcctccccctgaagattctgccgctgattgctatcacttctgcagaatccagtgggctttccagatccctgaagataaaatacaaactctccaacaagaccttttggccatcaggaacgcagcacctggctctctcactactgttaccctagcatgactgcttcagcgaagagataagagcttctttgactttttccactggaatttttcatgccagaagaaattgaacatgtgagcctggtgtctggaagagtagcctggatttatggtatcagatgcacatttttaacaccttcagttttctctttaaaatatctcttcaatcccttacttttctctatttgtttcaacattaaaatatgttatttttcttc

SEQ ID NO: 5519 - protein, 90 aa, Homo sapiens
MEPYLVRRLSCRNIQLPPLAFRQLEQADLKSESENIQRPTSLPLKILPLIAITSAESSGLSRSLKIKYKLSNKTFWPSGTQHLALSLLLP

SEQ ID NO: 5520 - DNA, 598 bp, Homo sapiens
attctgtccgggagcaaatctggtaactctcccaggagagctcagcagccagcggctcgcaaagaggtagtctttgggtgacccccagcagctgcctggtatggtttgtcctggggactctcctgaggacctttctggctgcaaagactgcccgtctctctattactgggaaagaatagagattgggagcagttgcactcaaaaggaatgtgctggagaataggagcagaagatggcaaccaggacaccagaaacttgatgttccgctttgggagaactcatacgtggcaccattcctataaaatgaggaaaatagctttgaagatgatgatctacttccatcatgaacattctaccaagcgtctccctattccctgagacacaacaatattgaaattaggccaatcaataatcctgcaatggcctctcagttttcaagtaaaaagaggagtcacaagtctcttactttaaatcaaaagttagaaatgattaaacttaatgaagaaagtttgttgaaaaccaagataggccaaagtcaggcttcctgcaacaaacactaagttgtgaacggaaaaaaaaagagttcttaaaggaaatt

SEQ ID NO: 5521 - protein, 56 aa, Homo sapiens
MCWRIGAEDGNQDTRNLMFRFGRTHTWHHSYKMRKIALKMMIYFHHEHSTKRLPIP

SEQ ID NO: 5522 - DNA, 7179 bp, Homo sapiens
gatataatttgtagcttaggaaagaagtcagagtcaaagacaatgatttgggtgttacccacacacataataggagttgttgaaattacctccaacattcatgtcagtgattcaccactctccatgaagagctgaactggcacaagtggcaacgtatgttactgatgtaattggcacaaaactgttttcttattatctccttcactgaagccctatagccaaggttgcaacaaggacagtgtcagagcaggctgtaaaaaatgtggctaccctggtcacctgacttttgaatgccgcaattttctccgagtagaccctaaaagggacatagttttggatgtcagcagtacaagtagtgaagatagcgatgaagagaatgaagaactgaataaattgcaggcattacaggaaaaaagaataaatgaagaagaggaaaagaagaaagaaaaaagcaaagaaaaaatcaaattgaaaaaaaaaaggaaaaggtcttactcatccagttccactgaagaggacacttcaaaacaaaagaaacaaaaatatcagaagaaagaaaagaaaaaagaaaaaaagagtaaatcaaaaaaagggaaacatcacaaaaaggaaaaaaagaagagaaaaaaggaaaagcattcttctacacctaatagttctgaattctccagaaagtaactgagactttggcttaagccgttaaatttaaaaatttgtttttaaaacgtgtttgcccttccttggaatttgctatatattatgctttgcaataaatcacagccttttccatatagacatttttcgtatttgggaccattatccctctggcaatatatttttaatgtgctgtaactgtaaagtattaaatcagtcttgttacttgatagccatgccccaagtatagctatttgtgtatactaaacacatcatttttggtatttgtgtctctgtgtgtttggctagtgttactacttcataagttcattgtaaaatggctttactgccatcaacatgggtcatctacctagcagttaatgagtattgctggatcaggtgtccaccttccaatgatgaagcaaggtaaggggtaatgttttgctcttgacacagagaaatttaatagctttatgtactaaaatataatatcttttaaagatagtgaaattcttcagttttttaaatctctagggattttttttcaatgttgtagaagatgcagctgcttaatggtcttgactaggactttttaaatgaatggtgtctgcaggtagatgatcatgaaaatatctctaacaaagttttactcttctatgaaatgcagaatttctagtacctgcctcctttgtttttgtaataattaaaatacttcttgtataaagagattagttcagcctgttagtaagtctgcagagatgatgctgagttggttgtgatttttagaatagactcctgggttgttttacaaatgtgccatattggcatgtcttacagtgatacctcaaacacagaaatttttatttaggaagatagctaaatctttattagaactgatttttattgtattcagtataaattttatgaagcttgtttctatgagtactgtggaaaattttataaatgtgagcatatatatttattttgtctgacataatttgtagttttaaagcaagtttcacactgaacttaacgttttcataaatgaccagtttgggatgtttctctcttttactttagtggcaaactcaagagtaaaaagtgtcaaaaaaagaattgagaattttattctgtactttttaaaatttaagagccagggagttgcatcatgaaagcctttgtataataatggaaattttatatgggtaagcattttcaaacacatattagtagatacgttttttaaatttctattttcacattgatcagtgttactttgcttaatacttaggtagcccttatgtccactaaagtaaatgcttatgttgtagaagcatcgaacatcaaccaatgtcatggcacagcaccaaagattgcaaatacctcactatggtgcgcttagaaattttcaaattgataacctatagatacggctgcaggtgaattcatgatagtgaaatcagctaagtatacttaacctcacaggctagaaaggtttactgattcttgtttcacctggcacccaatgtggataccctcagtaagactcagggagccttataactcctcttaacatatgcttacccatgcttaaattctagggaagctgtatccacagccctctgcattgcagccatgagagctctcacgctttcaacccttccataacctaatttagtcatttgggcctctcaaaaggaaatgcttttgtttaaataggtcagtcagttactgggagaaaaaatacagagccagtaggtttttagggatttgttttgcctttgctgctagttttttgaaaatattcttcgattatcaagattttaaaaatcggtttttaatataaagcttttttaaaaacgaggctggcacaagtgcagtggtgtttctttactcccactgcttgacttgactagccttgaaaaaataacagtaaaataaaatattaaaaaataattagaaaatgctacaaaggcaatgaccttattccattgagtaagatagttaaaaatgatagtaattgtagtgaaatagttaattacttgtaagttttattactgttaattgtagagattataaattggctcattaggtttctgaatggtgacacaataatgactgagaagagcaaaagtcagtcctcgttaactaatgtagtatgcaaattaaaatattttaatgatcagtaattttccccccagaaatgatgttggcatttctaagtaaatttcccataattttagcatagtttatgaaattgaataaaaatttattttcactgaagtaattttcttctaatatgatattattattgagattggatgcaaatctcatgaatatgttttagaagaaaattaatgaaattccctcccaggcagtatgtaccagaaggaaaactgaatttagcagtaaaacagtcctggtcattctaactacctgtatgatcttgaacaaagtcacttagtttccctgggccttggtgtctttcgtctataaaatattgtaccagattatctctgaaatcacttcaaggtttaatatatataattatcaatattttaaaattcaagcaatattcactttagaaattattataacattctataatagtaaaggttgaatttattaatataataaacacgttcaacttcttcaagcagataattgatatttggttcatattcttacaacctaatgcatgtcattttcaccaaatgcaggcagaatttatatttaggtttgcatctggaactagattatctggcactttatggccattatttttgggttgatggaccttctcaccacacaatttcccccttttttttttttgcatatcatatgttggttgatatttctcagaggtatccctatttcttcatacttaatatacatctccatttacatctttgactctctgaggtcaaaacaacaataaatgagaagtaaaacaactatatgtgtttgtatttacaactgtatctaaaattatataaccctagtttaccttcagagtaaactaggctgaagagttgttaataatgttgataaaaatgccattgaatcctttcttcaacaaatatttattgagtacctaacgtggcaaacgctgtgctaagtactggggatacagagataagtaagacacatttgcctccctgaaggacttcacagtgtagttggtaggagaaacaccagagcatacaccgttatataattagtgcagtaattgacatgaacatgagtttatagaaactcggggttacctaaagtagtctggataaattagaagaggctacctagagaaagtagtgactgaattgcaatttgattaaggataagaatgagggttatggcagttcctgacagagtgggtactgtgaacaaacaccagaggtagaacaagctgtgttatgtgtttgtcaagaattacaagcaatctggtgttgctggtgtatcataggcgaggcaggaagtggtaagaattgagactaccattttaagttcttaggaacaggaggaaggagtcgtgtgttccgtgtttgggagcttgaactgtaatgtgtaagcaatgagacaccattaaagagtttcaaggggggccgggcacagtggctcacgcctgtaatcccagcactttgggaggctgaggcgggcggatcacctgaggtcaggagttcaagaccagcctggccaacttggcgaaaccctgtctctactaaaaatagaaaaattagccggacgtggtgacaggcacctgtattcccagctactctggagtctggggcaggagaatcgctcaaacccaggaggtggaagttgcagtaagctgagatcacaccactgtactccagcctgggcgacagagcgagactctatctcaaaaaaaaaaaaagattttaaggaaggaaatgacttttattagggtttggttttatcaatttcataatccgattaatcccaccatttttaaaagatgaaattgctttcattagaaggctacataaaatataatttgattattttaggctctattattagactcacatttctttctacagtctcattattatttccaaaaattacacagtaacctaaatcatctaaaaacacataaagctactgtattctttattagatccatccccagagttatatgtacatgtacatactttgagatgtgttttgttcttaattgtattttaggttatttttgactgacttaaattctatcactattttaatatttgttaggtccgaataaaccatttagaatatttttcagtgtacaaaatgtgctgtaatttaataaggccccttgcttttaaaatttggcttaacctgtgaagcacaactgcttcagagttacagagaaacataccagttggtccactggatgagccctgtggttctacctcaggtaacctagtgataagctagctcagcagggagtgcttcaaggactccagctgatcctagtgctgagaccaaaacttcctggacattgggtgcccaagaacagtaggtttcttataccagtgtgacaataatcccagttgcgaaggccagtcttctgatctcagtatctcctcccaactcctctaaaaataggtagagtggcagagaattggggtgcctcttctatagcacaacccatgatgcatccagtcatgcctgaccccactatgcctttcccacaaattgggaggagttggggcagtgagcattttgctagctctgtctgtttcttgcttcttgtgccatttatagtccttggccatgagcaacaaaagtagaatggtgccagtgccttaactaaatttttctcaacctagattttcacctgagacaatatggtaatattattaaattactgtaaagatagcaaattttctgggatactttaaaatcaaagttgtatcaaagatcaagaagcacccataaaagctttataaactttcacaaaaaataagtgaaaattctttgtttttatggccgtgtaaaatgtcatttttataatggaaatgtcttaattttcaaacttaacatatactttaagcaattttagtatttaaacctttgcaaaattgtatttttgaatgtgaagttcaactttggcagtaggttgttgcaatagtgatctggcactatggtgccagtatagccacatagggttatttaaattaattaaataaatgaaaaattttattttttcagttgcattagccacatcttaagtgttcagtagccacatgtgactggtggctaccatattagtgcagatatagaaagaacatttccatcatcacagaaacttctcttaattctggtctagaagataaccttagtacttggtagaaattttgacaggctaatgacgaaaagtttgtaaccctgagctttgcatgcccaagaaaaataaggtattcttttttatatatcagaccagagaagctgtattcagcacattttgaaatgctagtttttggctatggccataccaccctaaatgtgccagatcttgtctgaaatgctagtttctgactacaaaaactacaggacatagtagatatgctcagtagagctgcttaaaataattccctttttttttctgttgaattctgttacaaaaccaggtctgtgttataatagaaaacacacttatgaataaaaatctttaaaaattataatttgcagaaattagttttatttctagatttctaggtggtattaatgtgatagcattaggtgggaccagagaactcatttgttttgtagctttcattatacagattatttaggaaatatatcagcaaaggattttttgttatgcttatctcttgaaacaaaatatttattgtacagattatacattgtgatttttttgttactgagtatattgtttgtgcccagaaaaatctaaaaagatgtgggttgacttctaagagatttaagaacaagtcacctctagtttttaagacagttcccttgatatttacctatccagtaccatctcataagaataactgcctgtaagtatcagaaagttgagaaatgctggtaatgtgacataaacttctcactgttcttcactgagataggactgcttatcttgttattgataaattatttaatttctcctgaataattagcataatctcatgtgatacagaaacatcttaattagcaaataaatttatacaaaggaaaaccaataaaaccttaatgtgcgtttaataaagtaactgaatgatcaaaaatgcagctgtgtcttgctttgtgagtgacgaatttttgaaaagcaatattacaaaccgtttcaagtgcacgctttatttttattgtcccatctctccagtaagcatttaaaacacagaatttttagttaataagcaatgtggatttgtgttgcatccattgttttttcttgaattatatcatcagcttcatagtatgtttcatttgttgcatttgatgctgcatttgaattgagggctttggtttttccatttgacttgcctgcag

SEQ ID NO: 5523 - protein, 30 aa, Homo sapiens
MIWVLPTHIIGVVEITSNIHVSDSPLSMKS

SEQ ID NO: 5524 - DNA, 7137 bp, Homo sapiens
tggttctgccgtcgctagaggcgtacaggcccttcccgaccgtagcgagggtgctgctgcgctgggggaaggaaaacgccgctttgactgtgccttgttctcacagctggcgggaagcaagcgccttttcgaaagccagaggctcgagttacccctcttaccaccgtcatggcagtcccaggttgcaacaaggacagtgtcagagcaggctgtaaaaaatgtggctaccctggtcacctgacttttgaatgccgcaattttctccgagtagaccctaaaagggacatagttttggatgtcagcagtacaagtagtgaagatagcgatgaagagaatgaagaactgaataaattgcaggcattacaggaaaaaagaataaatgaagaagaggaaaagaagaaagaaaaaagcaaagaaaaaatcaaattgaaaaaaaaaaggaaaaggtcttactcatccagttccactgaagaggacacttcaaaacaaaagaaacaaaaatatcagaagaaagaaaagaaaaaagaaaaaaagagtaaatcaaaaaaagggaaacatcacaaaaaggaaaaaaagaagagaaaaaaggaaaagcattcttctacacctaatagttctgaattctccagaaagtaactgagactttggcttaagccgttaaatttaaaaatttgtttttaaaacgtgtttgcccttccttggaatttgctatatattatgctttgcaataaatcacagccttttccatatagacatttttcgtatttgggaccattatccctctggcaatatatttttaatgtgctgtaactgtaaagtattaaatcagtcttgttacttgatagccatgccccaagtatagctatttgtgtatactaaacacatcatttttggtatttgtgtctctgtgtgtttggctagtgttactacttcataagttcattgtaaaatggctttactgccatcaacatgggtcatctacctagcagttaatgagtattgctggatcaggtgtccaccttccaatgatgaagcaaggtaaggggtaatgttttgctcttgacacagagaaatttaatagctttatgtactaaaatataatatcttttaaagatagtgaaattcttcagttttttaaatctctagggattttttttcaatgttgtagaagatgcagctgcttaatggtcttgactaggactttttaaatgaatggtgtctgcaggtagatgatcatgaaaatatctctaacaaagttttactcttctatgaaatgcagaatttctagtacctgcctcctttgtttttgtaataattaaaatacttcttgtataaagagattagttcagcctgttagtaagtctgcagagatgatgctgagttggttgtgatttttagaatagactcctgggttgttttacaaatgtgccatattggcatgtcttacagtgatacctcaaacacagaaatttttatttaggaagatagctaaatctttattagaactgatttttattgtattcagtataaattttatgaagcttgtttctatgagtactgtggaaaattttataaatgtgagcatatatatttattttgtctgacataatttgtagttttaaagcaagtttcacactgaacttaacgttttcataaatgaccagtttgggatgtttctctcttttactttagtggcaaactcaagagtaaaaagtgtcaaaaaaagaattgagaattttattctgtactttttaaaatttaagagccagggagttgcatcatgaaagcctttgtataataatggaaattttatatgggtaagcattttcaaacacatattagtagatacgttttttaaatttctattttcacattgatcagtgttactttgcttaatacttaggtagcccttatgtccactaaagtaaatgcttatgttgtagaagcatcgaacatcaaccaatgtcatggcacagcaccaaagattgcaaatacctcactatggtgcgcttagaaattttcaaattgataacctatagatacggctgcaggtgaattcatgatagtgaaatcagctaagtatacttaacctcacaggctagaaaggtttactgattcttgtttcacctggcacccaatgtggataccctcagtaagactcagggagccttataactcctcttaacatatgcttacccatgcttaaattctagggaagctgtatccacagccctctgcattgcagccatgagagctctcacgctttcaacccttccataacctaatttagtcatttgggcctctcaaaaggaaatgcttttgtttaaataggtcagtcagttactgggagaaaaaatacagagccagtaggtttttagggatttgttttgcctttgctgctagttttttgaaaatattcttcgattatcaagattttaaaaatcggtttttaatataaagcttttttaaaaacgaggctggcacaagtgcagtggtgtttctttactcccactgcttgacttgactagccttgaaaaaataacagtaaaataaaatattaaaaaataattagaaaatgctacaaaggcaatgaccttattccattgagtaagatagttaaaaatgatagtaattgtagtgaaatagttaattacttgtaagttttattactgttaattgtagagattataaattggctcattaggtttctgaatggtgacacaataatgactgagaagagcaaaagtcagtcctcgttaactaatgtagtatgcaaattaaaatattttaatgatcagtaattttccccccagaaatgatgttggcatttctaagtaaatttcccataattttagcatagtttatgaaattgaataaaaatttattttcactgaagtaattttcttctaatatgatattattattgagattggatgcaaatctcatgaatatgttttagaagaaaattaatgaaattccctcccaggcagtatgtaccagaaggaaaactgaatttagcagtaaaacagtcctggtcattctaactacctgtatgatcttgaacaaagtcacttagtttccctgggccttggtgtctttcgtctataaaatattgtaccagattatctctgaaatcacttcaaggtttaatatatataattatcaatattttaaaattcaagcaatattcactttagaaattattataacattctataatagtaaaggttgaatttattaatataataaacacgttcaacttcttcaagcagataattgatatttggttcatattcttacaacctaatgcatgtcattttcaccaaatgcaggcagaatttatatttaggtttgcatctggaactagattatctggcactttatggccattatttttgggttgatggaccttctcaccacacaatttcccccttttttttttttgcatatcatatgttggttgatatttctcagaggtatccctatttcttcatacttaatatacatctccatttacatctttgactctctgaggtcaaaacaacaataaatgagaagtaaaacaactatatgtgtttgtatttacaactgtatctaaaattatataaccctagtttaccttcagagtaaactaggctgaagagttgttaataatgttgataaaaatgccattgaatcctttcttcaacaaatatttattgagtacctaacgtggcaaacgctgtgctaagtactggggatacagagataagtaagacacatttgcctccctgaaggacttcacagtgtagttggtaggagaaacaccagagcatacaccgttatataattagtgcagtaattgacatgaacatgagtttatagaaactcggggttacctaaagtagtctggataaattagaagaggctacctagagaaagtagtgactgaattgcaatttgattaaggataagaatgagggttatggcagttcctgacagagtgggtactgtgaacaaacaccagaggtagaacaagctgtgttatgtgtttgtcaagaattacaagcaatctggtgttgctggtgtatcataggcgaggcaggaagtggtaagaattgagactaccattttaagttcttaggaacaggaggaaggagtcgtgtgttccgtgtttgggagcttgaactgtaatgtgtaagcaatgagacaccattaaagagtttcaaggggggccgggcacagtggctcacgcctgtaatcccagcactttgggaggctgaggcgggcggatcacctgaggtcaggagttcaagaccagcctggccaacttggcgaaaccctgtctctactaaaaatagaaaaattagccggacgtggtgacaggcacctgtattcccagctactctggagtctggggcaggagaatcgctcaaacccaggaggtggaagttgcagtaagctgagatcacaccactgtactccagcctgggcgacagagcgagactctatctcaaaaaaaaaaaaagattttaaggaaggaaatgacttttattagggtttggttttatcaatttcataatccgattaatcccaccatttttaaaagatgaaattgctttcattagaaggctacataaaatataatttgattattttaggctctattattagactcacatttctttctacagtctcattattatttccaaaaattacacagtaacctaaatcatctaaaaacacataaagctactgtattctttattagatccatccccagagttatatgtacatgtacatactttgagatgtgttttgttcttaattgtattttaggttatttttgactgacttaaattctatcactattttaatatttgttaggtccgaataaaccatttagaatatttttcagtgtacaaaatgtgctgtaatttaataaggccccttgcttttaaaatttggcttaacctgtgaagcacaactgcttcagagttacagagaaacataccagttggtccactggatgagccctgtggttctacctcaggtaacctagtgataagctagctcagcagggagtgcttcaaggactccagctgatcctagtgctgagaccaaaacttcctggacattgggtgcccaagaacagtaggtttcttataccagtgtgacaataatcccagttgcgaaggccagtcttctgatctcagtatctcctcccaactcctctaaaaataggtagagtggcagagaattggggtgcctcttctatagcacaacccatgatgcatccagtcatgcctgaccccactatgcctttcccacaaattgggaggagttggggcagtgagcattttgctagctctgtctgtttcttgcttcttgtgccatttatagtccttggccatgagcaacaaaagtagaatggtgccagtgccttaactaaatttttctcaacctagattttcacctgagacaatatggtaatattattaaattactgtaaagatagcaaattttctgggatactttaaaatcaaagttgtatcaaagatcaagaagcacccataaaagctttataaactttcacaaaaaataagtgaaaattctttgtttttatggccgtgtaaaatgtcatttttataatggaaatgtcttaattttcaaacttaacatatactttaagcaattttagtatttaaacctttgcaaaattgtatttttgaatgtgaagttcaactttggcagtaggttgttgcaatagtgatctggcactatggtgccagtatagccacatagggttatttaaattaattaaataaatgaaaaattttattttttcagttgcattagccacatcttaagtgttcagtagccacatgtgactggtggctaccatattagtgcagatatagaaagaacatttccatcatcacagaaacttctcttaattctggtctagaagataaccttagtacttggtagaaattttgacaggctaatgacgaaaagtttgtaaccctgagctttgcatgcccaagaaaaataaggtattcttttttatatatcagaccagagaagctgtattcagcacattttgaaatgctagtttttggctatggccataccaccctaaatgtgccagatcttgtctgaaatgctagtttctgactacaaaaactacaggacatagtagatatgctcagtagagctgcttaaaataattccctttttttttctgttgaattctgttacaaaaccaggtctgtgttataatagaaaacacacttatgaataaaaatctttaaaaattataatttgcagaaattagttttatttctagatttctaggtggtattaatgtgatagcattaggtgggaccagagaactcatttgttttgtagctttcattatacagattatttaggaaatatatcagcaaaggattttttgttatgcttatctcttgaaacaaaatatttattgtacagattatacattgtgatttttttgttactgagtatattgtttgtgcccagaaaaatctaaaaagatgtgggttgacttctaagagatttaagaacaagtcacctctagtttttaagacagttcccttgatatttacctatccagtaccatctcataagaataactgcctgtaagtatcagaaagttgagaaatgctggtaatgtgacataaacttctcactgttcttcactgagataggactgcttatcttgttattgataaattatttaatttctcctgaataattagcataatctcatgtgatacagaaacatcttaattagcaaataaatttatacaaaggaaaaccaataaaaccttaatgtgcgtttaataaagtaactgaatgatcaaaaatgcagctgtgtcttgctttgtgagtgacgaatttttgaaaagcaatattacaaaccgtttcaagtgcacgctttatttttattgtcccatctctccagtaagcatttaaaacacagaatttttagttaataagcaatgtggatttgtgttgcatccattgttttttcttgaattatatcatcagcttcatagtatgtttcatttgttgcatttgatgctgcatttgaattgagggctttggtttttccatttgacttgcctgcag

SEQ ID NO: 5525 - protein, 155 aa, Homo sapiens; identical to SEQ ID NO: 638

SEQ ID NO: 5526 - DNA, 6909 bp, Homo sapiens
gatataatttgtagcttaggaaagaagtcagagtcaaagacaatgatttgggtgttacccacacacataataggagttgttgaaattacctccaacattcatgtcagtgattcaccactctccatgaagagctgaactggcacaagtggcaacgtatgttactgatgtaattggcacaaaactgttttcttattatctccttcactgaagccctatagccaaggttgcaacaaggacagtgtcagagcaggctgtaaaaaatgtggctaccctggtcacctgacttttgaatgccgcaattttctccgagtagaccctaaaagggacatagttttggatgtcagcagtacaagtagtgaagatagcgatgaagagaatgaagaactgaataaattgcaggcattacaggaaaaaagaataaatgaagaagaggaaaagaagaaagaaaaaagcaaagaaaaaatcaaattgaaaaaaaaaaggaaaaggtcttactcatccagttccactgaagaggacacttcaaaacaaaagaaacaaaaatatcagaagaaagaaaagaaaaaagaaaaaaagagtaaatcaaaaaaagggaaacatcacaaaaaggaaaaaaagaagagaaaaaaggaaaagcattcttctacacctaatagttctgaattctccagaaagtaactgagactttggcttaagccgttaaatttaaaaatttgtttttaaaacgtgtttgcccttccttggaatttgctatatattatgctttgcaataaatcacagccttttccatatagacatttttcgtatttgggaccattatccctctggcaatatatttttaatgtgctgtaactgtaaagtattaaatcagtcttgttacttgatagccatgccccaagtatagctatttgtgtatactaaacacatcatttttggtatttgtgtctctgtgtgtttggctagtgttactacttcataagttcattgtaaaatggctttactgccatcaacatgggtcatctacctagcagttaatgagtattgctggatcaggtgtccaccttccaatgatgaagcaaggtaaggggtaatgttttgctcttgacacagagaaatttaatagctttatgtactaaaatataatatcttttaaagatagtgaaattcttcagttttttaaatctctagggattttttttcaatgttgtagaagatgcagctgcttaatggtcttgactaggactttttaaatgaatggtgtctgcaggtagatgatcatgaaaatatctctaacaaagttttactcttctatgaaatgcagaatttctagtacctgcctcctttgtttttgtaataattaaaatacttcttgtataaagagattagttcagcctgttagtaagtctgcagagatgatgctgagttggttgtgatttttagaatagactcctgggttgttttacaaatgtgccatattggcatgtcttacagtgatacctcaaacacagaaatttttatttaggaagatagctaaatctttattagaactgatttttattgtattcagtataaattttatgaagcttgtttctatgagtactgtggaaaattttataaatgtgagcatatatatttattttgtctgacataatttgtagttttaaagcaagtttcacactgaacttaacgttttcataaatgaccagtttgggatgtttctctcttttactttagtggcaaactcaagagtaaaaagtgtcaaaaaaagaattgagaattttattctgtactttttaaaatttaagagccagggagttgcatcatgaaagcctttgtataataatggaaattttatatgggtaagcattttcaaacacatattagtagatacgttttttaaatttctattttcacattgatcagtgttactttgcttaatacttaggtagcccttatgtccactaaagtaaatgcttatgttgtagaagcatcgaacatcaaccaatgtcatggcacagcaccaaagattgcaaatacctcactatggtgcgcttagaaattttcaaattgataacctatagatacggctgcaggtgaattcatgatagtgaaatcagctaagtatacttaacctcacaggctagaaaggtttactgattcttgtttcacctggcacccaatgtggataccctcagtaagactcagggagccttataactcctcttaacatatgcttacccatgcttaaattctagggaagctgtatccacagccctctgcattgcagccatgagagctctcacgctttcaacccttccataacctaatttagtcatttgggcctctcaaaaggaaatgcttttgtttaaataggtcagtcagttactgggagaaaaaatacagagccagtaggtttttagggatttgttttgcctttgctgctagttttttgaaaatattcttcgattatcaagattttaaaaatcggtttttaatataaagcttttttaaaaacgaggctggcacaagtgcagtggtgtttctttactcccactgcttgacttgactagccttgaaaaaataacagtaaaataaaatattaaaaaataattagaaaatgctacaaaggcaatgaccttattccattgagtaagatagttaaaaatgatagtaattgtagtgaaatagttaattacttgtaagttttattactgttaattgtagagattataaattggctcattaggtttctgaatggtgacacaataatgactgagaagagcaaaagtcagtcctcgttaactaatgtagtatgcaaattaaaatattttaatgatcagtaattttccccccagaaatgatgttggcatttctaagtaaatttcccataattttagcatagtttatgaaattgaataaaaatttattttcactgaagtaattttcttctaatatgatattattattgagattggatgcaaatctcatgaatatgttttagaagaaaattaatgaaattccctcccaggcagtatgtaccagaaggaaaactgaatttagcagtaaaacagtcctggtcattctaactacctgtatgatcttgaacaaagtcacttagtttccctgggccttggtgtctttcgtctataaaatattgtaccagattatctctgaaatcacttcaaggtttaatatatataattatcaatattttaaaattcaagcaatattcactttagaaattattataacattctataatagtaaaggttgaatttattaatataataaacacgttcaacttcttcaagcagataattgatatttggttcatattcttacaacctaatgcatgtcattttcaccaaatgcaggcagaatttatatttaggtttgcatctggaactagattatctggcactttatggccattatttttgggttgatggaccttctcaccacacaatttcccccttttttttttttgcatatcatatgttggttgatatttctcagaggtatccctatttcttcatacttaatatacatctccatttacatctttgactctctgaggtcaaaacaacaataaatgagaagtaaaacaactatatgtgtttgtatttacaactgtatctaaaattatataaccctagtttaccttcagagtaaactaggctgaagagttgttaataatgttgataaaaatgccattgaatcctttcttcaacaaatatttattgagtacctaacgtggcaaacgctgtgctaagtactggggatacagagataagtaagacacatttgcctccctgaaggacttcacagtgtagttggtaggagaaacaccagagcatacaccgttatataattagtgcagtaattgacatgaacatgagtttatagaaactcggggttacctaaagtagtctggataaattagaagaggctacctagagaaagtagtgactgaattgcaatttgattaaggataagaatgagggttatggcagttcctgacagagtgggtactgtgaacaaacaccagaggtagaacaagctgtgttatgtgtttgtcaagaattacaagcaatctggtgttgctggtgtatcataggcgaggcaggaagtggtaagaattgagactaccattttaagttcttaggaacaggaggaaggagtcgtgtgttccgtgtttgggagcttgaactgtaatgtgtaagcaatgagacaccattaaagagtttcaaggggggccgggcacagtggctcacgcctgtaatcccagcactttgggaggctgaggcgggcggatcacctgaggtcaggagttcaagaccagcctggccaacttggcgaaaccctgtctctactaaaaatagaaaaattagccggacgtggtgacaggcacctgtattcccagctactctggagtctggggcaggagaatcgctcaaacccaggaggtggaagttgcagtaagctgagatcacaccactgtactccagcctgggcgacagagcgagactctatctcaaaaaaaaaaaaagattttaaggaaggaaatgacttttattagggtttggttttatcaatttcataatccgattaatcccaccatttttaaaagatgaaattgctttcattagaaggctacataaaatataatttgattattttaggctctattattagactcacatttctttctacagtctcattattatttccaaaaattacacagtaacctaaatcatctaaaaacacataaagctactgtattctttattagatccatccccagagttatatgtacatgtacatactttgagatgtgttttgttcttaattgtattttaggttatttttgactgacttaaattctatcactattttaatatttgttaggtccgaataaaccatttagaatatttttcagtgtacaaaatgtgctgtaatttaataaggccccttgcttttaaaatttggcttaacctgtgaagcacaactgcttcagagttacagagaaacataccagttggtccactggatgagccctgtggttctacctcaggtaacctagtgataagctagctcagcagggagtgcttcaaggactccagctgatcctagtgctgagaccaaaacttcctggacattgggtgcccaagaacagtaggtttcttataccagtgtgacaataatcccagttgcgaaggccagtcttctgatctcagtatctcctcccaactcctctaaaaataggtagagtggcagagaattggggtgcctcttctatagcacaacccatgatgcatccagtcatgcctgaccccactatgcctttcccacaaattgggaggagttggggcagtgagcattttgctagctctgtctgtttcttgcttcttgtgccatttatagtccttggccatgagcaacaaaagtagaatggtgccagtgccttaactaaatttttctcaacctagattttcacctgagacaatatggtaatattattaaattactgtaaagatagcaaattttctgggatactttaaaatcaaagttgtatcaaagatcaagaagcacccataaaagctttataaactttcacaaaaaataagtgaaaattctttgtttttatggccgtgtaaaatgtcatttttataatggaaatgtcttaattttcaaacttaacatatactttaagcaattttagtatttaaacctttgcaaaattgtatttttgaatgtgaagttcaactttggcagtaggttgttgcaatagtgatctggcactatggtgccagtatagccacatagggttatttaaattaattaaataaatgaaaaattttattttttcagttgcattagccacatcttaagtgttcagtagccacatgtgactggtggctaccatattagtgcagatatagaaagaacatttccatcatcacagaaacttctcttaattctggtctagaagataaccttagtacttggtagaaattttgacaggctaatgacgaaaagtttgtaaccctgagctttgcatgcccaagaaaaataaggtattcttttttatatatcagaccagagaagctgtattcagcacattttgaaatgctagtttttggctatggccataccaccctaaatgtgccagatcttgtctgaaatgctagtttctgactacaaaaactacaggacatagtagatatgctcagtagagctgcttaaaataattccctttttttttctgttgaattctgttacaaaaccaggtctgtgttataatagaaaacacacttatgaataaaaatctttaaaaattataatttgcagaaattagttttatttctagatttctaggtggtattaatgtgatagcattaggtgggaccagagaactcatttgttttgtagctttcattatacagattatttaggaaatatatcagcaaaggattttttgttatgcttatctcttgaaacaaaatatttattgtacagattatacattgtgatttttttgttactgagtatattgtttgtgcccagaaaaatctaaaaagatgtgggttgacttctaagagatttaagaacaagtcacctctagtttttaagacagttcccttgatatttacctatccagtaccatctcataagaataactgcctgtaagtatcagaaagttgagaaatgctggtaatgtgacataaacttctcactgttcttcactgagataggactgcttatcttgttattgataaattatttaatttctcctgaataattagcataatctcatgtgatacagaaacatcttaattagcaaataaatttatacaaaggaaaaccaataaaaccttaatgtgcgtttaataaagtaactgaatgatc

SEQ ID NO: 5527 - protein, 30 aa, Homo sapiens; identical to SEQ ID NO: 5523

SEQ ID NO: 5528 - DNA, 6867 bp, Homo sapiens
tggttctgccgtcgctagaggcgtacaggcccttcccgaccgtagcgagggtgctgctgcgctgggggaaggaaaacgccgctttgactgtgccttgttctcacagctggcgggaagcaagcgccttttcgaaagccagaggctcgagttacccctcttaccaccgtcatggcagtcccaggttgcaacaaggacagtgtcagagcaggctgtaaaaaatgtggctaccctggtcacctgacttttgaatgccgcaattttctccgagtagaccctaaaagggacatagttttggatgtcagcagtacaagtagtgaagatagcgatgaagagaatgaagaactgaataaattgcaggcattacaggaaaaaagaataaatgaagaagaggaaaagaagaaagaaaaaagcaaagaaaaaatcaaattgaaaaaaaaaaggaaaaggtcttactcatccagttccactgaagaggacacttcaaaacaaaagaaacaaaaatatcagaagaaagaaaagaaaaaagaaaaaaagagtaaatcaaaaaaagggaaacatcacaaaaaggaaaaaaagaagagaaaaaaggaaaagcattcttctacacctaatagttctgaattctccagaaagtaactgagactttggcttaagccgttaaatttaaaaatttgtttttaaaacgtgtttgcccttccttggaatttgctatatattatgctttgcaataaatcacagccttttccatatagacatttttcgtatttgggaccattatccctctggcaatatatttttaatgtgctgtaactgtaaagtattaaatcagtcttgttacttgatagccatgccccaagtatagctatttgtgtatactaaacacatcatttttggtatttgtgtctctgtgtgtttggctagtgttactacttcataagttcattgtaaaatggctttactgccatcaacatgggtcatctacctagcagttaatgagtattgctggatcaggtgtccaccttccaatgatgaagcaaggtaaggggtaatgttttgctcttgacacagagaaatttaatagctttatgtactaaaatataatatcttttaaagatagtgaaattcttcagttttttaaatctctagggattttttttcaatgttgtagaagatgcagctgcttaatggtcttgactaggactttttaaatgaatggtgtctgcaggtagatgatcatgaaaatatctctaacaaagttttactcttctatgaaatgcagaatttctagtacctgcctcctttgtttttgtaataattaaaatacttcttgtataaagagattagttcagcctgttagtaagtctgcagagatgatgctgagttggttgtgatttttagaatagactcctgggttgttttacaaatgtgccatattggcatgtcttacagtgatacctcaaacacagaaatttttatttaggaagatagctaaatctttattagaactgatttttattgtattcagtataaattttatgaagcttgtttctatgagtactgtggaaaattttataaatgtgagcatatatatttattttgtctgacataatttgtagttttaaagcaagtttcacactgaacttaacgttttcataaatgaccagtttgggatgtttctctcttttactttagtggcaaactcaagagtaaaaagtgtcaaaaaaagaattgagaattttattctgtactttttaaaatttaagagccagggagttgcatcatgaaagcctttgtataataatggaaattttatatgggtaagcattttcaaacacatattagtagatacgttttttaaatttctattttcacattgatcagtgttactttgcttaatacttaggtagcccttatgtccactaaagtaaatgcttatgttgtagaagcatcgaacatcaaccaatgtcatggcacagcaccaaagattgcaaatacctcactatggtgcgcttagaaattttcaaattgataacctatagatacggctgcaggtgaattcatgatagtgaaatcagctaagtatacttaacctcacaggctagaaaggtttactgattcttgtttcacctggcacccaatgtggataccctcagtaagactcagggagccttataactcctcttaacatatgcttacccatgcttaaattctagggaagctgtatccacagccctctgcattgcagccatgagagctctcacgctttcaacccttccataacctaatttagtcatttgggcctctcaaaaggaaatgcttttgtttaaataggtcagtcagttactgggagaaaaaatacagagccagtaggtttttagggatttgttttgcctttgctgctagttttttgaaaatattcttcgattatcaagattttaaaaatcggtttttaatataaagcttttttaaaaacgaggctggcacaagtgcagtggtgtttctttactcccactgcttgacttgactagccttgaaaaaataacagtaaaataaaatattaaaaaataattagaaaatgctacaaaggcaatgaccttattccattgagtaagatagttaaaaatgatagtaattgtagtgaaatagttaattacttgtaagttttattactgttaattgtagagattataaattggctcattaggtttctgaatggtgacacaataatgactgagaagagcaaaagtcagtcctcgttaactaatgtagtatgcaaattaaaatattttaatgatcagtaattttccccccagaaatgatgttggcatttctaagtaaatttcccataattttagcatagtttatgaaattgaataaaaatttattttcactgaagtaattttcttctaatatgatattattattgagattggatgcaaatctcatgaatatgttttagaagaaaattaatgaaattccctcccaggcagtatgtaccagaaggaaaactgaatttagcagtaaaacagtcctggtcattctaactacctgtatgatcttgaacaaagtcacttagtttccctgggccttggtgtctttcgtctataaaatattgtaccagattatctctgaaatcacttcaaggtttaatatatataattatcaatattttaaaattcaagcaatattcactttagaaattattataacattctataatagtaaaggttgaatttattaatataataaacacgttcaacttcttcaagcagataattgatatttggttcatattcttacaacctaatgcatgtcattttcaccaaatgcaggcagaatttatatttaggtttgcatctggaactagattatctggcactttatggccattatttttgggttgatggaccttctcaccacacaatttcccccttttttttttttgcatatcatatgttggttgatatttctcagaggtatccctatttcttcatacttaatatacatctccatttacatctttgactctctgaggtcaaaacaacaataaatgagaagtaaaacaactatatgtgtttgtatttacaactgtatctaaaattatataaccctagtttaccttcagagtaaactaggctgaagagttgttaataatgttgataaaaatgccattgaatcctttcttcaacaaatatttattgagtacctaacgtggcaaacgctgtgctaagtactggggatacagagataagtaagacacatttgcctccctgaaggacttcacagtgtagttggtaggagaaacaccagagcatacaccgttatataattagtgcagtaattgacatgaacatgagtttatagaaactcggggttacctaaagtagtctggataaattagaagaggctacctagagaaagtagtgactgaattgcaatttgattaaggataagaatgagggttatggcagttcctgacagagtgggtactgtgaacaaacaccagaggtagaacaagctgtgttatgtgtttgtcaagaattacaagcaatctggtgttgctggtgtatcataggcgaggcaggaagtggtaagaattgagactaccattttaagttcttaggaacaggaggaaggagtcgtgtgttccgtgtttgggagcttgaactgtaatgtgtaagcaatgagacaccattaaagagtttcaaggggggccgggcacagtggctcacgcctgtaatcccagcactttgggaggctgaggcgggcggatcacctgaggtcaggagttcaagaccagcctggccaacttggcgaaaccctgtctctactaaaaatagaaaaattagccggacgtggtgacaggcacctgtattcccagctactctggagtctggggcaggagaatcgctcaaacccaggaggtggaagttgcagtaagctgagatcacaccactgtactccagcctgggcgacagagcgagactctatctcaaaaaaaaaaaaagattttaaggaaggaaatgacttttattagggtttggttttatcaatttcataatccgattaatcccaccatttttaaaagatgaaattgctttcattagaaggctacataaaatataatttgattattttaggctctattattagactcacatttctttctacagtctcattattatttccaaaaattacacagtaacctaaatcatctaaaaacacataaagctactgtattctttattagatccatccccagagttatatgtacatgtacatactttgagatgtgttttgttcttaattgtattttaggttatttttgactgacttaaattctatcactattttaatatttgttaggtccgaataaaccatttagaatatttttcagtgtacaaaatgtgctgtaatttaataaggccccttgcttttaaaatttggcttaacctgtgaagcacaactgcttcagagttacagagaaacataccagttggtccactggatgagccctgtggttctacctcaggtaacctagtgataagctagctcagcagggagtgcttcaaggactccagctgatcctagtgctgagaccaaaacttcctggacattgggtgcccaagaacagtaggtttcttataccagtgtgacaataatcccagttgcgaaggccagtcttctgatctcagtatctcctcccaactcctctaaaaataggtagagtggcagagaattggggtgcctcttctatagcacaacccatgatgcatccagtcatgcctgaccccactatgcctttcccacaaattgggaggagttggggcagtgagcattttgctagctctgtctgtttcttgcttcttgtgccatttatagtccttggccatgagcaacaaaagtagaatggtgccagtgccttaactaaatttttctcaacctagattttcacctgagacaatatggtaatattattaaattactgtaaagatagcaaattttctgggatactttaaaatcaaagttgtatcaaagatcaagaagcacccataaaagctttataaactttcacaaaaaataagtgaaaattctttgtttttatggccgtgtaaaatgtcatttttataatggaaatgtcttaattttcaaacttaacatatactttaagcaattttagtatttaaacctttgcaaaattgtatttttgaatgtgaagttcaactttggcagtaggttgttgcaatagtgatctggcactatggtgccagtatagccacatagggttatttaaattaattaaataaatgaaaaattttattttttcagttgcattagccacatcttaagtgttcagtagccacatgtgactggtggctaccatattagtgcagatatagaaagaacatttccatcatcacagaaacttctcttaattctggtctagaagataaccttagtacttggtagaaattttgacaggctaatgacgaaaagtttgtaaccctgagctttgcatgcccaagaaaaataaggtattcttttttatatatcagaccagagaagctgtattcagcacattttgaaatgctagtttttggctatggccataccaccctaaatgtgccagatcttgtctgaaatgctagtttctgactacaaaaactacaggacatagtagatatgctcagtagagctgcttaaaataattccctttttttttctgttgaattctgttacaaaaccaggtctgtgttataatagaaaacacacttatgaataaaaatctttaaaaattataatttgcagaaattagttttatttctagatttctaggtggtattaatgtgatagcattaggtgggaccagagaactcatttgttttgtagctttcattatacagattatttaggaaatatatcagcaaaggattttttgttatgcttatctcttgaaacaaaatatttattgtacagattatacattgtgatttttttgttactgagtatattgtttgtgcccagaaaaatctaaaaagatgtgggttgacttctaagagatttaagaacaagtcacctctagtttttaagacagttcccttgatatttacctatccagtaccatctcataagaataactgcctgtaagtatcagaaagttgagaaatgctggtaatgtgacataaacttctcactgttcttcactgagataggactgcttatcttgttattgataaattatttaatttctcctgaataattagcataatctcatgtgatacagaaacatcttaattagcaaataaatttatacaaaggaaaaccaataaaaccttaatgtgcgtttaataaagtaactgaatgatc

SEQ ID NO: 5529 - protein, 155 aa, Homo sapiens; identical to SEQ ID NO: 638

SEQ ID NO: 5530 - DNA, 937 bp, Homo sapiens
gatataatttgtagcttaggaaagaagtcagagtcaaagacaatgatttgggtgttacccacacacataataggagttgttgaaattacctccaacattcatgtcagtgattcaccactctccatgaagagctgaactggcacaagtggcaacgtatgttactgatgtaattggcacaaaactgttttcttattatctccttcactgaagccctatagccaaggttgcaacaaggacagtgtcagagcaggctgtaaaaaatgtggctaccctggtcacctgacttttgaatgccgcaattttctccgagtagaccctaaaagggacatagttttggatgtcagcagtacaagtagtgaagatagcgatgaagagaatgaagaactgaataaattgcaggcattacaggaaaaaagaataaatgaagaagaggaaaagaagaaagaaaaaagcaaagaaaaaatcaaattgaaaaaaaaaaggaaaaggtcttactcatccagttccactgaagaggacacttcaaaacaaaagaaacaaaaatatcagaagaaagaaaagaaaaaagaaaaaaagagtaaatcaaaaaaagggaaacatcacaaaaaggaaaaaaagaagagaaaaaaggaaaagcattcttctacacctaatagttctgaattctccagaaagtaactgagactttggcttaagccgttaaatttaaaaatttgtttttaaaacgtgtttgcccttccttggaatttgctatatattatgctttgcaataaatcacagccttttccatatagacatttttcgtatttgggaccattatccctctggcaatatatttttaatgtgctgtaactgtaaagtattaaatcagtcttgttacttgatagccatgccccaagtatagctatttgtgtatactaaacacatcatttttggt

SEQ ID NO: 5531 - protein, 30 aa, Homo sapiens; identical to SEQ ID NO: 5523

SEQ ID NO: 5532 - DNA, 895 bp, Homo sapiens
tggttctgccgtcgctagaggcgtacaggcccttcccgaccgtagcgagggtgctgctgcgctgggggaaggaaaacgccgctttgactgtgccttgttctcacagctggcgggaagcaagcgccttttcgaaagccagaggctcgagttacccctcttaccaccgtcatggcagtcccaggttgcaacaaggacagtgtcagagcaggctgtaaaaaatgtggctaccctggtcacctgacttttgaatgccgcaattttctccgagtagaccctaaaagggacatagttttggatgtcagcagtacaagtagtgaagatagcgatgaagagaatgaagaactgaataaattgcaggcattacaggaaaaaagaataaatgaagaagaggaaaagaagaaagaaaaaagcaaagaaaaaatcaaattgaaaaaaaaaaggaaaaggtcttactcatccagttccactgaagaggacacttcaaaacaaaagaaacaaaaatatcagaagaaagaaaagaaaaaagaaaaaaagagtaaatcaaaaaaagggaaacatcacaaaaaggaaaaaaagaagagaaaaaaggaaaagcattcttctacacctaatagttctgaattctccagaaagtaactgagactttggcttaagccgttaaatttaaaaatttgtttttaaaacgtgtttgcccttccttggaatttgctatatattatgctttgcaataaatcacagccttttccatatagacatttttcgtatttgggaccattatccctctggcaatatatttttaatgtgctgtaactgtaaagtattaaatcagtcttgttacttgatagccatgccccaagtatagctatttgtgtatactaaacacatcatttttggt

SEQ ID NO: 5533 - protein, 155 aa, Homo sapiens; identical to SEQ ID NO: 638

SEQ ID NO: 5534 - DNA, 790 bp, Homo sapiens
gatataatttgtagcttaggaaagaagtcagagtcaaagacaatgatttgggtgttacccacacacataataggagttgttgaaattacctccaacattcatgtcagtgattcaccactctccatgaagagctgaactggcacaagtggcaacgtatgttactgatgtaattggcacaaaactgttttcttattatctccttcactgaagccctatagccaaggttgcaacaaggacagtgtcagagcaggctgtaaaaaatgtggctaccctggtcacctgacttttgaatgccgcaattttctccgagtagaccctaaaagggacatagttttggatgtcagcagtacaagtagtgaagatagcgatgaagagaatgaagaactgaataaattgcaggcattacaggaaaaaagaataaatgaagaagaggaaaagaagaaagaaaaaagcaaagaaaaaatcaaattgaaaaaaaaaaggaaaaggtcttactcatccagttccactgaagaggacacttcaaaacaaaagaaacaaaaatatcagaagaaagaaaagaaaaaagaaaaaaagagtaaatcaaaaaaagggaaacatcacaaaaaggaaaaaaagaagagaaaaaaggaaaagcattcttctacacctaatagttctgaattctccagaaagtaactgagactttggcttaagccgttaaatttaaaaatttgtttttaaaacgtgtttgcccttccttggaatttgctatatattatgctttgcaataaatcacagccttttccat

SEQ ID NO: 5535 - protein, 30 aa, Homo sapiens; identical to SEQ ID NO: 5523

SEQ ID NO: 5536 - DNA, 748 bp, Homo sapiens
tggttctgccgtcgctagaggcgtacaggcccttcccgaccgtagcgagggtgctgctgcgctgggggaaggaaaacgccgctttgactgtgccttgttctcacagctggcgggaagcaagcgccttttcgaaagccagaggctcgagttacccctcttaccaccgtcatggcagtcccaggttgcaacaaggacagtgtcagagcaggctgtaaaaaatgtggctaccctggtcacctgacttttgaatgccgcaattttctccgagtagaccctaaaagggacatagttttggatgtcagcagtacaagtagtgaagatagcgatgaagagaatgaagaactgaataaattgcaggcattacaggaaaaaagaataaatgaagaagaggaaaagaagaaagaaaaaagcaaagaaaaaatcaaattgaaaaaaaaaaggaaaaggtcttactcatccagttccactgaagaggacacttcaaaacaaaagaaacaaaaatatcagaagaaagaaaagaaaaaagaaaaaaagagtaaatcaaaaaaagggaaacatcacaaaaaggaaaaaaagaagagaaaaaaggaaaagcattcttctacacctaatagttctgaattctccagaaagtaactgagactttggcttaagccgttaaatttaaaaatttgtttttaaaacgtgtttgcccttccttggaatttgctatatattatgctttgcaataaatcacagccttttccat

SEQ ID NO: 5537 - protein, 155 aa, Homo sapiens; identical to SEQ ID NO: 638

SEQ ID NO: 5538 - DNA, 2932 bp, Homo sapiens
cttctcagggttagcggtgctcgggtccggtaacaacatggcggcgtccgtgaggggctcctttgggcaggggtagtgtttggtgtccctgtcttgcgtgatattgacaaactgaagctttcctgcaccactggacttaaggaagagtgtactcgtaggcggacagctttagtggccggccggccgctctcatcccccgtaaggagcagagtcctttgtactgaccaagatgagcaacatctacatccaggagcctcccacgaatgggaaggttttattgaaaactacagctggagatattgacatagagttgtggtccaaagaagctcctaaagcttgcagaaattttatccaactttgtttggaagcttattatgacaataccatttttcatagagttgtgcctggtttcatagtccaaggcggagatcctactggcacagggagtggtggagagtctatctatggagcgccattcaaagatgaatttcattcacggttgcgttttaatcggagaggactggttgccatggcaaatgctggttctcatgataatggcagccagtttttcttcacactgggtcgagcagatgaacttaacaataagcataccatctttggaaaggttacaggggatacagtatataacatgttgcgactgtcagaagtagacattgatgatgacgaaagaccacataatccacacaaaataaaaagctgtgaggttttgtttaatccttttgatgacatcattccaagggaaattaaaaggctgaaaaaagagaaaccagaggaggaagtaaagaaattgaaacccaaaggcacaaaaaattttagtttactttcatttggagaggaagctgaggaagaagaggaggaagtaaatcgagttagtcagagcatgaagggcaaaagcaaaagtagtcatgacttgcttaaggatgatccacatctcagttctgttccagttgtagaaagtgaaaaaggtgatgcaccagatttagttgatgatggagaagatgaaagtgcagagcatgatgaatatattgatggtgatgaaaagaacctgatgagagaaagaattgccaaaaaattaaaaaaggacacaagtgcgaatgttaaatcagctggagaaggagaagtggagaagaaatcagtcagccgcaggaaattactctgcctaaccttggagcccagcctacagcccggcccaactgcagatctcaaatagcagaattgcccatccagggaatacaacttgcaactggcctgatgagaagccatcacagtttctagccattaactctgcctaatagcagagcccagccactgatctcaccagacagtggagtctatccagcagccccatgtaacatcagaggaaaggcatctgcccagcaaattagagaactcccaacaagctctgactccctgggatcatcaccagctggcccttcccaggctaaactaaatagtgaacctctatccatgccaaagaacacctattgtaaaggctagaagagggggctttctcctcaaatgcatagacaataacacaaggacacaagaactacaaagaacaaaagaaatcccaaaagaaactaataaagcttcagtaatggaccccaaagaaacggagatatttggaatgactgaggaagaatttagaatactactcataaagatgttcagtgatgtacaagaatatatggatagaaaatgtaataaaatttggaaactgatacctaacaaaaataacaagtttgacagaaatagaaacaatataaaagaaacacatataaattctagagttgaggaatacaatgactgaactgaaaaattcaatagaaagcatcattggtggatttgatagagcagaagaaagaatcaatgagctggaagacagcatttgatattatccagttagaggaccagaaagacaaaagagtgaaaaagaatgaagaaagcttatgggacttatgagacaccatcaagagttcaaacctttgcatactaggatttgcaaaagaagaaagagaaaaagggtcacaaagcctatttaaggaaagaatgactgaaaaatcccctaatctgggaatagatgtgaatatccaggtacaagaagcacagaaatttcaatcaaattcaacacacagaggagtacaccaaggcatacaataatctagctgtcaaaaatcaaagacaaaacattttgagaacagcaagagataataaacacatcacatacaaaggagacaatatgactatcagcagatttcccagcagaaacccagtaggccaggagagagtggcataatataattgaaatgccggaggaaaacaaacacaaaaactaccaatcaagaatacttaacccagcaaagctatctttcataattgagaaggaaataatactttctccctcagtttcatgaaacatatgaattgcaaaactcaatggtatatgtaaaatagtgccatattcagaaaactgtaggactgtaataatggtgcataaggcaatttcatccctagtacatgagtcaaaaaacaaaaatattaatagcagctatagctaaaataaattatcaaggtatacacattaaaaatgatgtaaattctgccattaaaaacataatgttgagggggtatgaaaaagtatagaattgttgtatgcaaagttaattgttgtatgcaaagttaagttgttatcagcttatacttgattgtttataagctgttatcagtttatacttgattgtttataagatgttctgtgtaaacctcatggtaatcacaaagcaaaaatctttagtggaaatataaagcaaaaatagaaaggattcaaagcataccactatagaaaaccatcaaatcacaaaggaagacagcaagggaggaagacaaaaaaaattatttaccaaacatccag

SEQ ID NO: 5539 - protein, 333 aa, Homo sapiens
MSNIYIQEPPTNGKVLLKTTAGDIDIELWSKEAPKACRNFIQLCLEAYYDNTIFHRVVPGFIVQGGDPTGTGSGGESIYGAPFKDEFHSRLRFNRRGLVAMANAGSHDNGSQFFFTLGRADELNNKHTIFGKVTGDTVYNMLRLSEVDIDDDERPHNPHKIKSCEVLFNPFDDIIPREIKRLKKEKPEEEVKKLKPKGTKNFSLLSFGEEAEEEEEEVNRVSQSMKGKSKSSHDLLKDDPHLSSVPVVESEKGDAPDLVDDGEDESAEHDEYIDGDEKNLMRERIAKKLKKDTSANVKSAGEGEVEKKSVSRRKLLCLTLEPSLQPGPTADLK

SEQ ID NO: 5540 - DNA, 1802 bp, Homo sapiens
agcggtgctcgggtccggtaacaacatggcggcgtccgtgaggggctcctttgggcaggggtagtgtttggtgtccctgtcttgcgtgatattgacaaactgaagctttcctgcaccactggacttaaggaagagtgtactcgtaggcggacagctttagtggccggccggccgctctcatcccccgtaaggagcagagtcctttgtactgaccaagatgagcaacatctacatccaggagcctcccacgaatgggaaggttttattgaaaactacagctggagatattgacatagagttgtggtccaaagaagctcctaaagcttgcagaaattttatccaactttgtttggaagcttattatgacaataccatttttcatagagttgtgcctggtttcatagtccaaggcggagatcctactggcacagggagtggtggagagtctatctatggagcgccattcaaagatgaatttcattcacggttgcgttttaatcggagaggactggttgccatggcaaatgctggttctcatgataatggcagccagtttttcttcacactgggtcgagcagatgaacttaacaataagcataccatctttggaaaggttacaggggatacagtatataacatgttgcgactgtcagaagtagacattgatgatgacgaaagaccacataatccacacaaaataaaaagctgtgaggttttgtttaatccttttgatgacatcattccaagggaaattaaaaggctgaaaaaagagaaaccagaggaggaagtaaagaaattgaaacccaaaggcacaaaaaattttagtttactttcatttggagaggaagctgaggaagaagaggaggaagtaaatcgagttagtcagagcatgaagggcaaaagcaaaagtagtcatgacttgcttaaggatgatccacatctcagttctgttccagttgtagaaagtgaaaaaggtgatgcaccagatttagttgatgatggagaagatgaaagtgcagagcatgatgaatatattgatggtgatgaaaagaacctgatgagagaaagaattgccaaaaaattaaaaaaggacacaagtgcgaatgttaaatcagctggagaaggagaagtggagaagaaatcagtcagccgcagtgaagagctcagaaaagaagcaagacaattaaaacgggaactcttagcagcaaaacaaaaaaaagtagaaaatgcagcaaaacaagcagaaaaaagaagtgaagaggaagaagcccctccagatggtgctgttgccgaatacagaagagaaaagcaaaagtatgaagctttgaggaagcaacagtcaaagaagggaacttcccgggaagatcaggatgtcacatgtacttcagtttgaggataaaagcagaaaagtgaaagatgcaagcatgcaagactcagatacatttgaaatctatgatcctcggaatccagtgaataaaagaaggagggaagaaagcaaaaagctgatgagagagaaaaaagaaagaagataaaatgagaataatgataaccagaacttgctggaaatgtgcctacaatggccttgtaacagccattgttcccaacagcatcacttaggggtgtgaaaagaagtatttttgaacctgttgtctggttttgaaaaacaattatcttgttttgcaaattgtggaatgatgtaagcaaatgcttttggttactggtacatgtgttttttcctagctgaccttttatattgctaaatctgaaataaaataactttccttccacattacatgttaacc

SEQ ID NO: 5541 - protein, 391 aa, Homo sapiens
MSNIYIQEPPTNGKVLLKTTAGDIDIELWSKEAPKACRNFIQLCLEAYYDNTIFHRVVPGFIVQGGDPTGTGSGGESIYGAPFKDEFHSRLRFNRRGLVAMANAGSHDNGSQFFFTLGRADELNNKHTIFGKVTGDTVYNMLRLSEVDIDDDERPHNPHKIKSCEVLFNPFDDIIPREIKRLKKEKPEEEVKKLKPKGTKNFSLLSFGEEAEEEEEEVNRVSQSMKGKSKSSHDLLKDDPHLSSVPVVESEKGDAPDLVDDGEDESAEHDEYIDGDEKNLMRERIAKKLKKDTSANVKSAGEGEVEKKSVSRSEELRKEARQLKRELLAAKQKKVENAAKQAEKRSEEEEAPPDGAVAEYRREKQKYEALRKQQSKKGTSREDQDVTCTSV

SEQ ID NO: 5542 - DNA, 1909 bp, Homo sapiens
agcggtgctcgggtccggtaacaacatggcggcgtccgtgaggggctcctttgggcaggggtagtgtttggtgtccctgtcttgcgtgatattgacaaactgaagctttcctgcaccactggacttaaggaagagtgtactcgtaggcggacagctttagtggccggccggccgctctcatcccccgtaaggagcagagtcctttgtactgaccaagatgagcaacatctacatccaggagcctcccacgaatgggaaggttttattgaaaactacagctggagatattgacatagagttgtggtccaaagaagctcctaaagcttgcagaaattttatccaactttgtttggaagcttattatgacaataccatttttcatagagttgtgcctggtttcatagtccaaggcggagatcctactggcacagggagtggtggagagtctatctatggagcgccattcaaagatgaatttcattcacggttgcgttttaatcggagaggactggttgccatggcaaatgctggttctcatgataatggcagccagtttttcttcacactgggtcgagcagatgaacttaacaataagcataccatctttggaaaggttacaggggatacagtatataacatgttgcgactgtcagaagtagacattgatgatgacgaaagaccacataatccacacaaaataaaaagctgtgaggttttgtttaatccttttgatgacatcattccaagggaaattaaaaggctgaaaaaagagaaaccagaggaggaagtaaagaaattgaaacccaaaggcacaaaaaattttagtttactttcatttggagaggaagctgaggaagaagaggaggaagtaaatcgagttagtcagagcatgaagggcaaaagcaaaagtagtcatgacttgcttaaggatgatccacatctcagttctgttccagttgtagaaagtgaaaaaggtgatgcaccagatttagttgatgatggagaagatgaaagtgcagagcatgatgaatatattgatggtgatgaaaagaacctgatgagagaaagaattgccaaaaaattaaaaaaggacacaagtgcgaatgttaaatcagctggagaaggagaagtggagaagaaatcagtcagccgcagtgaagagctcagaaaagaagcaagacaattaaaacgggaactcttagcagcaaaacaaaaaaaagtagaaaatgcagcaaaacaagcagaaaaaagaagtgaagaggaagaagcccctccagatggtgctgttgccgaatacagaagagaaaagcaaaagtatgaagctttgaggaagcaacagtcaaagaagggaacttcccgggaagatcagacccttgcactgctgaaccagtttaaatctaaactcactcaagcaattgctgaaacgcctgaaaatgacattcctgaaacagaagtagaagatgatgaaggatggatgtcacatgtacttcagtttgaggataaaagcagaaaagtgaaagatgcaagcatgcaagactcagatacatttgaaatctatgatcctcggaatccagtgaataaaagaaggagggaagaaagcaaaaagctgatgagagagaaaaaagaaagaagataaaatgagaataatgataaccagaacttgctggaaatgtgcctacaatggccttgtaacagccattgttcccaacagcatcacttaggggtgtgaaaagaagtatttttgaacctgttgtctggttttgaaaaacaattatcttgttttgcaaattgtggaatgatgtaagcaaatgcttttggttactggtacatgtgttttttcctagctgaccttttatattgctaaatctgaaataaaataactttccttccacattacatgttaaccatt

SEQ ID NO: 5543 - protein, 472 aa, Homo sapiens; identical to SEQ ID NO: 640

SEQ ID NO: 5544 - DNA, 2078 bp, Homo sapiens
agcggtgctcgggtccggtaacaacatggcggcgtccgtgaggggctcctttgggcaggggtagtgtttggtgtccctgtcttgcgtgatattgacaaactgaagctttcctgcaccactggacttaaggaagagtgtactcgtaggcggacagctttagtggccggccggccgctctcatcccccgtaaggagcagagtcctttgtactgaccaagatgagcaacatctacatccaggagcctcccacgaatgggaaggttttattgaaaactacagctggagatattgacatagagttgtggtccaaagaagctcctaaagcttgcagaaattttatccaactttgtttggaagcttattatgacaataccatttttcatagagttgtgcctggtttcatagtccaaggcggagatcctactggcacagggagtggtggagagtctatctatggagcgccattcaaagatgaatttcattcacggttgcgttttaatcggagaggactggttgccatggcaaatgctggttctcatgataatggcagccagtttttcttcacactgggtcgagcagatgaacttaacaataagcataccatctttggaaaggttacaggggatacagtatataacatgttgcgactgtcagaagtagacattgatgatgacgaaagaccacataatccacacaaaataaaaagctgtgaggttttgtttaatccttttgatgacatcattccaagggaaattaaaaggctgaaaaaagagaaaccagaggaggaagtaaagaaattgaaacccaaaggcacaaaaaattttagtttactttcatttggagaggaagctgaggaagaagaggaggaagtaaatcgagttagtcagagcatgaagggcaaaagcaaaagtagtcatgacttgcttaaggatgatccacatctcagttctgttccagttgtagaaagtgaaaaaggtgatgcaccagatttagttgatgatggagaagatgaaagtgcagagcatgatgaatatattgatggtgatgaaaagaacctgatgagagaaagaattgccaaaaaattaaaaaaggacacaagtgcgaatgttaaatcagctggagaaggagaagtggagaagaaatcagtcagccgcagtgaagagctcagaaaagaagcaagacaattaaaacgggaactcttagcagcaaaacaaaaaaaagtagaaaatgcagcaaaacaagcagaaaaaagaagtgaagaggaagaagcccctccagatggtgctgttgccgaatacagaagagaaaagcaaaagtatgaagctttgaggaagcaacagtcaaagaagggaacttcccgggaagatcagacccttgcactgctgaaccagtttaaatctaaactcactcaagcaattgctgaaacgcctgaaaatgacattcctgaaacagaagtagaagatgatgaaggatggatgtcacatgtacttcagtttgaggataaaagcagaaaagtgaaagatgcaagcatgcaagactcagatacatttgaaatctatgatcctcggaatccagtgaataaaagaaggagggaagaaagcaaaaagctgatgagagagaaaaaagaaagaagataaaatgagaataatgataaccagaacttgctggaaatgtgcctacaatggccttgtaacagccattgttcccaacagcatcacttaggggtgtgaaaagaagtatttttgaacctgttgtctggttttgaaaaacaattatcttgttttgcaaattgtggaatgatgtaagcaaatgcttttggttactggtacatgtgttttttcctagctgaccttttatattgctaaatctgaaataaaataactttccttccacattacatgttaaccattgcagactgcaagcctgtttgtgtccttttaccctaaaatatatgaaggcttccttttcaagatttttttataagaagttcctacagaaagaatatttgtgggaaacctccctttcactaacttcagaatataataaaatattataaataaaatatagaatataaatatg

SEQ ID NO: 5545 - protein, 472 aa, Homo sapiens; identical to SEQ ID NO: 640

SEQ ID NO: 5546 - DNA, 1974 bp, Homo sapiens
agcggtgctcgggtccggtaacaacatggcggcgtccgtgaggggctcctttgggcaggggtagtgtttggtgtccctgtcttgcgtgatattgacaaactgaagctttcctgcaccactggacttaaggaagagtgtactcgtaggcggacagctttagtggccggccggccgctctcatcccccgtaaggagcagagtcctttgtactgaccaagatgagcaacatctacatccaggagcctcccacgaatgggaaggttttattgaaaactacagctggagatattgacatagagttgtggtccaaagaagctcctaaagcttgcagaaattttatccaactttgtttggaagcttattatgacaataccatttttcatagagttgtgcctggtttcatagtccaaggcggagatcctactggcacagggagtggtggagagtctatctatggagcgccattcaaagatgaatttcattcacggttgcgttttaatcggagaggactggttgccatggcaaatgctggttctcatgataatggcagccagtttttcttcacactgggtcgagcagatgaacttaacaataagcataccatctttggaaaggttacaggggatacagtatataacatgttgcgactgtcagaagtagacattgatgatgacgaaagaccacataatccacacaaaataaaaagctgtgaggttttgtttaatccttttgatgacatcattccaagggaaattaaaaggctgaaaaaagagaaaccagaggaggaagtaaagaaattgaaacccaaaggcacaaaaaattttagtttactttcatttggagaggaagctgaggaagaagaggaggaagtaaatcgagttagtcagagcatgaagggcaaaagcaaaagtagtcatgacttgcttaaggatgatccacatctcagttctgttccagttgtagaaagtgaaaaaggtgatgcaccagatttagttgatgatggagaagatgaaagtgcagagcatgatgaatatattgatggtgatgaaaagaacctgatgagagaaagaattgccaaaaaattaaaaaaggacacaagtgcgaatgttaaatcagctggagaaggagaagtggagaagaaatcagtcagccgcagtgaagagctcagaaaagaagcaagacaattaaaacgggaactcttagcagcaaaacaaaaaaaagtagaaaatgcagcaaaacaagcagaaaaaagaagtgaagaggaagaagcccctccagatggtgctgttgccgaatacagaagagaaaagcaaaagtatgaagctttgaggaagcaacagtcaaagaagggaacttcccgggaagatcaggatgtcacatgtacttcagtttgaggataaaagcagaaaagtgaaagatgcaagcatgcaagactcagatacatttgaaatctatgatcctcggaatccagtgaataaaagaaggagggaagaaagcaaaaagctgatgagagagaaaaaagaaagaagataaaatgagaataatgataaccagaacttgctggaaatgtgcctacaatggccttgtaacagccattgttcccaacagcatcacttaggggtgtgaaaagaagtatttttgaacctgttgtctggttttgaaaaacaattatcttgttttgcaaattgtggaatgatgtaagcaaatgcttttggttactggtacatgtgttttttcctagctgaccttttatattgctaaatctgaaataaaataactttccttccacattacatgttaaccattgcagactgcaagcctgtttgtgtccttttaccctaaaatatatgaaggcttccttttcaagatttttttataagaagttcctacagaaagaatatttgtgggaaacctccctttcactaacttcagaatataataaaatattataaataaaatatagaatataaatatg

SEQ ID NO: 5547 - protein, 391 aa, Homo sapiens; identical to SEQ ID NO: 5541

SEQ ID NO: 5548 - DNA, 886 bp, Homo sapiens
agtttgaatagatagccaattagggctagaatggggctgatggaccatgaactacagttaaggaattggctttcattattatgggaatatgtgcaagcttagtagaaatgaaaggctgaaaaagttaaaaagtgaagagctcagaaaagaagcaagacaattaaaacgggaactcttagcagcaaaacaaaaaaaagtagaaaatgcagcaaaacaagcagaaaaaagaagtgaagaggaagaagcccctccagatggtgctgttgccgaatacagaagagaaaagcaaaagtatgaagctttgaggaagcaacagtcaaagaagggaacttcccgggaagatcagacccttgcactgctgaaccagtttaaatctaaactcactcaagcaattgctgaaacgcctgaaaatgacattcctgaaacagaagtagaagatgatgaaggatggatgtcacatgtacttcagtttgaggataaaagcagaaaagtgaaagatgcaagcatgcaagactcagatacatttgaaatctatgatcctcggaatccagtgaataaaagaaggagggaagaaagcaaaaagctgatgagagagaaaaaagaaagaagataaaatgagaataatgataaccagaacttgctggaaatgtgcctacaatggccttgtaacagccattgttcccaacagcatcacttaggggtgtgaaaagaagtatttttgaacctgttgtctggttttgaaaaacaattatcttgttttgcaaattgtggaatgatgtaagcaaatgcttttggttactggtacatgtgttttttcctagctgaccttttatattgctaaatctgaaataaaataactttccttccacattacatgttaaccatt

SEQ ID NO: 5549 - protein, 174 aa, Homo sapiens
MCKLSRNERLKKLKSEELRKEARQLKRELLAAKQKKVENAAKQAEKRSEEEEAPPDGAVAEYRREKQKYEALRKQQSKKGTSREDQTLALLNQFKSKLTQAIAETPENDIPETEVEDDEGWMSHVLQFEDKSRKVKDASMQDSDTFEIYDPRNPVNKRRREESKKLMREKKERR

SEQ ID NO: 5550 - DNA, 1055 bp, Homo sapiens
agtttgaatagatagccaattagggctagaatggggctgatggaccatgaactacagttaaggaattggctttcattattatgggaatatgtgcaagcttagtagaaatgaaaggctgaaaaagttaaaaagtgaagagctcagaaaagaagcaagacaattaaaacgggaactcttagcagcaaaacaaaaaaaagtagaaaatgcagcaaaacaagcagaaaaaagaagtgaagaggaagaagcccctccagatggtgctgttgccgaatacagaagagaaaagcaaaagtatgaagctttgaggaagcaacagtcaaagaagggaacttcccgggaagatcagacccttgcactgctgaaccagtttaaatctaaactcactcaagcaattgctgaaacgcctgaaaatgacattcctgaaacagaagtagaagatgatgaaggatggatgtcacatgtacttcagtttgaggataaaagcagaaaagtgaaagatgcaagcatgcaagactcagatacatttgaaatctatgatcctcggaatccagtgaataaaagaaggagggaagaaagcaaaaagctgatgagagagaaaaaagaaagaagataaaatgagaataatgataaccagaacttgctggaaatgtgcctacaatggccttgtaacagccattgttcccaacagcatcacttaggggtgtgaaaagaagtatttttgaacctgttgtctggttttgaaaaacaattatcttgttttgcaaattgtggaatgatgtaagcaaatgcttttggttactggtacatgtgttttttcctagctgaccttttatattgctaaatctgaaataaaataactttccttccacattacatgttaaccattgcagactgcaagcctgtttgtgtccttttaccctaaaatatatgaaggcttccttttcaagatttttttataagaagttcctacagaaagaatatttgtgggaaacctccctttcactaacttcagaatataataaaatattataaataaaatatagaatataaatatg

SEQ ID NO: 5551 - protein, 174 aa, Homo sapiens; identical to SEQ ID NO: 5549

SEQ ID NO: 5552 - DNA, 3503 bp, Homo sapiens
attgttcctgttctctttcttaagtcattcgaaacactgtccctgcgagttctttaagttccctgcaatctgtacacaagagaaagagggagagagagagggagagagacagagagagcagggatcaggtaaaggagtggggctgctgcagccattcagacctcaggagctggaaaattgccaaggatgcagaaggaaatgaagatgatcaaagacgaggatgtgcatttcgacttggctgtgaagaagaccccctcctttccccactgcctgcagccagtggcttctcggggaaaggctccccaaagacaccccttcccggaagctctccgagggccattttcccagtttcggtatgaacctcccccaggagacctagatgggttccccggggtcttcgaaggagcagggtctaggaaacggaagagcatgcccacaaagatgccctataaccaccctgcagaagaagtcaccctcgccctccactcagaggagaacaaaaaccacggccttcccaacctccctttgctgttcccgcagcccccgcgccccaagtatgactctcagatgatcgacctgtgcaacgtgggcttccaattctaccgcagcctggaacactttgggggcaagcccgtcaagcaggaacccattaagcccagcgccgtgtggccccagccaacgcccactccattcctgcccacgccctacccctactaccccaaagtccacccgggcctcatgttccccttcttcgtgccctcgtcctcgcccttccccttcagccggcacaccttcctgcccaagcagcccccggaacctctgctgccccggaaagccgagccccaggagagcgaggagaccaagcagaaggtggagagggtggacgtgaacgtgcagatcgatgacagctactacgtggacgtgggcggctcgcagaagcgctggcagtgccccacctgcgagaagtcctacacctccaagtacaacctggtcacccacatcctgggccacagtgggatcaagccgcacgcgtgcacgcactgcgggaagctcttcaagcagctcagccacctgcatacccacatgctgacccaccagggcacgcggccccacaagtgccaggtgtgccacaaggccttcacccagaccagccacctgaagcgccacatgatgcagcacagcgaggtgaagccgcacaactgccgcgtgtgcggccgcggctttgcctaccccagcgagctcaaggcccacgaagccaagcacgccagtgggcgcgagaacatctgtgtggagtgcggcctcgacttccccaccttggcccagctgaagagacacctcaccacgcaccggggccccatccagtacaactgctccgagtgcgacaagaccttccagtacccgagccagctgcagaaccacatgatgaagcacaaggacatccggccctacatctgctcagagtgtggcatggagtttgtgcagccgcaccacctcaagcagcactccctcacccacaagggtgtgaaggagcataagtgtgggatttgtgggcgggagttcaccctgctggccaacatgaagcgacacgtgctgatccacaccaacatccgcgcctaccagtgtcacctctgctacaagagcttcgtgcagaagcagaccctcaaggcacacatgatcgtccactctgacgtgaagcctttcaaatgcaagctttgtgggaaggaattcaaccggatgcacaacctgatgggccacatgcacctgcactcagacagcaaacccttcaagtgcctctattgcccaagcaaattcaccctgaaggggaacctgacacgccacatgaaagtcaagcatggagtcatggagcggggccttcattcccaaggtctgggaagggggagaatcgccctggcacagacagccggtgtcctgaggagtctggagcaggaggagccctttgacctctctcagaagcgccgggccaaggtgccggtgttccagtcagacggggagagtgcccagggcagccactgccacgaggaggaagaggaggataactgctacgaggtggagccctacagccctggcctggccccccagagccagcagctctgcacacccgaggatctgtccaccaagtcggagcacgcccccgaggtgctggaggaagcctgcaaggaggagaaggaggatgcatccaagggagaatgggagaagaggagcaagggtgaccttggggcagagggcggccaggagagagactgtgccggcagagatgagtgtctcagtctcagggcttttcagagtacccggcggggcccctctttttctgattacttatacttcaagcacagagatgagagtttgaaagaattactggagaggaaaatggaaaaacaagcagtgcttttaggtatctaagtggacagttttaaaattacatttggaaaatgagaaggaggcagttcaaatatagctttctgcatgaactgtcattttctggagactggcgaatagtaccaatctctacaaatggcttagactaaatgagcagggatgtaggtaatggaaagccttctcaggtcattcacggggcccttgatacccttcacacatgtgcagggtcttcatcagtggcgttttatgcattgccagtataataaactgtgagtattcttccagatatctaattgtaagctgatgctgaggtgcttttagaaattctactttcctttgattcatatgcaatacatggtaaatttctaattgcaaaaatatggtgcttgaggtgtcaccttattaataactatttaggtgaatttgtgaaggttataatattttccatatagatgaaaatattagtcgtcatatatataaaaatagcctttattctataaccaaaaatgtcagaaatggcacaggaggatgagctattgaagagaatgctctccagtagttgctgcagatataaggtaaaatttcaggagaagaataattttgactaagggaaactggtgacctagaatacttagattctcttgttctgtgtcggctgtcttcatcagattgagcatttggagcattatttttcagatgatatgatgatgtttggggccctggctcctcagacaaaccctcacttctcgagcacggctccctcctggagaccattgctgtcttgctctgaggcctcatgccccataagacagatgcaggggccgggcgcagaggctcacgcctgtaatcccagcactttgggaggccgaggcaggcagatcacttgaggtcaggagtttgagaccaacctggccaacgtggcaaaaccccttctctactaaaaatacaaaaattagccaggcatgatggcaggagcctgtagttccagctactcgggaggctgaagcaggagaatcgtttgaacccaggcagtggagattgcagtgagctgagctgagatcacgctactgcactacagcctgggtgacagagtgagactctgcctc

SEQ ID NO: 5553 - protein, 744 aa, Homo sapiens; identical to SEQ ID NO: 642

SEQ ID NO: 5554 - DNA, 525 bp, Homo sapiens
gcccaggctgccaccagaagaactctctgcccctggagacttctccccagccagagacaggtgattgtgccatgaaatcactgggtgctaggagggctgcagaccatgttggaggaaacgcctgcttgcctgctgcatcactgattgtttcctgaatatcaagaaagacgatgctgggaatagtccctccttgcccagatctctgaaaagccaggagaaaaaaaatcaacagaactctttcaccaaaaaataatcctccttggaaacaaattcaaacaacagaatgtaagcttcatgggaatcagactttgctgggtcactgctgtattccggtgtctggaagacacttggcatgtgaaatttgttcaacaagcaactttgaatgaatgaatatgtgagtaaatgagaccaaagagaagaggcttcacttggaggaggaggatgtttctgtccatggggcattcgccttgccccaccccttcacccacctcgctctcaaaatatcatcatcaatgagacacattt

SEQ ID NO: 5555 - protein, 37 aa, Homo sapiens
MRPKRRGFTWRRRMFLSMGHSPCPTPSPTSLSKYHHQ

SEQ ID NO: 5556 - DNA, 414 bp, Homo sapiens
gcccaggctgccaccagaagaactctctgcccctggagacttctccccagccagagacaggtgattgtgccatgaaatcactgggtgctaggagggctgcagaccatgttggaggaaacgcctgcttgcctgctgcatcactgattgtttcctgaatatcaagaaagacgatgctgggaatagtccctccttgcccagatctctgaaaagccagagagctcacagcatcctgtctcctccagaagctcttccccagctgaaatggaagtgaaagactggtagtctcctcctcaaccacccacctcctggggccctgactgtgtggatgaactcctcacacccaggatttgtgtctccagtgaaaagcagcaatttatcctacactgaaaatttcctgaataaaaacagttcatg

SEQ ID NO: 5557 - protein, 59 aa, Homo sapiens
EGCRPCWRKRLLACCITDCFLNIKKDDAGNSPSLPRSLKSQRAHSILSPPEALPQLKWK

SEQ ID NO: 5558 - DNA, 507 bp, Homo sapiens
gagaaaaaaaatcaacagaactctttcaccaaaaaataatcctccttggaaacaaattcaaacaacagaatgtaagcttcatgggaatcagactttgctgggtcactgctgtattccggtgtctggaagacacttggcatgtgaaatttgttcaacaagcaactttgaatgaatgaatatgtgagtaaatgagaccaaagagaagaggcttcacttggaggaggaggatgtttctgtccatggggcattcgccttgccccaccccttcacccacctcgctctcaaaatatcatcatcaatgagacacatttgagagagctcacagcatcctgtctcctccagaagctcttccccagctgaaatggaagtgaaagactggtagtctcctcctcaaccacccacctcctggggccctgactgtgtggatgaactcctcacacccaggatttgtgtctccagtgaaaagcagcaatttatcctacactgaaaatttcctgaataaaaaca

SEQ ID NO: 5559 - protein, 37 aa, Homo sapiens; identical to SEQ ID NO: 5555

SEQ ID NO: 5560 - DNA, 663 bp, Homo sapiens
agccgcgtcccaacacatgggcttgcttaacactctctgagagaaggaggagccaccccgcagtgctgtctggtcgctttttcccatttttgctccaggatccagagatttgagcaggggtggggtgaggtggggtggcagggttcctccccttccttaggcccagccagagaggggccctgtctctctgctcctttcctcgccgtcgccctctctctgccaggctctcctgttcgtcctccaggggcccacgctagcccctcacctcccctgaagccttttctaaccgctgcggcctccgtggtcccccacgcctgtgttcctgtaggacgtttacagttcacacgatgtctcatctctcggtatatgtctcccagaaacgaaaatggacggccatatgtcacaagagaatgaaatctttgctcccaatccctgtcttcagagctgacctagaagccagccactccactcagacccaattcggatcactatgttcgtgaggactttaacagcatcagactaactctggactgtacatgaacaccagcaatgaagaggaaggaaactttgaaaaatgttatacactggaggattggctttactgtggctatcttttatgtcaaccctgaaatctgtctttattattaaaagaagtttaatttc

SEQ ID NO: 5561 - protein, 50 aa, Homo sapiens
MSHLSVYVSQKRKWTAICHKRMKSLLPIPVFRADLEASHSTQTQFGSLCS

SEQ ID NO: 5562 - DNA, 475 bp, Homo sapiens
aataaatgcgtattaatattcaaaggggctgcctcagacctttttaagaaatggagatatagacttaataattgaacatagaaataatcattccaagtttagtggctaataaagtgaagtctaagaaattactatgctgtagattatcttctagcattaagccagtgggcatggagtttctttttagttcaacttcacaacaaggcatatgatcacatgtgaaaaatgggaattcagagtggaaatcttgttttgaaaatcagctaacatttagttttccacttcagccaattcggatcactatgttcgtgaggactttaacagcatcagactaactctggactgtacatgaacaccagcaatgaagaggaaggaaactttgaaaaatgttatacactggaggattggctttactgtggctatcttttatgtcaaccctgaaatctgtctttattattaaaagaagtttaatttc

SEQ ID NO: 5563 - protein, 32 aa, Homo sapiens
MKRKETLKNVIHWRIGFTVAIFYVNPEICLYY

SEQ ID NO: 5564 - DNA, 594 bp, Homo sapiens
aaattagttgataacgtcttccaggagacctacggccatcctactgatatgaaccagatcatacctgccctgatgggatgccagagaaagactgctgcaaggtacgcgccactcacagacctctccatttatctcactgatgcaaaggaccctgagtagggatcctctggaaacagaacagagggaagaagataccttccctgaagcccagatgttccagaagcctgcgcctcattcacaaagtcaccccaaaaatgccctagagtttggagttttgaagaagcgggaagaaggcctgagtaagggcctgggaaccaagttagatcctacttcagcatcagcacatgccagcgatggtgcacacaggtggagagcggcctgcccgtcttttccatggtgcccacagacccatttaggatgaaagatcagaaaattctctccatgtcaccgcttctgaaacatgtgaatattaatatttggtgcctaaaaggccatggcaaattttcattggttttatcttattcatgattatagagttgaaagaatacatattcccatggggatcaatgaagacattctcattttgaatgaagt

SEQ ID NO: 5565 - protein, 93 aa, Homo sapiens
MQRTLSRDPLETEQREEDTFPEAQMFQKPAPHSQSHPKNALEFGVLKKREEGLSKGLGTKLDPTSASAHASDGAHRWRAACPSFPWCPQTHLG

SEQ ID NO: 5566 - DNA, 490 bp, Homo sapiens
gaaattagttgataacgtcttccaggagacctacggccatcctactgatatgaaccagatcatacctgccctgatgggatgccagagaaagactgctgcaagggatcctctggaaacagaacagagggaagaagataccttccctgaagcccagatgttccagaagcctgcgcctcattcacaaagtcaccccaaaaatgccctagagtttggagttttgaagaagcgggaagaaggcctgagtaagggcctgggaaccaagttagatcctacttcagcatcagcacatgccagcgatggtgcacacaggtggagagcggcctgcccgtcttttccatggtgcccacagacccatttaggatgaaagatcagaaaattctctccatgtcaccgcttctgaaacatgtgaatattaatatttggtgcctaaaaggccatggcaaattttcattggttttatcttattcatgattatagagttgaaagaata

SEQ ID NO: 5567 - protein, 104 aa, Homo sapiens
MNQIIPALMGCQRKTAARDPLETEQREEDTFPEAQMFQKPAPHSQSHPKNALEFGVLKKREEGLSKGLGTKLDPTSASAHASDGAHRWRAACPSFPWCPQTHLG

SEQ ID NO: 5568 - DNA, 676 bp, Homo sapiens
tagcattgctcttaaattagtttttattttaattaagcccaatagcaacctcatttacttgaaaaatcataacacatatatgagagatgcttcatttatctcagccacaggccacgcttggtgcccttatcttcttgcaggcccttcatgaccacgcgaagacccactgtttgagaaccactcagatagggacaatttggaaacaactaacaaaaaggaagtctcctcaagacctccccgggaaagtaggggaggaagatctttctttctctgcctgtctccagtttgaaactgagccaaggtgtgcagtgtgcttgtagtctctgggaatacttctggttagagtgccaaacagggtctagacacctctgtagcccctgggtttccatgggaactgtgtgagttgagcactgtgctggaagcaaaatgcactccctcagcagagagactgattgctccagaggttcttcttggcttttgttggcactggagcctggtccagggctgtgggggagactccaccttcctcaacatgtccctcttatctctaatccaagactgtggctctgctaaccgccgcttcccagtcagtgggaaggtggaaagaggaatactggagcaaaccgcttccctttctctttctttagcaacttttcatcttgaaaaatttcaactc

SEQ ID NO: 5569 - protein, 48 aa, Homo sapiens
MHSLSRETDCSRGSSWLLLALEPGPGLWGRLHLPQHVPLISNPRLWLC

SEQ ID NO: 5570 - DNA, 887 bp, Homo sapiens
atgatcagtagctgcaccactagaaagatggcggagcaagagcaaagaaaaatccctttggttccagaaaatctcctgaaaaagaggaaggcttatcaagccctcaacgccacccagtcaaagcaggcacttttggcaaagaaggagcagaagaaaggaaaagggctcaggtttaagcgactggaatcattcctacatgattcctggcggcagaaacgtgacgtttcagaagactagaagtgaaacctcaagccttggaattgccagataaatattccttggcctttgttgtacgcatctaaaggattgatggcgtgagtttactggtgcaaagaatcattgcaagacttcgcctgaagaaaatttttagtggtgtctttgtaaaagtcaccccccagaatctaaaaatgctgtgtatagtggaaccttatgtgacctggggatttccaaatctgaagtctgtccgagaactcattttgaaacgtggacaagccaaggtcaagaataagaccatccctctgacagacaacacagtgattgaggagcacctggggaagtttggcatcatttgcttggaagacctcattcatgaaattgccttcccagggaagcatttacaggagatctcgtggttcttgcgccctttccacctctcagtggcctgtcatgctaccaaaaatagagtgggcttcctcaaggagatgggcacacctggctattggggtgaacgcatcaatcagctcatccgccagctgaactagacccacgtgccaaactgtggtaaatttttatcaatgaagtggaagcatgtgttttgctgttttaggaatttttatcaagtatcttcagagaagattatttcctgctttatcttcaaaaactggaaa

SEQ ID NO: 5571 - protein, 117 aa, Homo sapiens [sequence omitted]

SEQ ID NO: 5572 - DNA, 761 bp, Homo sapiens
agtagctgcaccactagaaagatggcggagcaagacagaagaaaggaaaagggctcaggtttaagcgactggaatcattcctacatgattcctggcggcagaaacgtgacgtttcagaagactagaagtgaaacctcaagccttggaattgccagataaatattccttggcctttgttgtacgcatctaaaggattgatggcgtgagtttactggtgcaaagaatcattgcaagacttcgcctgaagaaaatttttagtggtgtctttgtaaaagtcaccccccagaatctaaaaatgctgtgtatagtggaaccttatgtgacctggggatttccaaatctgaagtctgtccgagaactcattttgaaacgtggacaagccaaggtcaagaataagaccatccctctgacagacaacacagtgattgaggagcacctggggaagtttggcatcatttgcttggaagacctcattcatgaaattgccttcccagggaagcatttacaggagatctcgtggttcttgcgccctttccacctctcagtggcctgtcatgctaccaaaaatagagtgggcttcctcaaggagatgggcacacctggctattggggtgaacgcatcaatcagctcatccgccagctgaactagacccacgtgccaaactgtggtaaatttttatcaatgaagtggaagcatgtgttttgctgttttaggaatttttatcaagtatcttcagagaagattatttcctgctttatct

SEQ ID NO: 5573 - protein, 45 aa, Homo sapiens
MAEQDRRKEKGSGLSDWNHSYMIPGGRNVTFQKTRSETSSLGIAR

SEQ ID NO: 5574 - DNA, 2553 bp, Homo sapiens
tttaaattaatgtgtatttctcttctctctctctcacatacacacacacagccatttaatccaagctttcattcaaaccaaggatctttccacaaaatccctgagagtcaacttttactgtttactaaaactgtcttcactgtgtggagcttacttctttgtgaagcttggtgtttcatttggacaggccaatttatggaaagctgtccttcatactgaactgaaattgatcttttcatctgtgcctatcattcctggaatcaaatgagataccatatcctgaaattttttgaaatggcaaagcactgaataaatataaaatatattaatgtcagttctactgtatagagtttgaaaatttgacaagcacactgtcctctccaagtcattggaatagatgaatatgagaacagaacaagagagatactctgcacaggttttggaagtgctcctttcaatttgatattaatccattaatcagtattctttaaactactctatttaagcagtgagaggcagggaccaggttaagccaagacctagagaataaaaacaaagccaaagtagaaagaaaaccaggacccaccaccaccccaggcctgcagcaaatacatcagtgttcactcaaggcccaaggacccttcagtcagcttgtgatgaatactgttgagcctgggactctcccttcaggacagtgctcccctctagcccaggaaaagtccagtaataccatccatgtgccaaggcctcgaatcatggaccccaagagcccacttggttctctatccctctgtggccaatatggtacctaagcttcaagacaaagtcggctttactcttccccctccttttctcaagcagaaggagtctctcatcatagccagcatagctggggatgtgctgagtcacacttgaagccagcatgtctctgaatctcacccaaggcccatagcaagtactgtctagctaccactgctaactatgcagggccaaagggctttttagtcagtagttaatgaattgtggcaggactgagtccttctctttaaggcagctggttctcttctggcccagggtgtgtctagaaataacattaggagctagggcctggaatgggagcctcaagtctccggctagtgctctatcctactgtggttgagctggtatccaagttacaagacaaagtcctctttattcttccttctcctcattttaagcagaaagaagtctctcccagagctgtgagctgtgctacctggggttttgggagtggtggtgcaagcacaccctcggctgtcctagccagtgtctcgctgggtcacgtgttccccaagtctactttctcgagtccagcacagcaccaggacttgccaaggaattgcagtcctcttggcctagactgtctttcaagtttacttaggaccccatagcatcttagcccatggtggtggggcttgctagaagaaagggtccaacaactgggatgggtgagtccactctggctagggctggtgtatatgctccctccataggcattgactaagttctatacagtgttgcttttctgacagggcagcaatgagttccaatgctaagtcccacaatcactgcactctccccaccaagagcacagatcttctctcagcaccacatggcagctgctgggagttgagggtagggtggtgtcagcaattcaaggctgtcttttctatcttcttaagtgcctctttcagtgatctgaggttaaaaccaggtaccgtggtcactcacctgatttttggatattatgaaggtgcttttttgtgtgggcaattattcaatttagcgttctatggggaggacaatcagtagaggtttccatttggccatctcgctcctcctcctctgttccaattctgagtccagcaaacaaaaatagcgccctttggaaagaagctactataggacaagcttagcagggagctatgcttcacctccatgagagcagactacctacctaactatttactttggaaaagagctccagatgaaggcctgatgagattcccatgcttactctgaaatcatcattttggaatcagtcattaaagcttcaaaatatccaagatatttattgtacacactactgttcaatgtaattaataaaatattaatttataacatgctcttagcccaaccaaaagatcatgctaattagttttcttcaaaaaatattaataagtagtaaaaatcctaccttgagtattcagccaatattaagagttatgcctggtggggtgtggtggctcatgcctgtaatcctagcactttgggggaccaagtcaggcagatcactttaggtcaggagttcaacgccagcctggccaacatggtgaaacccgctgtctactaaaaatacaaaaaagttagctgagtatggtggcggtcacctgtaacccaagctacttgggagtctgaagcagtagaatcgcttaaacccaggaggtggaggttgcagtgagccgagtcacgccactgcactccagcctgggtgacagagcaagactccatctc

SEQ ID NO: 5575 - protein, 105 aa, Homo sapiens [sequence omitted]

SEQ ID NO: 5576 - DNA, 1125 bp, Homo sapiens
aaaggatttgaccttacataattaaaggagctaatagagtagtctctgtaagactattgtctttgtttctaatgttggacctgaaatccacagggaagggaagggaagggtagaagctgtgtcagttcttgtcattgaccttggtactgtggatgtcttgcagaaagaagccaaagtttacaaggaaggcagtcctaggaaatgagcagcctaaccaagttgacacattacaaagtcatcatgctctctaagacccttcaacctggatttcctgccagcaactcaatatatcccaaacagaattcttcaaaacctgcttctccttctgggtcaccctattttgttttttaacagtgccactttccttctatgcttaaaattttctaatcttgttaactcccccttttcctttctcatatacctctcatgctaccaccaatctataacagttctatcatttttacctctgcagtgcccaccccaggtggatgagttcaaactcaacaggtgattatacaatcccacacattgatttcatatttagtttgatataagccccccttctggaaccccaaaagaaggaaaaggccattttcctctccaaaagcacatacaggggagtgagttataacgaggagctagtatgctgctatcattatttaaaccaagaaaacccactgtagacaagatgaaggatctaataaaaatgtgttcttattcctgattctaaaactttaacagctgggctttcccatgtggaataatgttacataaataactcagccaggaaacagaggggctgtgaagaagtccaacaaaatgatagatgatcttggacagtcttagtatcacacccaatggagttagaaggaaataagtgcattgaaggtacgggtgagctatgttgttatgtgtgagcagcaaactttacagaacctgacagttatctgagtcatgtatcactaattctacagaagttttctttctacttaagtatattaacactccctaatctattccatagggaccttttctgctccatccaaatttgtcatcttttaattagtcatggaagtctagataaagcgggtttcagaaaataaacatgttgagttttaaaactaa

SEQ ID NO: 5577 - protein, 32 aa, Homo sapiens
MSCRKKPKFTRKAVLGNEQPNQVDTLQSHHAL

SEQ ID NO: 5578 - DNA, 5486 bp, Homo sapiens
gagccccggaagggtgatgtggctgcggcatcgccggcctcgctatgattgttgggtatattttggaagtgtgccagaattggtgaacggaagagtccttatgttgcagtatgctgtatagtaatggccttcagcatcctcttcatacagtagctggggaaaatgccagaatgtagttgccatcagatttgattgtgaacaaggactgactgcagaaaataatggaaaggatgtttaactcttttatctccgaacattgaatgagataaatttccagatgctgttctctattttaatgttattggaccaatgttctgtataaacaattaagatgtaaccatttaatagtctgtaacaatcaacctcagtactgtcactacaatattacattctgcaaatgttattctgttgtatcagatacaaaattttagtgaggtatctctaaggcacatagtagaaaacaaaattggttaattactcaagttcctttcactgtgatttggaaatgatttaatctttatagaatgagaaccttttttggactagcttttttattaaaatggctcaatttgtgttgataaggattgcattaatatttaatagtgcttgcttttcctctgggcacaccattttgatcattaaccagagtacctctactcttagcaaactctagtttatgacaagtatttaaaatatttaaaacaagcttatgcagttcttaaggacgaaggtaaatgagatgtaacttaaaaatagtattgggaaaatgttgatagttaacattagtggatttagactagccaaatgacatagtaggctctgaaacatcttgtcaagtatatgtattttgtgcatgaatttttgctggaaagctgtctttctctgaaaaacacaacgttcttagaatgaaaagaacaattataaaataattatcctatatgtgtttttcattctttttagtgtcatggcttcaaaaatgaaacatttattttaattgccgtaaaggaactgtatttttgttttgttttttaacacagcactttaaatccagtttgtgttttgtcaacttgaactggaatctcttttgttactttggaggtgataaatagttttcaaatctgctgatttgtatactgtggcacaagtatctttgaactttgatagtgaaaggagaccttcaacaatttttagtctaggcgagaggaatattaggaatgtgacttctaaattttacaatagagcagttattttaaggtcatggttaacatttcttaaggttcaactaaaattcagttaaaatttcagagctacgaggaacttaaatcttagctaaaaattacctgttgtagatagtattaattagattgtttgcagctattaattcatcataaagataaaatgaagaaactctccctttttttaaacaaaaaaaattatttctagattaataggctagtagttatttctgcagaaacaacgtatggaactgaaagccacctatttttattttagactaatttaaaccacttggaatggattctaggaaacatcttaagcttgtgtgttgcctgtggtggttttttgtttgggggtgttttttggttttggtttgattttctgtattttgttatctggggattttttgtttgtttgttttggtttggttttggttttatatttttggcatgtctatggcagttaaaagtggtatattttgctttagatagggaatcaggttataatcattgttcttcctctaaactgcctcttgggctttacatcaggtcaaggatttttagggtttctcaaaaataggattcttgtcagtgtatgcatgctgagtaagtcacctttctggctctaatttctgggtggccatctgttgtccagctctgctgccaactggactttccgaaagccatgtcaactaattttttatatgctaagacaaatcgaatatgaaaagaggaagaatattctagatattctaagacatttcttaatttggcatctcagaggaggtaggtggaaagtaaaggaagagataattttgggggaaaatttgtggaaacatacaaaacgttttgctttgtatagatgctaaacagagtgggaggcagcatatttgtaacaacaaccattctgaccttttgaaacacaagcttttggagaagtcagggagagacacagtatgaataaaagcaattaacattttctttaatgtatatttttcaaagaggaccacggaatcctgttctctaacccaaggggcagtgtaggtggttttaagcccacagaatattgagatatttctcttgtggttttggtggggtggtgggatgcagaaggttattaaagatcaatttaagcatcagatagactatcccttttatttttttaacttttaggttcaggggtacatgtgcaggttgttatataggtaaactcatgtcaagtggttttgttgtacagattattttgtcacccaggtgctaagcctagtacccagtagttattttccctgctcttctccctcctcccaccctccaccctcaagtaggccccagtgtctgttgttcctttctttgtgtccttgagttctcatcatttagctcctacttctaaatgagaacatgtatttggttttctgttctgtgttagtttgctaaggataatggcctccagctcagatggaatatctctatcatatagacctgttgttacagggcaggatcggatgatggacactgaagtcctcagcttgctaagttcagttgctctccctagcctccttttggcttcagagtcttttgattccatctatcctggtattttttgtgtgctgatgtttagttctggattggcttcagctgtgctaataggaagggcgttgtcttttcaagcaatcttaaaaggtggtcaatcaaaaggccagagtctgaatcccttctgtggcttaaataatttgaggatcaagtccagtgtcttgttaatccctgttctactgtgccagacactatcttgaatgcttttatatgttcaggttcaaaatcgctctttcataccaggggatgatagtaacgtgtaacttgcaatagattccttcatcttagtaataagatgatcagtctagttaggacaaaatagagattgaataaattaacttttccaagtttacagagtaaaaatgagcagatctctgcctggttttgtgaaaaagagttagcactggtaaatagaatatttctactcctacaccattctttcagtatatcatcactgaagacaggaagataggcacacagattcttcctcgtagtaattcatagtgcactaggtgaaagagatgaagtatgtattaaaagtacaatgtgatggcatttattattcagataatcccaggattctagaagaaaataaagaagagtgacagttcagttagggtgtgaacttccagaggagcactgcttaagctgaacttgagagcattgtgcaaaagcacagtagtctgttaagaactagaaataacctagcttgtgccacttcgggagtattaagacataagcctagaaaggtaggcaaaggttagatcttagactgtcttgtatttttctcattcctgttgattacctacctcaaaattgaatatgtttttcctcctgcctaacacaaaactactcaagggcagaaatttaaattcttccttggtgtatgtgcaaagaaggttgaatatattcatgcctaccttattttggactaggaatacagtagtatactttccgaagacttgcctgaatagtatataaggtggaggcaactgactagttaggtcagtatttttagaaactcttaatagctcatactcttgataccaaaagcagccctgattgttaaagcacacacctgcacaagaagcagtgatggttgcatttacatttcctgggtgcacaaaaaaaaattctcaaaaagcaaggacttacgctttttgcaaagcctttgagaagttactggatcataggaagcttataacaagaatggaagattcttaaataactcactttctttggtatccagtaacagtagatgttcaaaatatgtagctgattaataccagcattgtgaacgctgtacaaccttgtggttattactaagcaagttactactagcttctgaaaagtagcttcataattaatgttatttatacactgccttccatgacttttactttgccctaagctaatctccaaaatctgaaatgctactccaatatcagaaaaaaagggggaggtggaattatatttcctgtgattttaagagtacagagaatcatgcacatctctgattagttcatatatgtctagtgtgtaataaaagtcaagatgaactctcaagagcctcctacttttgtcttattgtcagatatgtgaaagcagtttttagaggttagaaaatggaaatttccacctttctagtaggatgagaatagagaaatgttctattttttttttcctacctgcatttgcattcatggatggccaggattcgttttggggtattatttttattgttgttttgcatcctactagctattggatctactatattgctgttatcattgagtatgctttgaagagccttaaatgactccagcagtttgctttgggtgtgaagtctttaattttcccagagatggtggaaatccgattctgagtgaaagtgacagttatcaattactgagttattttcaaccttgtcctcaactgggagccttcagatgcccaaacattctggcaagtaactattattttctgtctaaaatctgtttgtgagcattgtccatcagtcagattattcagccaatttatactattattagtatttactgagaaatatgaaaaggcttttgtcttgctttgaggaatgtggtcttcctgctgttagcttcccaaaactgaataaacacagaccaacctttgtcagacctgtaactagaaggaatttacctaaccaaatgaattgtagcaattgtatttttagttagatttagatctaagaaaatacttcagatataaattgaaaggcagtatcttagttgtttctttcagtaaatattgtaaacgtaccccactgccccattaaaccaccagttgataaaagacattataggaaaatcactaaatttccaatttatattaataagtcaaaagaattcaaaatggctgtgcttaagaccaccaaatttaatataaccaggaaagcaagatctgtttttaattcagagggtttacattaatgtccttactgataacagattcatctaggggtggaagggagggcaagggcaagggagaaaacataaatattggaaacaagggtaagttacttcacacacactttgtggaggatgagaacactcattcagaaactgcgtgatacccagacactactgtttgagctttgacaagggaagtagcctaaaagcaaat

SEQ ID NO: 5579 - protein, 34 aa, Homo sapiens
MWLRHRRPRYDCWVYFGSVPELVNGRVLMLQYAV

SEQ ID NO: 5580 - DNA, 5653 bp, Homo sapiens
aaccggacggctggagagggcgagaagggcagacgggacatgcagcctcttccgcctgagccccggaagggtgatgtggctgcggcatcgccggcctcgctatgtctgccattttcaattttcagagtctattgactgtaatcttgctgcttatatgtacctgtgcttatattcgatccttggcacccagcctcctggacagaaataaaactggattgttgggtatattttggaagtgtgccagaattggtgaacggaagagtccttatgttgcagtatgctgtatagtaatggccttcagcatcctcttcatacagtagctggggaaaatgccagaatgtagttgccatcagatttgattgtgaacaaggactgactgcagaaaataatggaaaggatgtttaactcttttatctccgaacattgaatgagataaatttccagatgctgttctctattttaatgttattggaccaatgttctgtataaacaattaagatgtaaccatttaatagtctgtaacaatcaacctcagtactgtcactacaatattacattctgcaaatgttattctgttgtatcagatacaaaattttagtgaggtatctctaaggcacatagtagaaaacaaaattggttaattactcaagttcctttcactgtgatttggaaatgatttaatctttatagaatgagaaccttttttggactagcttttttattaaaatggctcaatttgtgttgataaggattgcattaatatttaatagtgcttgcttttcctctgggcacaccattttgatcattaaccagagtacctctactcttagcaaactctagtttatgacaagtatttaaaatatttaaaacaagcttatgcagttcttaaggacgaaggtaaatgagatgtaacttaaaaatagtattgggaaaatgttgatagttaacattagtggatttagactagccaaatgacatagtaggctctgaaacatcttgtcaagtatatgtattttgtgcatgaatttttgctggaaagctgtctttctctgaaaaacacaacgttcttagaatgaaaagaacaattataaaataattatcctatatgtgtttttcattctttttagtgtcatggcttcaaaaatgaaacatttattttaattgccgtaaaggaactgtatttttgttttgttttttaacacagcactttaaatccagtttgtgttttgtcaacttgaactggaatctcttttgttactttggaggtgataaatagttttcaaatctgctgatttgtatactgtggcacaagtatctttgaactttgatagtgaaaggagaccttcaacaatttttagtctaggcgagaggaatattaggaatgtgacttctaaattttacaatagagcagttattttaaggtcatggttaacatttcttaaggttcaactaaaattcagttaaaatttcagagctacgaggaacttaaatcttagctaaaaattacctgttgtagatagtattaattagattgtttgcagctattaattcatcataaagataaaatgaagaaactctccctttttttaaacaaaaaaaattatttctagattaataggctagtagttatttctgcagaaacaacgtatggaactgaaagccacctatttttattttagactaatttaaaccacttggaatggattctaggaaacatcttaagcttgtgtgttgcctgtggtggttttttgtttgggggtgttttttggttttggtttgattttctgtattttgttatctggggattttttgtttgtttgttttggtttggttttggttttatatttttggcatgtctatggcagttaaaagtggtatattttgctttagatagggaatcaggttataatcattgttcttcctctaaactgcctcttgggctttacatcaggtcaaggatttttagggtttctcaaaaataggattcttgtcagtgtatgcatgctgagtaagtcacctttctggctctaatttctgggtggccatctgttgtccagctctgctgccaactggactttccgaaagccatgtcaactaattttttatatgctaagacaaatcgaatatgaaaagaggaagaatattctagatattctaagacatttcttaatttggcatctcagaggaggtaggtggaaagtaaaggaagagataattttgggggaaaatttgtggaaacatacaaaacgttttgctttgtatagatgctaaacagagtgggaggcagcatatttgtaacaacaaccattctgaccttttgaaacacaagcttttggagaagtcagggagagacacagtatgaataaaagcaattaacattttctttaatgtatatttttcaaagaggaccacggaatcctgttctctaacccaaggggcagtgtaggtggttttaagcccacagaatattgagatatttctcttgtggttttggtggggtggtgggatgcagaaggttattaaagatcaatttaagcatcagatagactatcccttttatttttttaacttttaggttcaggggtacatgtgcaggttgttatataggtaaactcatgtcaagtggttttgttgtacagattattttgtcacccaggtgctaagcctagtacccagtagttattttccctgctcttctccctcctcccaccctccaccctcaagtaggccccagtgtctgttgttcctttctttgtgtccttgagttctcatcatttagctcctacttctaaatgagaacatgtatttggttttctgttctgtgttagtttgctaaggataatggcctccagctcagatggaatatctctatcatatagacctgttgttacagggcaggatcggatgatggacactgaagtcctcagcttgctaagttcagttgctctccctagcctccttttggcttcagagtcttttgattccatctatcctggtattttttgtgtgctgatgtttagttctggattggcttcagctgtgctaataggaagggcgttgtcttttcaagcaatcttaaaaggtggtcaatcaaaaggccagagtctgaatcccttctgtggcttaaataatttgaggatcaagtccagtgtcttgttaatccctgttctactgtgccagacactatcttgaatgcttttatatgttcaggttcaaaatcgctctttcataccaggggatgatagtaacgtgtaacttgcaatagattccttcatcttagtaataagatgatcagtctagttaggacaaaatagagattgaataaattaacttttccaagtttacagagtaaaaatgagcagatctctgcctggttttgtgaaaaagagttagcactggtaaatagaatatttctactcctacaccattctttcagtatatcatcactgaagacaggaagataggcacacagattcttcctcgtagtaattcatagtgcactaggtgaaagagatgaagtatgtattaaaagtacaatgtgatggcatttattattcagataatcccaggattctagaagaaaataaagaagagtgacagttcagttagggtgtgaacttccagaggagcactgcttaagctgaacttgagagcattgtgcaaaagcacagtagtctgttaagaactagaaataacctagcttgtgccacttcgggagtattaagacataagcctagaaaggtaggcaaaggttagatcttagactgtcttgtatttttctcattcctgttgattacctacctcaaaattgaatatgtttttcctcctgcctaacacaaaactactcaagggcagaaatttaaattcttccttggtgtatgtgcaaagaaggttgaatatattcatgcctaccttattttggactaggaatacagtagtatactttccgaagacttgcctgaatagtatataaggtggaggcaactgactagttaggtcagtatttttagaaactcttaatagctcatactcttgataccaaaagcagccctgattgttaaagcacacacctgcacaagaagcagtgatggttgcatttacatttcctgggtgcacaaaaaaaaattctcaaaaagcaaggacttacgctttttgcaaagcctttgagaagttactggatcataggaagcttataacaagaatggaagattcttaaataactcactttctttggtatccagtaacagtagatgttcaaaatatgtagctgattaataccagcattgtgaacgctgtacaaccttgtggttattactaagcaagttactactagcttctgaaaagtagcttcataattaatgttatttatacactgccttccatgacttttactttgccctaagctaatctccaaaatctgaaatgctactccaatatcagaaaaaaagggggaggtggaattatatttcctgtgattttaagagtacagagaatcatgcacatctctgattagttcatatatgtctagtgtgtaataaaagtcaagatgaactctcaagagcctcctacttttgtcttattgtcagatatgtgaaagcagtttttagaggttagaaaatggaaatttccacctttctagtaggatgagaatagagaaatgttctattttttttttcctacctgcatttgcattcatggatggccaggattcgttttggggtattatttttattgttgttttgcatcctactagctattggatctactatattgctgttatcattgagtatgctttgaagagccttaaatgactccagcagtttgctttgggtgtgaagtctttaattttcccagagatggtggaaatccgattctgagtgaaagtgacagttatcaattactgagttattttcaaccttgtcctcaactgggagccttcagatgcccaaacattctggcaagtaactattattttctgtctaaaatctgtttgtgagcattgtccatcagtcagattattcagccaatttatactattattagtatttactgagaaatatgaaaaggcttttgtcttgctttgaggaatgtggtcttcctgctgttagcttcccaaaactgaataaacacagaccaacctttgtcagacctgtaactagaaggaatttacctaaccaaatgaattgtagcaattgtatttttagttagatttagatctaagaaaatacttcagatataaattgaaaggcagtatcttagttgtttctttcagtaaatattgtaaacgtaccccactgccccattaaaccaccagttgataaaagacattataggaaaatcactaaatttccaatttatattaataagtcaaaagaattcaaaatggctgtgcttaagaccaccaaatttaatataaccaggaaagcaagatctgtttttaattcagagggtttacattaatgtccttactgataacagattcatctaggggtggaagggagggcaagggcaagggagaaaacataaatattggaaacaagggtaagttacttcacacacactttgtggaggatgagaacactcattcagaaactgcgtgatacccagacactactgtttgagctttgacaagggaagtagcctaaaagcaaat

SEQ ID NO: 5581 - protein, 72 aa, Homo sapiens; identical to SEQ ID NO: 649

SEQ ID NO: 5582 - DNA, 4392 bp, Homo sapiens
gagccccggaagggtgatgtggctgcggcatcgccggcctcgctatgattgttgggtatattttggaagtgtgccagaattggtgaacggaagagtccttatgttgcagtatgctgtatagtaatggccttcagcatcctcttcatacagtagctggggaaaatgccagaatgtagttgccatcagatttgattgtgaacaaggactgactgcagaaaataatggaaaggatgtttaactcttttatctccgaacattgaatgagataaatttccagatgctgttctctattttaatgttattggaccaatgttctgtataaacaattaagatgtaaccatttaatagtctgtaacaatcaacctcagtactgtcactacaatattacattctgcaaatgttattctgttgtatcagatacaaaattttagtgaggtatctctaaggcacatagtagaaaacaaaattggttaattactcaagttcctttcactgtgatttggaaatgatttaatctttatagaatgagaaccttttttggactagcttttttattaaaatggctcaatttgtgttgataaggattgcattaatatttaatagtgcttgcttttcctctgggcacaccattttgatcattaaccagagtacctctactcttagcaaactctagtttatgacaagtatttaaaatatttaaaacaagcttatgcagttcttaaggacgaaggtaaatgagatgtaacttaaaaatagtattgggaaaatgttgatagttaacattagtggatttagactagccaaatgacatagtaggctctgaaacatcttgtcaagtatatgtattttgtgcatgaatttttgctggaaagctgtctttctctgaaaaacacaacgttcttagaatgaaaagaacaattataaaataattatcctatatgtgtttttcattctttttagtgtcatggcttcaaaaatgaaacatttattttaattgccgtaaaggaactgtatttttgttttgttttttaacacagcactttaaatccagtttgtgttttgtcaacttgaactggaatctcttttgttactttggaggtgataaatagttttcaaatctgctgatttgtatactgtggcacaagtatctttgaactttgatagtgaaaggagaccttcaacaatttttagtctaggcgagaggaatattaggaatgtgacttctaaattttacaatagagcagttattttaaggtcatggttaacatttcttaaggttcaactaaaattcagttaaaatttcagagctacgaggaacttaaatcttagctaaaaattacctgttgtagatagtattaattagattgtttgcagctattaattcatcataaagataaaatgaagaaactctccctttttttaaacaaaaaaaattatttctagattaataggctagtagttatttctgcagaaacaacgtatggaactgaaagccacctatttttattttagactaatttaaaccacttggaatggattctaggaaacatcttaagcttgtgtgttgcctgtggtggttttttgtttgggggtgttttttggttttggtttgattttctgtattttgttatctggggattttttgtttgtttgttttggtttggttttggttttatatttttggcatgtctatggcagttaaaagtggtatattttgctttagatagggaatcaggttataatcattgttcttcctctaaactgcctcttgggctttacatcaggtcaaggatttttagggtttctcaaaaataggattcttgtcagtgtatgcatgctgagtaagtcacctttctggctctaatttctgggtggccatctgttgtccagctctgctgccaactggactttccgaaagccatgtcaactaattttttatatgctaagacaaatcgaatatgaaaagaggaagaatattctagatattctaagacatttcttaatttggcatctcagaggaggtaggtggaaagtaaaggaagagataattttgggggaaaatttgtggaaacatacaaaacgttttgctttgtatagatgctaaacagagtgggaggcagcatatttgtaacaacaaccattctgaccttttgaaacacaagcttttggagaagtcagggagagacacagtatgaataaaagcaattaacattttctttaatgtatatttttcaaagaggaccacggaatcctgttctctaacccaaggggcagtgtaggtggttttaagcccacagaatattgagatatttctcttgtggttttggtggggtggtgggatgcagaaggttattaaagatcaatttaagcatcagatagactatcccttttatttttttaacttttaggttcaggggtacatgtgcaggttgttatataggtaaactcatgtcaagtggttttgttgtacagattattttgtcacccaggtgctaagcctagtacccagtagttattttccctgctcttctccctcctcccaccctccaccctcaagtaggccccagtgtctgttgttcctttctttgtgtccttgagttctcatcatttagctcctacttctaaatgagaacatgtatttggttttctgttctgtgttagtttgctaaggataatggcctccagctcagatggaatatctctatcatatagacctgttgttacagggcaggatcggatgatggacactgaagtcctcagcttgctaagttcagttgctctccctagcctccttttggcttcagagtcttttgattccatctatcctggtattttttgtgtgctgatgtttagttctggattggcttcagctgtgctaataggaagggcgttgtcttttcaagcaatcttaaaaggtggtcaatcaaaaggccagagtctgaatcccttctgtggcttaaataatttgaggatcaagtccagtgtcttgttaatccctgttctactgtgccagacactatcttgaatgcttttatatgttcaggttcaaaatcgctctttcataccaggggatgatagtaacgtgtaacttgcaatagattccttcatcttagtaataagatgatcagtctagttaggacaaaatagagattgaataaattaacttttccaagtttacagagtaaaaatgagcagatctctgcctggttttgtgaaaaagagttagcactggtaaatagaatatttctactcctacaccattctttcagtatatcatcactgaagacaggaagataggcacacagattcttcctcgtagtaattcatagtgcactaggtgaaagagatgaagtatgtattaaaagtacaatgtgatggcatttattattcagataatcccaggattctagaagaaaataaagaagagtgacagttcagttagggtgtgaacttccagaggagcactgcttaagctgaacttgagagcattgtgcaaaagcacagtagtctgttaagaactagaaataacctagcttgtgccacttcgggagtattaagacataagcctagaaaggtaggcaaaggttagatcttagactgtcttgtatttttctcattcctgttgattacctacctcaaaattgaatatgtttttcctcctgcctaacacaaaactactcaagggcagaaatttaaattcttccttggtgtatgtgcaaagaaggttgaatatattcatgcctaccttattttggactaggaatacagtagtatactttccgaagacttgcctgaatagtatataaggtggaggcaactgactagttaggtcagtatttttagaaactcttaatagctcatactcttgataccaaaagcagccctgattgttaaagcacacacctgcacaagaagcagtgatggttgcatttacatttcctgggtgcacaaaaaaaaattctcaaaaagcaaggacttacgctttttgcaaagcctttgagaagttactggatcataggaagcttataacaagaatggaagattcttaaataactcactttctttggtatccagtaacagtagatgttcaaaatatgtagctgattaataccagcattgtgaacgctgtacaaccttgtggttattactaagcaagttactactagcttctgaaaagtagcttcataattaatgttatttatacactgccttccatgacttttactttgccctaagctaatctccaaaatctgaaatgctactccaatatcagaaaaaaagggggaggtggaattatatttcctgtgattttaagagtacagagaatcatgcacatctctgattagttcatatatgtctagtgtgtaataaaagtcaagatgaactctcaag

SEQ ID NO: 5583 - protein, 34 aa, Homo sapiens; identical to SEQ ID NO: 5579

SEQ ID NO: 5584 - DNA, 4559 bp, Homo sapiens
aaccggacggctggagagggcgagaagggcagacgggacatgcagcctcttccgcctgagccccggaagggtgatgtggctgcggcatcgccggcctcgctatgtctgccattttcaattttcagagtctattgactgtaatcttgctgcttatatgtacctgtgcttatattcgatccttggcacccagcctcctggacagaaataaaactggattgttgggtatattttggaagtgtgccagaattggtgaacggaagagtccttatgttgcagtatgctgtatagtaatggccttcagcatcctcttcatacagtagctggggaaaatgccagaatgtagttgccatcagatttgattgtgaacaaggactgactgcagaaaataatggaaaggatgtttaactcttttatctccgaacattgaatgagataaatttccagatgctgttctctattttaatgttattggaccaatgttctgtataaacaattaagatgtaaccatttaatagtctgtaacaatcaacctcagtactgtcactacaatattacattctgcaaatgttattctgttgtatcagatacaaaattttagtgaggtatctctaaggcacatagtagaaaacaaaattggttaattactcaagttcctttcactgtgatttggaaatgatttaatctttatagaatgagaaccttttttggactagcttttttattaaaatggctcaatttgtgttgataaggattgcattaatatttaatagtgcttgcttttcctctgggcacaccattttgatcattaaccagagtacctctactcttagcaaactctagtttatgacaagtatttaaaatatttaaaacaagcttatgcagttcttaaggacgaaggtaaatgagatgtaacttaaaaatagtattgggaaaatgttgatagttaacattagtggatttagactagccaaatgacatagtaggctctgaaacatcttgtcaagtatatgtattttgtgcatgaatttttgctggaaagctgtctttctctgaaaaacacaacgttcttagaatgaaaagaacaattataaaataattatcctatatgtgtttttcattctttttagtgtcatggcttcaaaaatgaaacatttattttaattgccgtaaaggaactgtatttttgttttgttttttaacacagcactttaaatccagtttgtgttttgtcaacttgaactggaatctcttttgttactttggaggtgataaatagttttcaaatctgctgatttgtatactgtggcacaagtatctttgaactttgatagtgaaaggagaccttcaacaatttttagtctaggcgagaggaatattaggaatgtgacttctaaattttacaatagagcagttattttaaggtcatggttaacatttcttaaggttcaactaaaattcagttaaaatttcagagctacgaggaacttaaatcttagctaaaaattacctgttgtagatagtattaattagattgtttgcagctattaattcatcataaagataaaatgaagaaactctccctttttttaaacaaaaaaaattatttctagattaataggctagtagttatttctgcagaaacaacgtatggaactgaaagccacctatttttattttagactaatttaaaccacttggaatggattctaggaaacatcttaagcttgtgtgttgcctgtggtggttttttgtttgggggtgttttttggttttggtttgattttctgtattttgttatctggggattttttgtttgtttgttttggtttggttttggttttatatttttggcatgtctatggcagttaaaagtggtatattttgctttagatagggaatcaggttataatcattgttcttcctctaaactgcctcttgggctttacatcaggtcaaggatttttagggtttctcaaaaataggattcttgtcagtgtatgcatgctgagtaagtcacctttctggctctaatttctgggtggccatctgttgtccagctctgctgccaactggactttccgaaagccatgtcaactaattttttatatgctaagacaaatcgaatatgaaaagaggaagaatattctagatattctaagacatttcttaatttggcatctcagaggaggtaggtggaaagtaaaggaagagataattttgggggaaaatttgtggaaacatacaaaacgttttgctttgtatagatgctaaacagagtgggaggcagcatatttgtaacaacaaccattctgaccttttgaaacacaagcttttggagaagtcagggagagacacagtatgaataaaagcaattaacattttctttaatgtatatttttcaaagaggaccacggaatcctgttctctaacccaaggggcagtgtaggtggttttaagcccacagaatattgagatatttctcttgtggttttggtggggtggtgggatgcagaaggttattaaagatcaatttaagcatcagatagactatcccttttatttttttaacttttaggttcaggggtacatgtgcaggttgttatataggtaaactcatgtcaagtggttttgttgtacagattattttgtcacccaggtgctaagcctagtacccagtagttattttccctgctcttctccctcctcccaccctccaccctcaagtaggccccagtgtctgttgttcctttctttgtgtccttgagttctcatcatttagctcctacttctaaatgagaacatgtatttggttttctgttctgtgttagtttgctaaggataatggcctccagctcagatggaatatctctatcatatagacctgttgttacagggcaggatcggatgatggacactgaagtcctcagcttgctaagttcagttgctctccctagcctccttttggcttcagagtcttttgattccatctatcctggtattttttgtgtgctgatgtttagttctggattggcttcagctgtgctaataggaagggcgttgtcttttcaagcaatcttaaaaggtggtcaatcaaaaggccagagtctgaatcccttctgtggcttaaataatttgaggatcaagtccagtgtcttgttaatccctgttctactgtgccagacactatcttgaatgcttttatatgttcaggttcaaaatcgctctttcataccaggggatgatagtaacgtgtaacttgcaatagattccttcatcttagtaataagatgatcagtctagttaggacaaaatagagattgaataaattaacttttccaagtttacagagtaaaaatgagcagatctctgcctggttttgtgaaaaagagttagcactggtaaatagaatatttctactcctacaccattctttcagtatatcatcactgaagacaggaagataggcacacagattcttcctcgtagtaattcatagtgcactaggtgaaagagatgaagtatgtattaaaagtacaatgtgatggcatttattattcagataatcccaggattctagaagaaaataaagaagagtgacagttcagttagggtgtgaacttccagaggagcactgcttaagctgaacttgagagcattgtgcaaaagcacagtagtctgttaagaactagaaataacctagcttgtgccacttcgggagtattaagacataagcctagaaaggtaggcaaaggttagatcttagactgtcttgtatttttctcattcctgttgattacctacctcaaaattgaatatgtttttcctcctgcctaacacaaaactactcaagggcagaaatttaaattcttccttggtgtatgtgcaaagaaggttgaatatattcatgcctaccttattttggactaggaatacagtagtatactttccgaagacttgcctgaatagtatataaggtggaggcaactgactagttaggtcagtatttttagaaactcttaatagctcatactcttgataccaaaagcagccctgattgttaaagcacacacctgcacaagaagcagtgatggttgcatttacatttcctgggtgcacaaaaaaaaattctcaaaaagcaaggacttacgctttttgcaaagcctttgagaagttactggatcataggaagcttataacaagaatggaagattcttaaataactcactttctttggtatccagtaacagtagatgttcaaaatatgtagctgattaataccagcattgtgaacgctgtacaaccttgtggttattactaagcaagttactactagcttctgaaaagtagcttcataattaatgttatttatacactgccttccatgacttttactttgccctaagctaatctccaaaatctgaaatgctactccaatatcagaaaaaaagggggaggtggaattatatttcctgtgattttaagagtacagagaatcatgcacatctctgattagttcatatatgtctagtgtgtaataaaagtcaagatgaactctcaag

SEQ ID NO: 5585 - protein, 72 aa, Homo sapiens; identical to SEQ ID NO: 649

SEQ ID NO: 5586 - DNA, 938 bp, Homo sapiens
gagccccggaagggtgatgtggctgcggcatcgccggcctcgctatgattgttgggtatattttggaagtgtgccagaattggtgaacggaagagtccttatgttgcagtatgctgtatagtaatggccttcagcatcctcttcatacagtagctggggaaaatgccagaatgtagttgccatcagatttgattgtgaacaaggactgactgcagaaaataatggaaaggatgtttaactcttttatctccgaacattgaatgagataaatttccagatgctgttctctattttaatgttattggaccaatgttctgtataaacaattaagatgtaaccatttaatagtctgtaacaatcaacctcagtactgtcactacaatattacattctgcaaatgttattctgttgtatcagatacaaaattttagtgaggtatctctaaggcacatagtagaaaacaaaattggttaattactcaagttcctttcactgtgatttggaaatgatttaatctttatagaatgagaaccttttttggactagcttttttattaaaatggctcaatttgtgttgataaggattgcattaatatttaatagtgcttgcttttcctctgggcacaccattttgatcattaaccagagtacctctactcttagcaaactctagtttatgacaagtatttaaaatatttaaaacaagcttatgcagttcttaaggacgaaggtaaatgagatgtaacttaaaaatagtattgggaaaatgttgatagttaacattagtggatttagactagccaaatgacatagtaggctctgaaacatcttgtcaagtatatgtattttgtgcatgaatttttgctggaaagctgtctttctctgaaaaacacaacgttcttagaatgaaaagaacaattataaaataattatcctat

SEQ ID NO: 5587 - protein, 34 aa, Homo sapiens; identical to SEQ ID NO: 5579

SEQ ID NO: 5588 - DNA, 1105 bp, Homo sapiens
aaccggacggctggagagggcgagaagggcagacgggacatgcagcctcttccgcctgagccccggaagggtgatgtggctgcggcatcgccggcctcgctatgtctgccattttcaattttcagagtctattgactgtaatcttgctgcttatatgtacctgtgcttatattcgatccttggcacccagcctcctggacagaaataaaactggattgttgggtatattttggaagtgtgccagaattggtgaacggaagagtccttatgttgcagtatgctgtatagtaatggccttcagcatcctcttcatacagtagctggggaaaatgccagaatgtagttgccatcagatttgattgtgaacaaggactgactgcagaaaataatggaaaggatgtttaactcttttatctccgaacattgaatgagataaatttccagatgctgttctctattttaatgttattggaccaatgttctgtataaacaattaagatgtaaccatttaatagtctgtaacaatcaacctcagtactgtcactacaatattacattctgcaaatgttattctgttgtatcagatacaaaattttagtgaggtatctctaaggcacatagtagaaaacaaaattggttaattactcaagttcctttcactgtgatttggaaatgatttaatctttatagaatgagaaccttttttggactagcttttttattaaaatggctcaatttgtgttgataaggattgcattaatatttaatagtgcttgcttttcctctgggcacaccattttgatcattaaccagagtacctctactcttagcaaactctagtttatgacaagtatttaaaatatttaaaacaagcttatgcagttcttaaggacgaaggtaaatgagatgtaacttaaaaatagtattgggaaaatgttgatagttaacattagtggatttagactagccaaatgacatagtaggctctgaaacatcttgtcaagtatatgtattttgtgcatgaatttttgctggaaagctgtctttctctgaaaaacacaacgttcttagaatgaaaagaacaattataaaataattatcctat

SEQ ID NO: 5589 - protein, 72 aa, Homo sapiens; identical to SEQ ID NO: 649

SEQ ID NO: 5590 - DNA, 574 bp, Homo sapiens
ccggaagggtgatgtggctgcggcatcgccggcctcgctatgattgttgggtatattttggaagtgtgccagaattggtgaacggaagagtccttatgttgcagtatgctgtatagtaatggccttcagcatcctcttcatacagtagctggggaaaatgccagaatgtagttgccatcagatttgattgtgaacaaggactgactgcagaaaataatggaaaggatgtttaactcttttatctccgaacattgaatgagataaatttccagatgctgttctctattttaatgttattggaccaatgttctgtataaacaattaagatgtaaccatttaatagtctgtaacaatcaacctcagtactgtcactacaatattacattctgcaaatgttattctgttgtatcagatacaaaattttagtgaggtatctctaaggcacatagtagaaaacaaaattggttaattactcaagttcctttcactgtgatttggaaatgatttaatctttatagaatgagaaccttttttggactagcttttttattaaaatggctcaatttgtgttgat

SEQ ID NO: 5591 - protein, 34 aa, Homo sapiens; identical to SEQ ID NO: 5579

SEQ ID NO: 5592 - DNA, 746 bp, Homo sapiens
aaccggacggctggagagggcgagaagggcagacgggacatgcagcctcttccgcctgagccccggaagggtgatgtggctgcggcatcgccggcctcgctatgtctgccattttcaattttcagagtctattgactgtaatcttgctgcttatatgtacctgtgcttatattcgatccttggcacccagcctcctggacagaaataaaactggattgttgggtatattttggaagtgtgccagaattggtgaacggaagagtccttatgttgcagtatgctgtatagtaatggccttcagcatcctcttcatacagtagctggggaaaatgccagaatgtagttgccatcagatttgattgtgaacaaggactgactgcagaaaataatggaaaggatgtttaactcttttatctccgaacattgaatgagataaatttccagatgctgttctctattttaatgttattggaccaatgttctgtataaacaattaagatgtaaccatttaatagtctgtaacaatcaacctcagtactgtcactacaatattacattctgcaaatgttattctgttgtatcagatacaaaattttagtgaggtatctctaaggcacatagtagaaaacaaaattggttaattactcaagttcctttcactgtgatttggaaatgatttaatctttatagaatgagaaccttttttggactagcttttttattaaaatggctcaatttgtgttgat

SEQ ID NO: 5593 - protein, 72 aa, Homo sapiens; identical to SEQ ID NO: 649

SEQ ID NO: 5594 - DNA, 400 bp, Homo sapiens
gtgatgtggctgcggcatcgccggcctcgctatggtccatgtgccaaatgttatgtatatttctggacaaaggatgcatgcctgcaaatagacccaaaaacaactatgactccaaaaagcttgagtctccatggtgaaaaattatgagcctatgttcacagaagttgctgcagaatcccatatagcaataattcattttcttctctggacgaatttaccacctggtgggaagatggcagttgagactaggaagactgccactcttaattcttatacatctttctagaaactgaagttgaattcttctactcgtagtgcaagtcaaagataactctttttattatctcactgtcagactagctaaaaataagatgcatatactgtgcttaagatcaacagt

SEQ ID NO: 5595 - protein, 47 aa, Homo sapiens
MWLRHRRPRYGPCAKCYVYFWTKDACLQIDPKTTMTPKSLSLHGEKL

SEQ ID NO: 5596 - DNA, 1704 bp, Homo sapiens
cgggatttagatcacgtcccgcaggccggcggaagtagctgatactctcattggttgcaaaaccttgatctgtgaaagcgggcgttttggaagataccggaagtagagtcacggagaggtaggatccggaagtggggctgcctctttaaataacaaaaatctgaggtattaagaaatggagagaaaaataagcagaatccaccttgtttctgaacccagtataactcattttctacaagtatcttgggagaaaacactggaatctggttttgttattacacttactgatggtcattcagcatggactgggacagtttctgaatcagagatttcccaagaagctgatgacatggcaatggaaaaagggaaatatgttggtgaactgagaaaagcattgttgtcaggagcaggaccagctgatgtatacacgtttaatttttctaaagagtcttgttatttcttctttgagaaaaacctgaaagatgtctcattcagacttggttccttcaacctagagaaagttgaaaacccagctgaagtcattagagaacttatttgttattgcttggacaccattgcagaaaatcaagccaaaaatgagcacctgcagaaagaaaatgaaaggcttctgagagattggaatgatgttcaaggacgatttgaaaaatgtgtgagtgctaaggaagctttggagactgatctttataagcggtttattctggtgttgaatgagaagaaaacaaaaatcagaagtttgcataataaattattaaatgcagctcaagaacgagaaaaggacatcaaacaagaaggggaaactgcaatctgttctgaaatgactgctgaccgagatccagtctatgatgagagtactgatgaggaaagtgaaaaccaaactgatctctctgggttggcttcagctgctgtaagtaaagatgattccattatttcaagtcttgatgtcactgatattgcaccaagtagaaaaaggagacagcgaatgcaaagaaatcttgggacagaacctaaaatggctcctcaggagaatcagcttcaagaaaaggaaaattctaggcctgattcttcactacctgagacgtctaaaaaggagcacatctcagctgaaaacatgtctttagaaactctgagaaacagcagcccagaagacctctttgatgagatttaacagtctcaaaaaatactttgatgttcactagactatgttttctattcatttctttaaaatgaaaaaggagaatttcaagtcagcagccgctattaccgtatcttacaatttaattacatacacagtgaattgaaaccattgtgcaaaatggattacacatgtatacaaagatacgatttgatgatgacactggcacattattctaaactattcattcagcatgcctataattacataaattgtatgagactttttgttgcaaaggacacatttatcatattcattcacacatattatatgtgatagctgtccaacatcctgtctgggaagattttgaaaacaggacaaagaaaacatcattttaaaatgtcttcagctttttttgaatagacgtattcaaacatattctgaacattgatgtttgaacattttaatttgtgtgatgatgtagaaaatataattttagtttgtacataaacattgtgaaaatctgataataaaatttttgatacattgaa

SEQ ID NO: 5597 - protein, 336 aa, Homo sapiens; identical to SEQ ID NO: 653

SEQ ID NO: 5598 - DNA, 1657 bp, Homo sapiens
cgggatttagatcacgtcccgcaggccggcggaagtagctgatactctcattggttgcaaaaccttgatctgtgaaagcgggcgttttggaagataccggaagtagagtcacggagaggtattaagaaatggagagaaaaataagcagaatccaccttgtttctgaacccagtataactcattttctacaagtatcttgggagaaaacactggaatctggttttgttattacacttactgatggtcattcagcatggactgggacagtttctgaatcagagatttcccaagaagctgatgacatggcaatggaaaaagggaaatatgttggtgaactgagaaaagcattgttgtcaggagcaggaccagctgatgtatacacgtttaatttttctaaagagtcttgttatttcttctttgagaaaaacctgaaagatgtctcattcagacttggttccttcaacctagagaaagttgaaaacccagctgaagtcattagagaacttatttgttattgcttggacaccattgcagaaaatcaagccaaaaatgagcacctgcagaaagaaaatgaaaggcttctgagagattggaatgatgttcaaggacgatttgaaaaatgtgtgagtgctaaggaagctttggagactgatctttataagcggtttattctggtgttgaatgagaagaaaacaaaaatcagaagtttgcataataaattattaaatgcagctcaagaacgagaaaaggacatcaaacaagaaggggaaactgcaatctgttctgaaatgactgctgaccgagatccagtctatgatgagagtactgatgaggaaagtgaaaaccaaactgatctctctgggttggcttcagctgctgtaagtaaagatgattccattatttcaagtcttgatgtcactgatattgcaccaagtagaaaaaggagacagcgaatgcaaagaaatcttgggacagaacctaaaatggctcctcaggagaatcagcttcaagaaaaggaaaattctaggcctgattcttcactacctgagacgtctaaaaaggagcacatctcagctgaaaacatgtctttagaaactctgagaaacagcagcccagaagacctctttgatgagatttaacagtctcaaaaaatactttgatgttcactagactatgttttctattcatttctttaaaatgaaaaaggagaatttcaagtcagcagccgctattaccgtatcttacaatttaattacatacacagtgaattgaaaccattgtgcaaaatggattacacatgtatacaaagatacgatttgatgatgacactggcacattattctaaactattcattcagcatgcctataattacataaattgtatgagactttttgttgcaaaggacacatttatcatattcattcacacatattatatgtgatagctgtccaacatcctgtctgggaagattttgaaaacaggacaaagaaaacatcattttaaaatgtcttcagctttttttgaatagacgtattcaaacatattctgaacattgatgtttgaacattttaatttgtgtgatgatgtagaaaatataattttagtttgtacataaacattgtgaaaatctgataataaaatttttgatacattgaa

SEQ ID NO: 5599 - protein, 336 aa, Homo sapiens; identical to SEQ ID NO: 653

SEQ ID NO: 5600 - DNA, 1273 bp, Homo sapiens
cggaagtagctgatactctcattggttgcaaaaccttgatctgtgaaagcgggcgttttggaagataccggaagtagagtcacggagaggtattaagaaatggagagaaaaataagcagaatccaccttgtttctgaacccagtataactcattttctacaagtatcttgggagaaaacactggaatctggttttgttattacacttactgatggtcattcagcatggactgggacagtttctgaatcagagatttcccaagaagctgatgacatggcaatggaaaaagggaaatatgttggtgaactgagaaaagcattgttgtcaggagcaggaccagctgatgtatacacgtttaatttttctaaagagtcttgttatttcttctttgagaaaaacctgaaagatgtctcattcagacttggttccttcaacctagagaaagttgaaaacccagctgaagtcattagagaacttatttgttattgcttggacaccattgcagaaaatcaagccaaaaatgagcacctgcagaaagaaaatgaaaggcttctgagagattggaatgatgttcaaggacgatttgaaaaatgtgtgagtgctaaggaagctttggagactgatctttataagcggtttattctggtgttgaatgagaagaaaacaaaaatcagaagtttgcataataaattattaaatgcagctcaagaacgagaaaaggacatcaaacaagaaggggaaactgcaatctgttctgaaatgactgctgaccgagatccagtctatgatgagagtactgatgaggaaagtgaaaaccaaactgatctctctgggttggcttcagctgctgtaagtaaagatgattccattatttcaagtcttgatgtcactgatattgcaccaagtagaaaaaggagacagcgaatgcaaagaaatcttgggacagaacctaaaatggctcctcaggagaatcagcttcaagaaaaggaaaaagggaggaagaaggagacttcagagaaagaggccgtgtgatggaagcaaaatcagagagaaaagatgctaagctgctgcctttgaataaggaggaacgtgagccaacagatccaagaactgaagctctaggcagtggaaaagccaaggaaactgatcttcccttcgagcctccggagggagtgtagccctgccaacacctttattttagccccataacagtcatttcagacttgtggcctccagaattttaagagaataaatttttattgtattaagccat

SEQ ID NO: 5601 - protein, 310 aa, Homo sapiens
MERKISRIHLVSEPSITHFLQVSWEKTLESGFVITLTDGHSAWTGTVSESEISQEADDMAMEKGKYVGELRKALLSGAGPADVYTFNFSKESCYFFFEKNLKDVSFRLGSFNLEKVENPAEVIRELICYCLDTIAENQAKNEHLQKENERLLRDWNDVQGRFEKCVSAKEALETDLYKRFILVLNEKKTKIRSLHNKLLNAAQEREKDIKQEGETAICSEMTADRDPVYDESTDEESENQTDLSGLASAAVSKDDSIISSLDVTDIAPSRKRRQRMQRNLGTEPKMAPQENQLQEKEKGRKKETSEKEAV

SEQ ID NO: 5602 - DNA, 851 bp, Homo sapiens
cttgatctgtgaaagcgggcgttttggaagataccggaagtagagtcacggagaggtattaagaaatggagagaaaaataagcagaatccaccttgtttctgaacccagtataactcattttctacaagtatcttgggagaaaacactggaatctggttttgttattacacttactgatggtcattcagcatggactgggacagtttctgaatcagagatttcccaagaagctgatgacatggcaatggaaaaagggaaatatgttggtgaactgagaaaagcattgttgtcaggagcaggaccagctgatgtatacacgtttaatttttctaaagagtcttgttatttcttctttgagaaaaacctgaaagatgtctcagtaagtaaaactttccaaaatgttacatagtaaaatgtcagagcatttattgaggaattatatttaaatttaagtgactactatattattcccagaacacctcagaagcaaaagcttgaaaagtacttggtttccaaattagaagaatacttcaaagctaaagtcattaaatatattaatgaatcatgaaaaataaatattggaaaatgtgtttagtttttaatgcttgaaaaattttaaagtattacagagttaattatacaaaagaataatcttgaaaaaggtgagatcagaagttttaggccatcgtgacaggtcttattgaaaaaagttttgtgaaatattgattttaagaaataaaatcaatcaaaatatatctttgaatatagaataattatgacttattttctactttactagagtatatttgaaattgaaaaatgcatagtaagtattaaggatactttatat

SEQ ID NO: 5603 - protein, 114 aa, Homo sapiens
MERKISRIHLVSEPSITHFLQVSWEKTLESGFVITLTDGHSAWTGTVSESEISQEADDMAMEKGKYVGELRKALLSGAGPADVYTFNFSKESCYFFFEKNLKDVSVSKTFQNVT

SEQ ID NO: 5604 - DNA, 499 bp, Homo sapiens
gtcatctcatgagtcccctggccagagctgagtggagcaggattagactaatctgactgtagaagaaacaatttatgatgggttgagcctatccagttctctgtgaataatgcaaactggtagaggatattcctattatgggatgtaaaggtctttatcattttagtttcaatagcattgaatataaggagctataactggaatgagatacaagaaaagtttaaaaattataccataatgtattctactaccactaccaccagaaacataaaagaccattacagaagatgacgttattcgtcctttacttggtagaaacgccatcacctcacaaagttaaagaaatacatcaaagttcctcctcaaagaatctgatgagtagtcctccaaggaagtctgaccaagaatcatatacactcatgatatgagtgtatttctagtaagcaagactacaacaaactttgctttgagtaatttaaatttaaaaccaagaaacaaa

SEQ ID NO: 5605 - protein, 46 aa, Homo sapiens
MTLFVLYLVETPSPHKVKEIHQSSSSKNLMSSPPRKSDQESYTLMI

SEQ ID NO: 5606 - DNA, 2567 bp, Homo sapiens
ggagaggtgccttctgccatgattgtaagtttcctgaggccttcccagccattcagaactcatgtcagtgaaaaaaccagtgaatcgccttccaaaccaggagaaaagaaaggatcagatgagaaaaaagcagcaagcctcggcagcagtcaatcctccagaacctatgctggtggaacagcctcggccaccaaggtgtcagcttcctctggtgcaaccagcaagtcttccagtatgaatcccacagaaaccaaggccattccagtcagccaacagatggaaggaccacatcttcctaacaagaaaaaacacaaaaaacaggctgtaaaaacagaacctgagaagaagtcacagtcaaccaagctgtctgtggttcatgagaaaaaatcccaagaaggaaagccaaaagaacacacagagccaaaaagcctacccaagcaggcatcagatacaggaagtaacgatgctcacaataaaaaagcagtttccagatcagctgaacagcagccatcagagaaatcaacagaaccaaagactaaaccacaagacatgatttctgctggtggagagagtgttgctggtatcactgcaatatctggcaagccgggtgacaagaaaaaagaaaagaaatcattaaccccagctgtgccagttgaatctaaaccggataaaccatcgggaaagtcaggcatggatgctgctttggatgacttaatagatactttaggaggacctgaagaaactgaagaagaaaatacaacgtatactggaccagaagtttcagatccaatgagttccacctacatagaggaattgggtaaaagagaagtcacaattcctccaaaatatagggaactattggctaaaaaggaagggatcacagggcctcctgcagactcttcgaaacccatagggccagatgatgctatagacgccttgtcatctgacttcacctgtgggtcgcctacagctgctggaaagaaaactgaaaaagaggaatctacagaagttttaaaagctcagtcagcagggacagtcagaagtgctgctccaccccaagagaagaaaagaaaggtggagaaggatacaatgagtgatcaagcactcgaggctctgtcggcttcactgggcacccggcaagcagaacctgagctcgacctccgctcaattaaggaagtcgatgaggcaaaagctaaagaagaaaaactagagaagtgtggtgaggatgatgaaacaatcccatctgagtacagattaaaaccagccacggataaagatggaaaaccactattgccagagcctgaagaaaaacccaagcctcggagtgaatcagaactcattgatgaactttcagaagattttgaccggtctgaatgtaaagagaaaccatctaagccaactgaaaagacagaagaatctaaggccgctgctccagctcctgtgtcggaggctgtgtgtcggacctccatgtgtagtatacagtcagcaccccctgagccggctaccttgaagggcacagtgccagatgatgctgtagaagccttggctgatagcctggggaaaaaggaagcagatccagaagatggaaaacctgtgatggataaagtcaaggagaaggccaaagaagaagaccgtgaaaagcttggtgaaaaagaagaaacaattcctcctgattatagattagaagaggtcaaggataaagatggaaagccactcctgccaaaagagtctaaggaacagcttccacccatgagtgaagacttccttctggatgctttgtctgaggacttctctggtccacaaaatgcttcatctcttaaatttgaagatgctaaacttgctgctgccatctctgaagtggtttcccaaaccccagcttcaacgacccaagctggagccccaccccgtgatacctcgcagagtgacaaagacctcgatgatgccttggataaactctctgacagtctaggacaaaggcagcctgacccagatgagaacaaaccaatggaagataaagtaaaggaaaaagctaaagctgaacatagagacaagcttggagaaagagatgacactatcccacctgaatacagacatctcctggatgataatggacaggacaaaccagtgaagccacctacaaagaaatcagaggattcaaagaaacctgcagatgaccaagaccccattgatgctctctcaggagatctggacagctgtccctccactacagaaacctcacagaacacagcaaaggataagtgcaagaaggctgcttccagctccaaagcacctaagaatggaggtaaagcgaaggattcagcaaagacaacagaggaaacttccaagccaaaagatgactaaagaaatacaagttaaggtatctggtatctgcatgtaaaatcttcagctggtggatggtgacttttgaagaacaaaaggctttggcaacagaaaacaattgttctgggtgatttctagaatggtttttgttgagtctctgaacatcctaaatattggtttgttattcttttccagaaagaaaatgaatttgactggttcacctgtgt

SEQ ID NO: 5607 - protein, 780 aa, Homo sapiens
MIVSFLRPSQPFRTHVSEKTSESPSKPGEKKGSDEKKAASLGSSQSSRTYAGGTASATKVSASSGATSKSSSMNPTETKAIPVSQQMEGPHLPNKKKHKKQAVKTEPEKKSQSTKLSVVHEKKSQEGKPKEHTEPKSLPKQASDTGSNDAHNKKAVSRSAEQQPSEKSTEPKTKPQDMISAGGESVAGITAISGKPGDKKKEKKSLTPAVPVESKPDKPSGKSGMDAALDDLIDTLGGPEETEEENTTYTGPEVSDPMSSTYIEELGKREVTIPPKYRELLAKKEGITGPPADSSKPIGPDDAIDALSSDFTCGSPTAAGKKTEKEESTEVLKAQSAGTVRSAAPPQEKKRKVEKDTMSDQALEALSASLGTRQAEPELDLRSIKEVDEAKAKEEKLEKCGEDDETIPSEYRLKPATDKDGKPLLPEPEEKPKPRSESELIDELSEDFDRSECKEKPSKPTEKTEESKAAAPAPVSEAVCRTSMCSIQSAPPEPATLKGTVPDDAVEALADSLGKKEADPEDGKPVMDKVKEKAKEEDREKLGEKEETIPPDYRLEEVKDKDGKPLLPKESKEQLPPMSEDFLLDALSEDFSGPQNASSLKFEDAKLAAAISEVVSQTPASTTQAGAPPRDTSQSDKDLDDALDKLSDSLGQRQPDPDENKPMEDKVKEKAKAEHRDKLGERDDTIPPEYRHLLDDNGQDKPVKPPTKKSEDSKKPADDQDPIDALSGDLDSCPSTTETSQNTAKDKCKKAASSSKAPKNGGKAKDSAKTTEETSKPKDD

SEQ ID NO: 5608 - DNA, 2607 bp, Homo sapiens
ggagaggtgccttctgccatgattgtaagtttcctgaggccttcccagccattcagaactcatgtcagtgaaaaaaccagtgaatcgccttccaaaccaggagaaaagaaaggatcagatgagaaaaaagcagcaagcctcggcagcagtcaatcctccagaacctatgctggtggaacagcctcggccaccaaggtgtcagcttcctctggtgcaaccagcaagtcttccagtatgaatcccacagaaaccaaggccattccagtcagccaacagatggaaggaccacatcttcctaacaagaaaaaacacaaaaaacaggctgtaaaaacagaacctgagaagaagtcacagtcaaccaagctgtctgtggttcatgagaaaaaatcccaagaaggaaagccaaaagaacacacagagccaaaaagcctacccaagcaggcatcagatacaggaagtaacgatgctcacaataaaaaagcagtttccagatcagctgaacagcagccatcagagaaatcaacagaaccaaagactaaaccacaagacatgatttctgctggtggagagagtgttgctggtatcactgcaatatctggcaagccgggtgacaagaaaaaagaaaagaaatcattaaccccagctgtgccagttgaatctaaaccggataaaccatcgggaaagtcaggcatggatgctgctttggatgacttaatagatactttaggaggacctgaagaaactgaagaagaaaatacaacgtatactggaccagaagtttcagatccaatgagttccacctacatagaggaattgggtaaaagagaagtcacaattcctccaaaatatagggaactattggctaaaaaggaagggatcacagggcctcctgcagactcttcgaaacccatagggccagatgatgctatagacgccttgtcatctgacttcacctgtgggtcgcctacagctgctggaaagaaaactgaaaaagaggaatctacagaagttttaaaagctcagtcagcagggacagtcagaagtgctgctccaccccaagagaagaaaagaaaggtggagaaggatacaatgagtgatcaagcactcgaggctctgtcggcttcactgggcacccggcaagcagaacctgagctcgacctccgctcaattaaggaagtcgatgaggcaaaagctaaagaagaaaaactagagaagtgtggtgaggatgatgaaacaatcccatctgagtacagattaaaaccagccacggataaagatggaaaaccactattgccagagcctgaagaaaaacccaagcctcggagtgaatcagaactcattgatgaactttcagaagattttgaccggtctgaatgtaaagagaaaccatctaagccaactgaaaagacagaagaatctaaggccgctgctccagctcctgtgtcggaggctgtgtgtcggacctccatgtgtagtatacagtcagcaccccctgagccggctaccttgaagggcacagtgccagatgatgctgtagaagccttggctgatagcctggggaaaaaggaagcagatccagaagatggaaaacctgtgatggataaagtcaaggagaaggccaaagaagaagaccgtgaaaagcttggtgaaaaagaagaaacaattcctcctgattatagattagaagaggtcaaggataaagatggaaagccactcctgccaaaagagtctaaggaacagcttccacccatgagtgaagacttccttctggatgctttgtctgaggacttctctggtccacaaaatgcttcatctcttaaatttgaagatgctaaacttgctgctgccatctctgaagtggtttcccaaaccccagcttcaacgacccaagctggagccccaccccgtgatacctcgcagagtgacaaagacctcgatgatgccttggataaactctctgacagtctaggacaaaggcagcctgacccagatgagaacaaaccaatggaagataaagtaaaggaaaaagctaaagctgaacatagagacaagcttggagaaagagatgacactatcccacctgaatacagacatctcctggatgataatggacaggacaaaccagtgaagccacctacaaagaaatcagaggattcaaagaaacctgcagatgaccaagaccccattgatgctctctcaggagatctggacagctgtccctccactacagaaacctcacagaacacagcaaaggataagtgcaagaaggctgcttccagctccaaagcacctaagaatggaggtaaagcgaaggattcagcaaagacaacagaggaaacttccaagccaaaagatgactaaagaaatacaagttaaggtatctggtatctgcatgtaaaatcttcagctggtggatggtgacttttgaagaacaaaaggctttggcaacagaaaacaattgttctgggtgatttctagaatggtttttgttgagtctctgaacatcctaaatattggtttgttattcttttccagaaagaaaatgaatttgactggttcacctgtgtactgagtattgataaactttgaatttttttaattgccttc

SEQ ID NO: 5609 - protein, 780 aa, Homo sapiens; identical to SEQ ID NO: 5607

SEQ ID NO: 5610 - DNA, 2958 bp, Homo sapiens
ggagaggtgccttctgccatgattgtaagtttcctgaggccttcccagccattcagaactcatgtcagtgaaaaaaccagtgaatcgccttccaaaccaggagaaaagaaaggatcagatgagaaaaaagcagcaagcctcggcagcagtcaatcctccagaacctatgctggtggaacagcctcggccaccaaggtgtcagcttcctctggtgcaaccagcaagtcttccagtatgaatcccacagaaaccaaggccattccagtcagccaacagatggaaggaccacatcttcctaacaagaaaaaacacaaaaaacaggctgtaaaaacagaacctgagaagaagtcacagtcaaccaagctgtctgtggttcatgagaaaaaatcccaagaaggaaagccaaaagaacacacagagccaaaaagcctacccaagcaggcatcagatacaggaagtaacgatgctcacaataaaaaagcagtttccagatcagctgaacagcagccatcagagaaatcaacagaaccaaagactaaaccacaagacatgatttctgctggtggagagagtgttgctggtatcactgcaatatctggcaagccgggtgacaagaaaaaagaaaagaaatcattaaccccagctgtgccagttgaatctaaaccggataaaccatcgggaaagtcaggcatggatgctgctttggatgacttaatagatactttaggaggacctgaagaaactgaagaagaaaatacaacgtatactggaccagaagtttcagatccaatgagttccacctacatagaggaattgggtaaaagagaagtcacaattcctccaaaatatagggaactattggctaaaaaggaagggatcacagggcctcctgcagactcttcgaaacccatagggccagatgatgctatagacgccttgtcatctgacttcacctgtgggtcgcctacagctgctggaaagaaaactgaaaaagaggaatctacagaagttttaaaagctcagtcagcagggacagtcagaagtgctgctccaccccaagagaagaaaagaaaggtggagaaggatacaatgagtgatcaagcactcgaggctctgtcggcttcactgggcacccggcaagcagaacctgagctcgacctccgctcaattaaggaagtcgatgagggaaggggagtctccctgacttccagcaacaatccttgagtctgggactgccctggcctaagatgggccagtttctatcttcgactttcttggagggctcaccggccacagtgtggcacgataagctttgtgacggtgaacgcagaggagcaagagaagcagttcgtatcttccaggaccaagcaaaagctaaagaagaaaaactagagaagtgtggtgaggatgatgaaacaatcccatctgagtacagattaaaaccagccacggataaagatggaaaaccactattgccagagcctgaagaaaaacccaagcctcggagtgaatcagaactcattgatgaactttcagaagattttgaccggtctgaatgtaaagagaaaccatctaagccaactgaaaagacagaagaatctaaggccgctgctccagctcctgtgtcggaggctgtgtgtcggacctccatgtgtagtatacagtcagcaccccctgagccggctaccttgaagggcacagtgccagatgatgctgtagaagccttggctgatagcctggggaaaaaggaagcagatccagaagatggaaaacctgtgatggataaagtcaaggagaaggccaaagaagaagaccgtgaaaagcttggtgaaaaagaagaaacaattcctcctgattatagattagaagaggtcaaggataaagatggaaagccactcctgccaaaagagtctaaggaacagcttccacccatgagtgaagacttccttctggatgctttgtctgaggacttctctggtccacaaaatgcttcatctcttaaatttgaagatgctaaacttgctgctgccatctctgaagtggtttcccaaaccccagcttcaacgacccaagctggagccccaccccgtgatacctcgcagagtgacaaagacctcgatgatgccttggataaactctctgacagtctaggacaaaggcagcctgacccagatgagaacaaaccaatggaagataaagtaaaggaaaaagctaaagctgaacatagagacaagcttggagaaagagatgacactatcccacctgaatacagacatctcctggatgataatggacaggacaaaccagtgaagccacctacaaagaaatcagaggattcaaagaaacctgcagatgaccaagaccccattgatgctctctcaggagatctggacagctgtccctccactacagaaacctcacagaacacagcaaaggataagtgcaagaaggctgcttccagctccaaagcacctaagaatggaggtaaagcgaaggattcagcaaagacaacagaggaaacttccaagccaaaagatgactaaagaaatacaagttaaggtatctggtatctgcatgtaaaatcttcagctggtggatggtgacttttgaagaacaaaaggctttggcaacagaaaacaattgttctgggtgatttctagaatggtttttgttgagtctctgaacatcctaaatattggtttgttattcttttccagaaagaaaatgaatttgactggttcacctgtgtactgagtattgataaactttgaatttttttaattgccttcaattgggagagaaagctttatatttgtgtgaggacttctgcatcttacagtcagcacagaacacactgagacttgaatcaagtcagcaacagagcaaaataaaggttagataagtccttgtgtagcaaatttcgagcataagaaataaaatctaattaattcttagggt

SEQ ID NO: 5611 - protein, 431 aa, Homo sapiens
MGQFLSSTFLEGSPATVWHDKLCDGERRGAREAVRIFQDQAKAKEEKLEKCGEDDETIPSEYRLKPATDKDGKPLLPEPEEKPKPRSESELIDELSEDFDRSECKEKPSKPTEKTEESKAAAPAPVSEAVCRTSMCSIQSAPPEPATLKGTVPDDAVEALADSLGKKEADPEDGKPVMDKVKEKAKEEDREKLGEKEETIPPDYRLEEVKDKDGKPLLPKESKEQLPPMSEDFLLDALSEDFSGPQNASSLKFEDAKLAAAISEVVSQTPASTTQAGAPPRDTSQSDKDLDDALDKLSDSLGQRQPDPDENKPMEDKVKEKAKAEHRDKLGERDDTIPPEYRHLLDDNGQDKPVKPPTKKSEDSKKPADDQDPIDALSGDLDSCPSTTETSQNTAKDKCKKAASSSKAPKNGGKAKDSAKTTEETSKPKDD

SEQ ID NO: 5612 - DNA, 2919 bp, Homo sapiens
ggagaggtgccttctgccatgattgtaagtttcctgaggccttcccagccattcagaactcatgtcagtgaaaaaaccagtgaatcgccttccaaaccaggagaaaagaaaggatcagatgagaaaaaagcagcaagcctcggcagcagtcaatcctccagaacctatgctggtggaacagcctcggccaccaaggtgtcagcttcctctggtgcaaccagcaagtcttccagtatgaatcccacagaaaccaaggccattccagtcagccaacagatggaaggaccacatcttcctaacaagaaaaaacacaaaaaacaggctgtaaaaacagaacctgagaagaagtcacagtcaaccaagctgtctgtggttcatgagaaaaaatcccaagaaggaaagccaaaagaacacacagagccaaaaagcctacccaagcaggcatcagatacaggaagtaacgatgctcacaataaaaaagcagtttccagatcagctgaacagcagccatcagagaaatcaacagaaccaaagactaaaccacaagacatgatttctgctggtggagagagtgttgctggtatcactgcaatatctggcaagccgggtgacaagaaaaaagaaaagaaatcattaaccccagctgtgccagttgaatctaaaccggataaaccatcgggaaagtcaggcatggatgctgctttggatgacttaatagatactttaggaggacctgaagaaactgaagaagaaaatacaacgtatactggaccagaagtttcagatccaatgagttccacctacatagaggaattgggtaaaagagaagtcacaattcctccaaaatatagggaactattggctaaacccatagggccagatgatgctatagacgccttgtcatctgacttcacctgtgggtcgcctacagctgctggaaagaaaactgaaaaagaggaatctacagaagttttaaaagctcagtcagcagggacagtcagaagtgctgctccaccccaagagaagaaaagaaaggtggagaaggatacaatgagtgatcaagcactcgaggctctgtcggcttcactgggcacccggcaagcagaacctgagctcgacctccgctcaattaaggaagtcgatgagggaaggggagtctccctgacttccagcaacaatccttgagtctgggactgccctggcctaagatgggccagtttctatcttcgactttcttggagggctcaccggccacagtgtggcacgataagctttgtgacggtgaacgcagaggagcaagagaagcagttcgtatcttccaggaccaagcaaaagctaaagaagaaaaactagagaagtgtggtgaggatgatgaaacaatcccatctgagtacagattaaaaccagccacggataaagatggaaaaccactattgccagagcctgaagaaaaacccaagcctcggagtgaatcagaactcattgatgaactttcagaagattttgaccggtctgaatgtaaagagaaaccatctaagccaactgaaaagacagaagaatctaaggccgctgctccagctcctgtgtcggaggctgtgtgtcggacctccatgtgtagtatacagtcagcaccccctgagccggctaccttgaagggcacagtgccagatgatgctgtagaagccttggctgatagcctggggaaaaaggaagcagatccagaagatggaaaacctgtgatggataaagtcaaggagaaggccaaagaagaagaccgtgaaaagcttggtgaaaaagaagaaacaattcctcctgattatagattagaagaggtcaaggataaagatggaaagccactcctgccaaaagagtctaaggaacagcttccacccatgagtgaagacttccttctggatgctttgtctgaggacttctctggtccacaaaatgcttcatctcttaaatttgaagatgctaaacttgctgctgccatctctgaagtggtttcccaaaccccagcttcaacgacccaagctggagccccaccccgtgatacctcgcagagtgacaaagacctcgatgatgccttggataaactctctgacagtctaggacaaaggcagcctgacccagatgagaacaaaccaatggaagataaagtaaaggaaaaagctaaagctgaacatagagacaagcttggagaaagagatgacactatcccacctgaatacagacatctcctggatgataatggacaggacaaaccagtgaagccacctacaaagaaatcagaggattcaaagaaacctgcagatgaccaagaccccattgatgctctctcaggagatctggacagctgtccctccactacagaaacctcacagaacacagcaaaggataagtgcaagaaggctgcttccagctccaaagcacctaagaatggaggtaaagcgaaggattcagcaaagacaacagaggaaacttccaagccaaaagatgactaaagaaatacaagttaaggtatctggtatctgcatgtaaaatcttcagctggtggatggtgacttttgaagaacaaaaggctttggcaacagaaaacaattgttctgggtgatttctagaatggtttttgttgagtctctgaacatcctaaatattggtttgttattcttttccagaaagaaaatgaatttgactggttcacctgtgtactgagtattgataaactttgaatttttttaattgccttcaattgggagagaaagctttatatttgtgtgaggacttctgcatcttacagtcagcacagaacacactgagacttgaatcaagtcagcaacagagcaaaataaaggttagataagtccttgtgtagcaaatttcgagcataagaaataaaatctaattaattcttagggt

SEQ ID NO: 5613 - protein, 431 aa, Homo sapiens; identical to SEQ ID NO: 5611

SEQ ID NO: 5614 - DNA, 2862 bp, Homo sapiens
ggagaggtgccttctgccatgattgtaagtttcctgaggccttcccagccattcagaactcatgtcagtgaaaaaaccagtgaatcgccttccaaaccaggagaaaagaaaggatcagatgagaaaaaagcagcaagcctcggcagcagtcaatcctccagaacctatgctggtggaacagcctcggccaccaaggtgtcagcttcctctggtgcaaccagcaagtcttccagtatgaatcccacagaaaccaaggccattccagtcagccaacagatggaaggaccacatcttcctaacaagaaaaaacacaaaaaacaggctgtaaaaacagaacctgagaagaagtcacagtcaaccaagctgtctgtggttcatgagaaaaaatcccaagaaggaaagccaaaagaacacacagagccaaaaagcctacccaagcaggcatcagatacaggaagtaacgatgctcacaataaaaaagcagtttccagatcagctgaacagcagccatcagagaaatcaacagaaccaaagactaaaccacaagacatgatttctgctggtggagagagtgttgctggtatcactgcaatatctggcaagccgggtgacaagaaaaaagaaaagaaatcattaaccccagctgtgccagttgaatctaaaccggataaaccatcgggaaagtcaggcatggatgctgctttggatgacttaatagatactttaggaggacctgaagaaactgaagaagaaaatacaacgtatactggaccagaagtttcagatccaatgagttccacctacatagaggaattgggtaaaagagaagtcacaattcctccaaaatatagggaactattggctaaaaaggaagggatcacagggcctcctgcagactcttcgaaacccatagggccagatgctcagtcagcagggacagtcagaagtgctgctccaccccaagagaagaaaagaaaggtggagaaggatacaatgagtgatcaagcactcgaggctctgtcggcttcactgggcacccggcaagcagaacctgagctcgacctccgctcaattaaggaagtcgatgagggaaggggagtctccctgacttccagcaacaatccttgagtctgggactgccctggcctaagatgggccagtttctatcttcgactttcttggagggctcaccggccacagtgtggcacgataagctttgtgacggtgaacgcagaggagcaagagaagcagttcgtatcttccaggaccaagcaaaagctaaagaagaaaaactagagaagtgtggtgaggatgatgaaacaatcccatctgagtacagattaaaaccagccacggataaagatggaaaaccactattgccagagcctgaagaaaaacccaagcctcggagtgaatcagaactcattgatgaactttcagaagattttgaccggtctgaatgtaaagagaaaccatctaagccaactgaaaagacagaagaatctaaggccgctgctccagctcctgtgtcggaggctgtgtgtcggacctccatgtgtagtatacagtcagcaccccctgagccggctaccttgaagggcacagtgccagatgatgctgtagaagccttggctgatagcctggggaaaaaggaagcagatccagaagatggaaaacctgtgatggataaagtcaaggagaaggccaaagaagaagaccgtgaaaagcttggtgaaaaagaagaaacaattcctcctgattatagattagaagaggtcaaggataaagatggaaagccactcctgccaaaagagtctaaggaacagcttccacccatgagtgaagacttccttctggatgctttgtctgaggacttctctggtccacaaaatgcttcatctcttaaatttgaagatgctaaacttgctgctgccatctctgaagtggtttcccaaaccccagcttcaacgacccaagctggagccccaccccgtgatacctcgcagagtgacaaagacctcgatgatgccttggataaactctctgacagtctaggacaaaggcagcctgacccagatgagaacaaaccaatggaagataaagtaaaggaaaaagctaaagctgaacatagagacaagcttggagaaagagatgacactatcccacctgaatacagacatctcctggatgataatggacaggacaaaccagtgaagccacctacaaagaaatcagaggattcaaagaaacctgcagatgaccaagaccccattgatgctctctcaggagatctggacagctgtccctccactacagaaacctcacagaacacagcaaaggataagtgcaagaaggctgcttccagctccaaagcacctaagaatggaggtaaagcgaaggattcagcaaagacaacagaggaaacttccaagccaaaagatgactaaagaaatacaagttaaggtatctggtatctgcatgtaaaatcttcagctggtggatggtgacttttgaagaacaaaaggctttggcaacagaaaacaattgttctgggtgatttctagaatggtttttgttgagtctctgaacatcctaaatattggtttgttattcttttccagaaagaaaatgaatttgactggttcacctgtgtactgagtattgataaactttgaatttttttaattgccttcaattgggagagaaagctttatatttgtgtgaggacttctgcatcttacagtcagcacagaacacactgagacttgaatcaagtcagcaacagagcaaaataaaggttagataagtccttgtgtagcaaatttcgagcataagaaataaaatctaattaattcttagggt

SEQ ID NO: 5615 - protein, 431 aa, Homo sapiens; identical to SEQ ID NO: 5611

SEQ ID NO: 5616 - DNA, 3071 bp, Homo sapiens
ggagaggtgccttctgccatgattgtaagtttcctgaggccttcccagccattcagaactcatgtcagtgaaaaaaccagtgaatcgccttccaaaccaggagaaaagaaaggatcagatgagaaaaaagcagcaagcctcggcagcagtcaatcctccagaacctatgctggtggaacagcctcggccaccaaggtgtcagcttcctctggtgcaaccagcaagtcttccagtatgaatcccacagaaaccaaggccattccagtcagccaacagatggaaggaccacatcttcctaacaagaaaaaacacaaaaaacaggctgtaaaaacagaacctgagaagaagtcacagtcaaccaagctgtctgtggttcatgagaaaaaatcccaagaaggaaagccaaaagaacacacagagccaaaaagcctacccaagcaggcatcagatacaggaagtaacgatgctcacaataaaaaagcagtttccagatcagctgaacagcagccatcagagaaatcaacagaaccaaagactaaaccacaagacatgatttctgctggtggagagagtgttgctggtatcactgcaatatctggcaagccgggtgacaagaaaaaagaaaagaaatcattaaccccagctgtgccagttgaatctaaaccggataaaccatcgggaaagtcaggcatggatgctgctttggatgacttaatagatactttaggaggacctgaagaaactgaagaagaaaatacaacgtatactggaccagaagtttcagatccaatgagttccacctacatagaggaattgggtaaaagagaagtcacaattcctccaaaatatagggaactattggctaaaaaggaagggatcacagggcctcctgcagactcttcgaaacccatagggccagatgatgctatagacgccttgtcatctgacttcacctgtgggtcgcctacagctgctggaaagaaaactgaaaaagaggaatctacagaagttttaaaagctcagtcagcagggacagtcagaagtgctgctccaccccaagagaagaaaagaaaggtggagaaggatacaatgagtgatcaagcactcgaggctctgtcggcttcactgggcacccggcaagcagaacctgagctcgacctccgctcaattaaggaagtcgatgaggcaaaagctaaagaagaaaaactagagaagtgtggtgaggatgatgaaacaatcccatctgagtacagattaaaaccagccacggataaagatggaaaaccactattgccagagcctgaagaaaaacccaagcctcggagtgaatcagaactcattgatgaactttcagaagattttgaccggtctgaatgtaaagagaaaccatctaagccaactgaaaagacagaagaatctaaggccgctgctccagctcctgtgtcggaggctgtgtgtcggacctccatgtgtagtatacagtcagcaccccctgagccggctaccttgaagggcacagtgccagatgatgctgtagaagccttggctgatagcctggggaaaaaggaagcagatccagaagatggaaaacctgtgatggataaagtcaaggagaaggccaaagaagaagaccgtgaaaagcttggtgaaaaagaagaaacaattcctcctgattatagattagaagaggtcaaggataaagatggaaagccactcctgccaaaagagtctaaggaacagcttccacccatgagtgaagacttccttctggatgctttgtctgaggacttctctggtccacaaaatgcttcatctcttaaatttgaagatgctaaacttgctgctgccatctctgaagtggtttcccaaaccccagcttcaacgacccaagctggagccccaccccgtgatacctcgcagagtgacaaagacctcgatgatgccttggataaactctctgacagtctaggacaaaggcagcctgacccagatgagaacaaaccaatggaagataaagtaaaggaaaaagctaaagctgaacatagagacaagcttggagaaagagatgacactatcccacctgaatacagacatctcctggatgataatggacaggacaaaccagtgaagccacctacaaagaaatcagaggattcaaagaaacctgcagatgaccaagaccccattgatgctctctcaggagatctggacagctgtccctccactacagaaacctcacagaacacagcaaaggataagtgcaagaaggctgcttccagctccaaagcacctaagaatggaggtaaagcgaaggattcagcaaagacaacagaggaaacttccaagccaaaagatgactaaagaaatacaagttaaggtatctggtatctgcatgtaaaatcttcagctggtggatggtgacttttgaagaacaaaaggctttggcaacagaaaacaattgttctgggtgatttctagaatggtttttgttgagtctctgaacatcctaaatattggtttgttattcttttccagaaagaaaatgaatttgactggttcacctgtgtactgagtattgataaactttgaatttttttaattgccttcaattgggagagaaagctttatatttgtgtgaggacttctgcatcttacagtcagcacagaacacactgagacttgaatcaagtcagcaacagagcaaaataaagatgcaaacttcgttttttaaaaacatgatatctaaaaagcagaatgtgcagagtcttttctttgccaagcaaaacagtttccaccacatcttgtctatagatgactacctttctggtcaaggctttggacatctcttcagtcatcagacagagtatctctgctctagacctcgctggagttcaagcttgaattattatatgcaagttaattttacaagcctggatgaggctactgaaaactggaaaaaagctacgagactgtaacaacccttcattctttttcatttccaaagctctctccccatctcaagctagaaaatagtgtaaccagactacacaatggaaccactcctaaaaaaa

SEQ ID NO: 5617 - protein, 780 aa, Homo sapiens; identical to SEQ ID NO: 5607

SEQ ID NO: 5618 - DNA, 2932 bp, Homo sapiens
ggagaggtgccttctgccatgattgtaagtttcctgaggccttcccagccattcagaactcatgtcagtgaaaaaaccagtgaatcgccttccaaaccaggagaaaagaaaggatcagatgagaaaaaagcagcaagcctcggcagcagtcaatcctccagaacctatgctggtggaacagcctcggccaccaaggtgtcagcttcctctggtgcaaccagcaagtcttccagtatgaatcccacagaaaccaaggccattccagtcagccaacagatggaaggaccacatcttcctaacaagaaaaaacacaaaaaacaggctgtaaaaacagaacctgagaagaagtcacagtcaaccaagctgtctgtggttcatgagaaaaaatcccaagaaggaaagccaaaagaacacacagagccaaaaagcctacccaagcaggcatcagatacaggaagtaacgatgctcacaataaaaaagcagtttccagatcagctgaacagcagccatcagagaaatcaacagaaccaaagactaaaccacaagacatgatttctgctggtggagagagtgttgctggtatcactgcaatatctggcaagccgggtgacaagaaaaaagaaaagaaatcattaaccccagctgtgccagttgaatctaaaccggataaaccatcgggaaagtcaggcatggatgctgctttggatgacttaatagatactttaggaggacctgaagaaactgaagaagaaaatacaacgtatactggaccagaagtttcagatccaatgagttccacctacatagaggaattgggtaaaagagaagtcacaattcctccaaaatatagggaactattggctaaaaaggaagggatcacagggcctcctgcagactcttcgaaacccatagggccagatgatgctatagacgccttgtcatctgacttcacctgtgggtcgcctacagctgctggaaagaaaactgaaaaagaggaatctacagaagttttaaaagctcagtcagcagggacagtcagaagtgctgctccaccccaagagaagaaaagaaaggtggagaaggatacaatgagtgatcaagcactcgaggctctgtcggcttcactgggcacccggcaagcagaacctgagctcgacctccgctcaattaaggaagtcgatgaggcaaaagctaaagaagaaaaactagagaagtgtggtgaggatgatgaaacaatcccatctgagtacagattaaaaccagccacggataaagatggaaaaccactattgccagagcctgaagaaaaacccaagcctcggagtgaatcagaactcattgatgaactttcagaagattttgaccggtctgaatgtaaagagaaaccatctaagccaactgaaaagacagaagaatctaaggccgctgctccagctcctgtgtcggaggctgtgtgtcggacctccatgtgtagtatacagtcagcaccccctgagccggctaccttgaagggcacagtgccagatgatgctgtagaagccttggctgatagcctggggaaaaaggaagcagatccagaagatggaaaacctgtgatggataaagtcaaggagaaggccaaagaagaagaccgtgaaaagcttggtgaaaaagaagaaacaattcctcctgattatagattagaagaggtcaaggataaagatggaaagccactcctgccaaaagagtctaaggaacagcttccacccatgagtgaagacttccttctggatgctttgtctgaggacttctctggtccacaaaatgcttcatctcttaaatttgaagatgctaaacttgctgctgccatctctgaagtggtttcccaaaccccagcttcaacgacccaagctggagccccaccccgtgatacctcgcagagtgacaaagacctcgatgatgccttggataaactctctgacagtctaggacaaaggcagcctgacccagatgagaacaaaccaatggaagataaagtaaaggaaaaagctaaagctgaacatagagacaagcttggagaaagagatgacactatcccacctgaatacagacatctcctggatgataatggacaggacaaaccagtgaagccacctacaaagaaatcagaggattcaaagaaacctgcagatgaccaagaccccattgatgctctctcaggagatctggacagctgtccctccactacagaaacctcacagaacacagcaaaggataagtgcaagaaggctgcttccagctccaaagcacctaagaatggaggtaaagcgaaggattcagcaaagacaacagaggaaacttccaagccaaaagatgactaaagaaatacaagttaaggtatctggtatctgcatgtaaaatcttcagctggtggatggtgacttttgaagaacaaaaggctttggcaacagaaaacaattgttctgggtgatttctagaatggtttttgttgagtctctgaacatcctaaatattggtttgttattcttttccagaaagaaaatgaatttgactggttcacctgtgtactgagtattgataaactttgaatttttttaattgccttcaattgggagagaaagctttatatttgtgtgaggacttctgcatcttacagtcagcacagaacacactgagacttgaatcaagtcagcaacagagcaaaataaagatgcaaacttcgttttttaaaaacatgatatctaaaaagcagaatgtgcagagtcttttctttgccaagcaaaacagtttccaccacatgtgtgctgacttgcagtatgttcccagcaggataggcaattcctggccaagaaaacaaaaatagatgccagaatgatctaatctaatctaatttcccttggccacatgaacatgaatgaatgacggactcac

SEQ ID NO: 5619 - protein, 780 aa, Homo sapiens; identical to SEQ ID NO: 5607

SEQ ID NO: 5620 - DNA, 927 bp, Homo sapiens
atggaaaaagcacccattattgggaatgagtacatcagcgtgaattctggctgccagctcagatacacagacagtaagtacgacactttaagaggaaatgcatttaaatcctcttctccccgcatcccctccctcaaaattaagaatgctgctagcctatcctttgaagaagaagtcagaattcctaaaatgaggagcggagcagaatgtagaaagagtatctacttctccggattgttgggaggagggtcgaagcgtagactggccacgcccgggtcccgctctctcgttgcacaactgcaagctagatctgggcatcgaaggaggaacgctgcaacctccaaccccttctttctgaccaaccgggaccagagcagtgctggggccggggcgggtcaccgggactccccgccaggcctccccgccactctccgcggcgcattccgggaggcagcggccgcagcggcctcgccatgtcccagcccggccagaagcccgccgcctccccgcggccccggcgagcagccgccgcccgccgcacccatgagcatgtcagtgaaaaaaccagtgaatcgccttccaaaccaggagaaaagaaaggatcagatgagatgtagaggaattacaggaccaaaagttgcatggactaacaagccaaagataaaataactagagaggaggaaaaagaaaaatgaaaacacttaacatcagcaactttaaatgcagtagaacaaataagtctttccaaacctgcaatcaaatctatttaaaggatgaaactgacacatccggccacactgagagagtgtgaatcttttagcaacatatttcagtaaagtcctggggaatggaatttaaagtataaaacgggcatgatctcagagagccaattttaaaagcttcaaatttaacaatggatttattttt

SEQ ID NO: 5621 - protein, 222 aa, Homo sapiens
MEKAPIIGNEYISVNSGCQLRYTDSKYDTLRGNAFKSSSPRIPSLKIKNAASLSFEEEVRIPKMRSGAECRKSIYFSGLLGGGSKRRLATPGSRSLVAQLQARSGHRRRNAATSNPFFLTNRDQSSAGAGAGHRDSPPGLPATLRGAFREAAAAAASPCPSPARSPPPPRGPGEQPPPAAPMSMSVKKPVNRLPNQEKRKDQMRCRGITGPKVAWTNKPKIK

SEQ ID NO: 5622 - DNA, 2745 bp, Homo sapiens
ctgggcatcgaaggaggaacgctgcaacctccaaccccttctttctgaccaaccgggaccagagcagtgctggggccggggcgggtcaccgggactccccgccaggcctccccgccactctccgcggcgcattccgggaggcagcggccgcagcggcctcgccatgtcccagcccggccagaagcccgccgcctccccgcggccccggcgagcagccgccgcccgccgcacccatgagcatgtcagtgaaaaaaccagtgaatcgccttccaaaccaggagaaaagaaaggatcagatgagaaaaaagcagcaagcctcggcagcagtcaatcctccagaacctatgctggtggaacagcctcggccaccaaggtgtcagcttcctctggtgcaaccagcaagtcttccagtatgaatcccacagaaaccaaggccattccagtcagccaacagatggaaggaccacatcttcctaacaagaaaaaacacaaaaaacaggctgtaaaaacagaacctgagaagaagtcacagtcaaccaagctgtctgtggttcatgagaaaaaatcccaagaaggaaagccaaaagaacacacagagccaaaaagcctacccaagcaggcatcagatacaggaagtaacgatgctcacaataaaaaagcagtttccagatcagctgaacagcagccatcagagaaatcaacagaaccaaagactaaaccacaagacatgatttctgctggtggagagagtgttgctggtatcactgcaatatctggcaagccgggtgacaagaaaaaagaaaagaaatcattaaccccagctgtgccagttgaatctaaaccggataaaccatcgggaaagtcaggcatggatgctgctttggatgacttaatagatactttaggaggacctgaagaaactgaagaagaaaatacaacgtatactggaccagaagtttcagatccaatgagttccacctacatagaggaattgggtaaaagagaagtcacaattcctccaaaatatagggaactattggctaaaaaggaagggatcacagggcctcctgcagactcttcgaaacccatagggccagatgatgctatagacgccttgtcatctgacttcacctgtgggtcgcctacagctgctggaaagaaaactgaaaaagaggaatctacagaagttttaaaagctcagtcagcagggacagtcagaagtgctgctccaccccaagagaagaaaagaaaggtggagaaggatacaatgagtgatcaagcactcgaggctctgtcggcttcactgggcacccggcaagcagaacctgagctcgacctccgctcaattaaggaagtcgatgaggcaaaagctaaagaagaaaaactagagaagtgtggtgaggatgatgaaacaatcccatctgagtacagattaaaaccagccacggataaagatggaaaaccactattgccagagcctgaagaaaaacccaagcctcggagtgaatcagaactcattgatgaactttcagaagattttgaccggtctgaatgtaaagagaaaccatctaagccaactgaaaagacagaagaatctaaggccgctgctccagctcctgtgtcggaggctgtgtgtcggacctccatgtgtagtatacagtcagcaccccctgagccggctaccttgaagggcacagtgccagatgatgctgtagaagccttggctgatagcctggggaaaaaggaagcagatccagaagatggaaaacctgtgatggataaagtcaaggagaaggccaaagaagaagaccgtgaaaagcttggtgaaaaagaagaaacaattcctcctgattatagattagaagaggtcaaggataaagatggaaagccactcctgccaaaagagtctaaggaacagcttccacccatgagtgaagacttccttctggatgctttgtctgaggacttctctggtccacaaaatgcttcatctcttaaatttgaagatgctaaacttgctgctgccatctctgaagtggtttcccaaaccccagcttcaacgacccaagctggagccccaccccgtgatacctcgcagagtgacaaagacctcgatgatgccttggataaactctctgacagtctaggacaaaggcagcctgacccagatgagaacaaaccaatggaagataaagtaaaggaaaaagctaaagctgaacatagagacaagcttggagaaagagatgacactatcccacctgaatacagacatctcctggatgataatggacaggacaaaccagtgaagccacctacaaagaaatcagaggattcaaagaaacctgcagatgaccaagaccccattgatgctctctcaggagatctggacagctgtccctccactacagaaacctcacagaacacagcaaaggataagtgcaagaaggctgcttccagctccaaagcacctaagaatggaggtaaagcgaaggattcagcaaagacaacagaggaaacttccaagccaaaagatgactaaagaaatacaagttaaggtatctggtatctgcatgtaaaatcttcagctggtggatggtgacttttgaagaacaaaaggctttggcaacagaaaacaattgttctgggtgatttctagaatggtttttgttgagtctctgaacatcctaaatattggtttgttattcttttccagaaagaaaatgaatttgactggttcacctgtgt

SEQ ID NO: 5623 - protein, 791 aa, Homo sapiens
MSQPGQKPAASPRPRRAAAARRTHEHVSEKTSESPSKPGEKKGSDEKKAASLGSSQSSRTYAGGTASATKVSASSGATSKSSSMNPTETKAIPVSQQMEGPHLPNKKKHKKQAVKTEPEKKSQSTKLSVVHEKKSQEGKPKEHTEPKSLPKQASDTGSNDAHNKKAVSRSAEQQPSEKSTEPKTKPQDMISAGGESVAGITAISGKPGDKKKEKKSLTPAVPVESKPDKPSGKSGMDAALDDLIDTLGGPEETEEENTTYTGPEVSDPMSSTYIEELGKREVTIPPKYRELLAKKEGITGPPADSSKPIGPDDAIDALSSDFTCGSPTAAGKKTEKEESTEVLKAQSAGTVRSAAPPQEKKRKVEKDTMSDQALEALSASLGTRQAEPELDLRSIKEVDEAKAKEEKLEKCGEDDETIPSEYRLKPATDKDGKPLLPEPEEKPKPRSESELIDELSEDFDRSECKEKPSKPTEKTEESKAAAPAPVSEAVCRTSMCSIQSAPPEPATLKGTVPDDAVEALADSLGKKEADPEDGKPVMDKVKEKAKEEDREKLGEKEETIPPDYRLEEVKDKDGKPLLPKESKEQLPPMSEDFLLDALSEDFSGPQNASSLKFEDAKLAAAISEVVSQTPASTTQAGAPPRDTSQSDKDLDDALDKLSDSLGQRQPDPDENKPMEDKVKEKAKAEHRDKLGERDDTIPPEYRHLLDDNGQDKPVKPPTKKSEDSKKPADDQDPIDALSGDLDSCPSTTETSQNTAKDKCKKAASSSKAPKNGGKAKDSAKTTEETSKPKDD

SEQ ID NO: 5624 - DNA, 2785 bp, Homo sapiens
ctgggcatcgaaggaggaacgctgcaacctccaaccccttctttctgaccaaccgggaccagagcagtgctggggccggggcgggtcaccgggactccccgccaggcctccccgccactctccgcggcgcattccgggaggcagcggccgcagcggcctcgccatgtcccagcccggccagaagcccgccgcctccccgcggccccggcgagcagccgccgcccgccgcacccatgagcatgtcagtgaaaaaaccagtgaatcgccttccaaaccaggagaaaagaaaggatcagatgagaaaaaagcagcaagcctcggcagcagtcaatcctccagaacctatgctggtggaacagcctcggccaccaaggtgtcagcttcctctggtgcaaccagcaagtcttccagtatgaatcccacagaaaccaaggccattccagtcagccaacagatggaaggaccacatcttcctaacaagaaaaaacacaaaaaacaggctgtaaaaacagaacctgagaagaagtcacagtcaaccaagctgtctgtggttcatgagaaaaaatcccaagaaggaaagccaaaagaacacacagagccaaaaagcctacccaagcaggcatcagatacaggaagtaacgatgctcacaataaaaaagcagtttccagatcagctgaacagcagccatcagagaaatcaacagaaccaaagactaaaccacaagacatgatttctgctggtggagagagtgttgctggtatcactgcaatatctggcaagccgggtgacaagaaaaaagaaaagaaatcattaaccccagctgtgccagttgaatctaaaccggataaaccatcgggaaagtcaggcatggatgctgctttggatgacttaatagatactttaggaggacctgaagaaactgaagaagaaaatacaacgtatactggaccagaagtttcagatccaatgagttccacctacatagaggaattgggtaaaagagaagtcacaattcctccaaaatatagggaactattggctaaaaaggaagggatcacagggcctcctgcagactcttcgaaacccatagggccagatgatgctatagacgccttgtcatctgacttcacctgtgggtcgcctacagctgctggaaagaaaactgaaaaagaggaatctacagaagttttaaaagctcagtcagcagggacagtcagaagtgctgctccaccccaagagaagaaaagaaaggtggagaaggatacaatgagtgatcaagcactcgaggctctgtcggcttcactgggcacccggcaagcagaacctgagctcgacctccgctcaattaaggaagtcgatgaggcaaaagctaaagaagaaaaactagagaagtgtggtgaggatgatgaaacaatcccatctgagtacagattaaaaccagccacggataaagatggaaaaccactattgccagagcctgaagaaaaacccaagcctcggagtgaatcagaactcattgatgaactttcagaagattttgaccggtctgaatgtaaagagaaaccatctaagccaactgaaaagacagaagaatctaaggccgctgctccagctcctgtgtcggaggctgtgtgtcggacctccatgtgtagtatacagtcagcaccccctgagccggctaccttgaagggcacagtgccagatgatgctgtagaagccttggctgatagcctggggaaaaaggaagcagatccagaagatggaaaacctgtgatggataaagtcaaggagaaggccaaagaagaagaccgtgaaaagcttggtgaaaaagaagaaacaattcctcctgattatagattagaagaggtcaaggataaagatggaaagccactcctgccaaaagagtctaaggaacagcttccacccatgagtgaagacttccttctggatgctttgtctgaggacttctctggtccacaaaatgcttcatctcttaaatttgaagatgctaaacttgctgctgccatctctgaagtggtttcccaaaccccagcttcaacgacccaagctggagccccaccccgtgatacctcgcagagtgacaaagacctcgatgatgccttggataaactctctgacagtctaggacaaaggcagcctgacccagatgagaacaaaccaatggaagataaagtaaaggaaaaagctaaagctgaacatagagacaagcttggagaaagagatgacactatcccacctgaatacagacatctcctggatgataatggacaggacaaaccagtgaagccacctacaaagaaatcagaggattcaaagaaacctgcagatgaccaagaccccattgatgctctctcaggagatctggacagctgtccctccactacagaaacctcacagaacacagcaaaggataagtgcaagaaggctgcttccagctccaaagcacctaagaatggaggtaaagcgaaggattcagcaaagacaacagaggaaacttccaagccaaaagatgactaaagaaatacaagttaaggtatctggtatctgcatgtaaaatcttcagctggtggatggtgacttttgaagaacaaaaggctttggcaacagaaaacaattgttctgggtgatttctagaatggtttttgttgagtctctgaacatcctaaatattggtttgttattcttttccagaaagaaaatgaatttgactggttcacctgtgtactgagtattgataaactttgaatttttttaattgccttc

SEQ ID NO: 5625 - protein, 791 aa, Homo sapiens; identical to SEQ ID NO: 5623

SEQ ID NO: 5626 - DNA, 3136 bp, Homo sapiens
ctgggcatcgaaggaggaacgctgcaacctccaaccccttctttctgaccaaccgggaccagagcagtgctggggccggggcgggtcaccgggactccccgccaggcctccccgccactctccgcggcgcattccgggaggcagcggccgcagcggcctcgccatgtcccagcccggccagaagcccgccgcctccccgcggccccggcgagcagccgccgcccgccgcacccatgagcatgtcagtgaaaaaaccagtgaatcgccttccaaaccaggagaaaagaaaggatcagatgagaaaaaagcagcaagcctcggcagcagtcaatcctccagaacctatgctggtggaacagcctcggccaccaaggtgtcagcttcctctggtgcaaccagcaagtcttccagtatgaatcccacagaaaccaaggccattccagtcagccaacagatggaaggaccacatcttcctaacaagaaaaaacacaaaaaacaggctgtaaaaacagaacctgagaagaagtcacagtcaaccaagctgtctgtggttcatgagaaaaaatcccaagaaggaaagccaaaagaacacacagagccaaaaagcctacccaagcaggcatcagatacaggaagtaacgatgctcacaataaaaaagcagtttccagatcagctgaacagcagccatcagagaaatcaacagaaccaaagactaaaccacaagacatgatttctgctggtggagagagtgttgctggtatcactgcaatatctggcaagccgggtgacaagaaaaaagaaaagaaatcattaaccccagctgtgccagttgaatctaaaccggataaaccatcgggaaagtcaggcatggatgctgctttggatgacttaatagatactttaggaggacctgaagaaactgaagaagaaaatacaacgtatactggaccagaagtttcagatccaatgagttccacctacatagaggaattgggtaaaagagaagtcacaattcctccaaaatatagggaactattggctaaaaaggaagggatcacagggcctcctgcagactcttcgaaacccatagggccagatgatgctatagacgccttgtcatctgacttcacctgtgggtcgcctacagctgctggaaagaaaactgaaaaagaggaatctacagaagttttaaaagctcagtcagcagggacagtcagaagtgctgctccaccccaagagaagaaaagaaaggtggagaaggatacaatgagtgatcaagcactcgaggctctgtcggcttcactgggcacccggcaagcagaacctgagctcgacctccgctcaattaaggaagtcgatgagggaaggggagtctccctgacttccagcaacaatccttgagtctgggactgccctggcctaagatgggccagtttctatcttcgactttcttggagggctcaccggccacagtgtggcacgataagctttgtgacggtgaacgcagaggagcaagagaagcagttcgtatcttccaggaccaagcaaaagctaaagaagaaaaactagagaagtgtggtgaggatgatgaaacaatcccatctgagtacagattaaaaccagccacggataaagatggaaaaccactattgccagagcctgaagaaaaacccaagcctcggagtgaatcagaactcattgatgaactttcagaagattttgaccggtctgaatgtaaagagaaaccatctaagccaactgaaaagacagaagaatctaaggccgctgctccagctcctgtgtcggaggctgtgtgtcggacctccatgtgtagtatacagtcagcaccccctgagccggctaccttgaagggcacagtgccagatgatgctgtagaagccttggctgatagcctggggaaaaaggaagcagatccagaagatggaaaacctgtgatggataaagtcaaggagaaggccaaagaagaagaccgtgaaaagcttggtgaaaaagaagaaacaattcctcctgattatagattagaagaggtcaaggataaagatggaaagccactcctgccaaaagagtctaaggaacagcttccacccatgagtgaagacttccttctggatgctttgtctgaggacttctctggtccacaaaatgcttcatctcttaaatttgaagatgctaaacttgctgctgccatctctgaagtggtttcccaaaccccagcttcaacgacccaagctggagccccaccccgtgatacctcgcagagtgacaaagacctcgatgatgccttggataaactctctgacagtctaggacaaaggcagcctgacccagatgagaacaaaccaatggaagataaagtaaaggaaaaagctaaagctgaacatagagacaagcttggagaaagagatgacactatcccacctgaatacagacatctcctggatgataatggacaggacaaaccagtgaagccacctacaaagaaatcagaggattcaaagaaacctgcagatgaccaagaccccattgatgctctctcaggagatctggacagctgtccctccactacagaaacctcacagaacacagcaaaggataagtgcaagaaggctgcttccagctccaaagcacctaagaatggaggtaaagcgaaggattcagcaaagacaacagaggaaacttccaagccaaaagatgactaaagaaatacaagttaaggtatctggtatctgcatgtaaaatcttcagctggtggatggtgacttttgaagaacaaaaggctttggcaacagaaaacaattgttctgggtgatttctagaatggtttttgttgagtctctgaacatcctaaatattggtttgttattcttttccagaaagaaaatgaatttgactggttcacctgtgtactgagtattgataaactttgaatttttttaattgccttcaattgggagagaaagctttatatttgtgtgaggacttctgcatcttacagtcagcacagaacacactgagacttgaatcaagtcagcaacagagcaaaataaaggttagataagtccttgtgtagcaaatttcgagcataagaaataaaatctaattaattcttagggt

SEQ ID NO: 5627 - protein, 431 aa, Homo sapiens; identical to SEQ ID NO: 5611

SEQ ID NO: 5628 - DNA, 3097 bp, Homo sapiens
ctgggcatcgaaggaggaacgctgcaacctccaaccccttctttctgaccaaccgggaccagagcagtgctggggccggggcgggtcaccgggactccccgccaggcctccccgccactctccgcggcgcattccgggaggcagcggccgcagcggcctcgccatgtcccagcccggccagaagcccgccgcctccccgcggccccggcgagcagccgccgcccgccgcacccatgagcatgtcagtgaaaaaaccagtgaatcgccttccaaaccaggagaaaagaaaggatcagatgagaaaaaagcagcaagcctcggcagcagtcaatcctccagaacctatgctggtggaacagcctcggccaccaaggtgtcagcttcctctggtgcaaccagcaagtcttccagtatgaatcccacagaaaccaaggccattccagtcagccaacagatggaaggaccacatcttcctaacaagaaaaaacacaaaaaacaggctgtaaaaacagaacctgagaagaagtcacagtcaaccaagctgtctgtggttcatgagaaaaaatcccaagaaggaaagccaaaagaacacacagagccaaaaagcctacccaagcaggcatcagatacaggaagtaacgatgctcacaataaaaaagcagtttccagatcagctgaacagcagccatcagagaaatcaacagaaccaaagactaaaccacaagacatgatttctgctggtggagagagtgttgctggtatcactgcaatatctggcaagccgggtgacaagaaaaaagaaaagaaatcattaaccccagctgtgccagttgaatctaaaccggataaaccatcgggaaagtcaggcatggatgctgctttggatgacttaatagatactttaggaggacctgaagaaactgaagaagaaaatacaacgtatactggaccagaagtttcagatccaatgagttccacctacatagaggaattgggtaaaagagaagtcacaattcctccaaaatatagggaactattggctaaacccatagggccagatgatgctatagacgccttgtcatctgacttcacctgtgggtcgcctacagctgctggaaagaaaactgaaaaagaggaatctacagaagttttaaaagctcagtcagcagggacagtcagaagtgctgctccaccccaagagaagaaaagaaaggtggagaaggatacaatgagtgatcaagcactcgaggctctgtcggcttcactgggcacccggcaagcagaacctgagctcgacctccgctcaattaaggaagtcgatgagggaaggggagtctccctgacttccagcaacaatccttgagtctgggactgccctggcctaagatgggccagtttctatcttcgactttcttggagggctcaccggccacagtgtggcacgataagctttgtgacggtgaacgcagaggagcaagagaagcagttcgtatcttccaggaccaagcaaaagctaaagaagaaaaactagagaagtgtggtgaggatgatgaaacaatcccatctgagtacagattaaaaccagccacggataaagatggaaaaccactattgccagagcctgaagaaaaacccaagcctcggagtgaatcagaactcattgatgaactttcagaagattttgaccggtctgaatgtaaagagaaaccatctaagccaactgaaaagacagaagaatctaaggccgctgctccagctcctgtgtcggaggctgtgtgtcggacctccatgtgtagtatacagtcagcaccccctgagccggctaccttgaagggcacagtgccagatgatgctgtagaagccttggctgatagcctggggaaaaaggaagcagatccagaagatggaaaacctgtgatggataaagtcaaggagaaggccaaagaagaagaccgtgaaaagcttggtgaaaaagaagaaacaattcctcctgattatagattagaagaggtcaaggataaagatggaaagccactcctgccaaaagagtctaaggaacagcttccacccatgagtgaagacttccttctggatgctttgtctgaggacttctctggtccacaaaatgcttcatctcttaaatttgaagatgctaaacttgctgctgccatctctgaagtggtttcccaaaccccagcttcaacgacccaagctggagccccaccccgtgatacctcgcagagtgacaaagacctcgatgatgccttggataaactctctgacagtctaggacaaaggcagcctgacccagatgagaacaaaccaatggaagataaagtaaaggaaaaagctaaagctgaacatagagacaagcttggagaaagagatgacactatcccacctgaatacagacatctcctggatgataatggacaggacaaaccagtgaagccacctacaaagaaatcagaggattcaaagaaacctgcagatgaccaagaccccattgatgctctctcaggagatctggacagctgtccctccactacagaaacctcacagaacacagcaaaggataagtgcaagaaggctgcttccagctccaaagcacctaagaatggaggtaaagcgaaggattcagcaaagacaacagaggaaacttccaagccaaaagatgactaaagaaatacaagttaaggtatctggtatctgcatgtaaaatcttcagctggtggatggtgacttttgaagaacaaaaggctttggcaacagaaaacaattgttctgggtgatttctagaatggtttttgttgagtctctgaacatcctaaatattggtttgttattcttttccagaaagaaaatgaatttgactggttcacctgtgtactgagtattgataaactttgaatttttttaattgccttcaattgggagagaaagctttatatttgtgtgaggacttctgcatcttacagtcagcacagaacacactgagacttgaatcaagtcagcaacagagcaaaataaaggttagataagtccttgtgtagcaaatttcgagcataagaaataaaatctaattaattcttagggt

SEQ ID NO: 5629 - protein, 431 aa, Homo sapiens; identical to SEQ ID NO: 5611

SEQ ID NO: 5630 - DNA, 3040 bp, Homo sapiens
ctgggcatcgaaggaggaacgctgcaacctccaaccccttctttctgaccaaccgggaccagagcagtgctggggccggggcgggtcaccgggactccccgccaggcctccccgccactctccgcggcgcattccgggaggcagcggccgcagcggcctcgccatgtcccagcccggccagaagcccgccgcctccccgcggccccggcgagcagccgccgcccgccgcacccatgagcatgtcagtgaaaaaaccagtgaatcgccttccaaaccaggagaaaagaaaggatcagatgagaaaaaagcagcaagcctcggcagcagtcaatcctccagaacctatgctggtggaacagcctcggccaccaaggtgtcagcttcctctggtgcaaccagcaagtcttccagtatgaatcccacagaaaccaaggccattccagtcagccaacagatggaaggaccacatcttcctaacaagaaaaaacacaaaaaacaggctgtaaaaacagaacctgagaagaagtcacagtcaaccaagctgtctgtggttcatgagaaaaaatcccaagaaggaaagccaaaagaacacacagagccaaaaagcctacccaagcaggcatcagatacaggaagtaacgatgctcacaataaaaaagcagtttccagatcagctgaacagcagccatcagagaaatcaacagaaccaaagactaaaccacaagacatgatttctgctggtggagagagtgttgctggtatcactgcaatatctggcaagccgggtgacaagaaaaaagaaaagaaatcattaaccccagctgtgccagttgaatctaaaccggataaaccatcgggaaagtcaggcatggatgctgctttggatgacttaatagatactttaggaggacctgaagaaactgaagaagaaaatacaacgtatactggaccagaagtttcagatccaatgagttccacctacatagaggaattgggtaaaagagaagtcacaattcctccaaaatatagggaactattggctaaaaaggaagggatcacagggcctcctgcagactcttcgaaacccatagggccagatgctcagtcagcagggacagtcagaagtgctgctccaccccaagagaagaaaagaaaggtggagaaggatacaatgagtgatcaagcactcgaggctctgtcggcttcactgggcacccggcaagcagaacctgagctcgacctccgctcaattaaggaagtcgatgagggaaggggagtctccctgacttccagcaacaatccttgagtctgggactgccctggcctaagatgggccagtttctatcttcgactttcttggagggctcaccggccacagtgtggcacgataagctttgtgacggtgaacgcagaggagcaagagaagcagttcgtatcttccaggaccaagcaaaagctaaagaagaaaaactagagaagtgtggtgaggatgatgaaacaatcccatctgagtacagattaaaaccagccacggataaagatggaaaaccactattgccagagcctgaagaaaaacccaagcctcggagtgaatcagaactcattgatgaactttcagaagattttgaccggtctgaatgtaaagagaaaccatctaagccaactgaaaagacagaagaatctaaggccgctgctccagctcctgtgtcggaggctgtgtgtcggacctccatgtgtagtatacagtcagcaccccctgagccggctaccttgaagggcacagtgccagatgatgctgtagaagccttggctgatagcctggggaaaaaggaagcagatccagaagatggaaaacctgtgatggataaagtcaaggagaaggccaaagaagaagaccgtgaaaagcttggtgaaaaagaagaaacaattcctcctgattatagattagaagaggtcaaggataaagatggaaagccactcctgccaaaagagtctaaggaacagcttccacccatgagtgaagacttccttctggatgctttgtctgaggacttctctggtccacaaaatgcttcatctcttaaatttgaagatgctaaacttgctgctgccatctctgaagtggtttcccaaaccccagcttcaacgacccaagctggagccccaccccgtgatacctcgcagagtgacaaagacctcgatgatgccttggataaactctctgacagtctaggacaaaggcagcctgacccagatgagaacaaaccaatggaagataaagtaaaggaaaaagctaaagctgaacatagagacaagcttggagaaagagatgacactatcccacctgaatacagacatctcctggatgataatggacaggacaaaccagtgaagccacctacaaagaaatcagaggattcaaagaaacctgcagatgaccaagaccccattgatgctctctcaggagatctggacagctgtccctccactacagaaacctcacagaacacagcaaaggataagtgcaagaaggctgcttccagctccaaagcacctaagaatggaggtaaagcgaaggattcagcaaagacaacagaggaaacttccaagccaaaagatgactaaagaaatacaagttaaggtatctggtatctgcatgtaaaatcttcagctggtggatggtgacttttgaagaacaaaaggctttggcaacagaaaacaattgttctgggtgatttctagaatggtttttgttgagtctctgaacatcctaaatattggtttgttattcttttccagaaagaaaatgaatttgactggttcacctgtgtactgagtattgataaactttgaatttttttaattgccttcaattgggagagaaagctttatatttgtgtgaggacttctgcatcttacagtcagcacagaacacactgagacttgaatcaagtcagcaacagagcaaaataaaggttagataagtccttgtgtagcaaatttcgagcataagaaataaaatctaattaattcttagggt

SEQ ID NO: 5631 - protein, 431 aa, Homo sapiens; identical to SEQ ID NO: 5611

SEQ ID NO: 5632 - DNA, 3249 bp, Homo sapiens
ctgggcatcgaaggaggaacgctgcaacctccaaccccttctttctgaccaaccgggaccagagcagtgctggggccggggcgggtcaccgggactccccgccaggcctccccgccactctccgcggcgcattccgggaggcagcggccgcagcggcctcgccatgtcccagcccggccagaagcccgccgcctccccgcggccccggcgagcagccgccgcccgccgcacccatgagcatgtcagtgaaaaaaccagtgaatcgccttccaaaccaggagaaaagaaaggatcagatgagaaaaaagcagcaagcctcggcagcagtcaatcctccagaacctatgctggtggaacagcctcggccaccaaggtgtcagcttcctctggtgcaaccagcaagtcttccagtatgaatcccacagaaaccaaggccattccagtcagccaacagatggaaggaccacatcttcctaacaagaaaaaacacaaaaaacaggctgtaaaaacagaacctgagaagaagtcacagtcaaccaagctgtctgtggttcatgagaaaaaatcccaagaaggaaagccaaaagaacacacagagccaaaaagcctacccaagcaggcatcagatacaggaagtaacgatgctcacaataaaaaagcagtttccagatcagctgaacagcagccatcagagaaatcaacagaaccaaagactaaaccacaagacatgatttctgctggtggagagagtgttgctggtatcactgcaatatctggcaagccgggtgacaagaaaaaagaaaagaaatcattaaccccagctgtgccagttgaatctaaaccggataaaccatcgggaaagtcaggcatggatgctgctttggatgacttaatagatactttaggaggacctgaagaaactgaagaagaaaatacaacgtatactggaccagaagtttcagatccaatgagttccacctacatagaggaattgggtaaaagagaagtcacaattcctccaaaatatagggaactattggctaaaaaggaagggatcacagggcctcctgcagactcttcgaaacccatagggccagatgatgctatagacgccttgtcatctgacttcacctgtgggtcgcctacagctgctggaaagaaaactgaaaaagaggaatctacagaagttttaaaagctcagtcagcagggacagtcagaagtgctgctccaccccaagagaagaaaagaaaggtggagaaggatacaatgagtgatcaagcactcgaggctctgtcggcttcactgggcacccggcaagcagaacctgagctcgacctccgctcaattaaggaagtcgatgaggcaaaagctaaagaagaaaaactagagaagtgtggtgaggatgatgaaacaatcccatctgagtacagattaaaaccagccacggataaagatggaaaaccactattgccagagcctgaagaaaaacccaagcctcggagtgaatcagaactcattgatgaactttcagaagattttgaccggtctgaatgtaaagagaaaccatctaagccaactgaaaagacagaagaatctaaggccgctgctccagctcctgtgtcggaggctgtgtgtcggacctccatgtgtagtatacagtcagcaccccctgagccggctaccttgaagggcacagtgccagatgatgctgtagaagccttggctgatagcctggggaaaaaggaagcagatccagaagatggaaaacctgtgatggataaagtcaaggagaaggccaaagaagaagaccgtgaaaagcttggtgaaaaagaagaaacaattcctcctgattatagattagaagaggtcaaggataaagatggaaagccactcctgccaaaagagtctaaggaacagcttccacccatgagtgaagacttccttctggatgctttgtctgaggacttctctggtccacaaaatgcttcatctcttaaatttgaagatgctaaacttgctgctgccatctctgaagtggtttcccaaaccccagcttcaacgacccaagctggagccccaccccgtgatacctcgcagagtgacaaagacctcgatgatgccttggataaactctctgacagtctaggacaaaggcagcctgacccagatgagaacaaaccaatggaagataaagtaaaggaaaaagctaaagctgaacatagagacaagcttggagaaagagatgacactatcccacctgaatacagacatctcctggatgataatggacaggacaaaccagtgaagccacctacaaagaaatcagaggattcaaagaaacctgcagatgaccaagaccccattgatgctctctcaggagatctggacagctgtccctccactacagaaacctcacagaacacagcaaaggataagtgcaagaaggctgcttccagctccaaagcacctaagaatggaggtaaagcgaaggattcagcaaagacaacagaggaaacttccaagccaaaagatgactaaagaaatacaagttaaggtatctggtatctgcatgtaaaatcttcagctggtggatggtgacttttgaagaacaaaaggctttggcaacagaaaacaattgttctgggtgatttctagaatggtttttgttgagtctctgaacatcctaaatattggtttgttattcttttccagaaagaaaatgaatttgactggttcacctgtgtactgagtattgataaactttgaatttttttaattgccttcaattgggagagaaagctttatatttgtgtgaggacttctgcatcttacagtcagcacagaacacactgagacttgaatcaagtcagcaacagagcaaaataaagatgcaaacttcgttttttaaaaacatgatatctaaaaagcagaatgtgcagagtcttttctttgccaagcaaaacagtttccaccacatcttgtctatagatgactacctttctggtcaaggctttggacatctcttcagtcatcagacagagtatctctgctctagacctcgctggagttcaagcttgaattattatatgcaagttaattttacaagcctggatgaggctactgaaaactggaaaaaagctacgagactgtaacaacccttcattctttttcatttccaaagctctctccccatctcaagctagaaaatagtgtaaccagactacacaatggaaccactcctaaaaaaa

SEQ ID NO: 5633 - protein, 791 aa, Homo sapiens; identical to SEQ ID NO: 5623

SEQ ID NO: 5634 - DNA, 3110 bp, Homo sapiens
ctgggcatcgaaggaggaacgctgcaacctccaaccccttctttctgaccaaccgggaccagagcagtgctggggccggggcgggtcaccgggactccccgccaggcctccccgccactctccgcggcgcattccgggaggcagcggccgcagcggcctcgccatgtcccagcccggccagaagcccgccgcctccccgcggccccggcgagcagccgccgcccgccgcacccatgagcatgtcagtgaaaaaaccagtgaatcgccttccaaaccaggagaaaagaaaggatcagatgagaaaaaagcagcaagcctcggcagcagtcaatcctccagaacctatgctggtggaacagcctcggccaccaaggtgtcagcttcctctggtgcaaccagcaagtcttccagtatgaatcccacagaaaccaaggccattccagtcagccaacagatggaaggaccacatcttcctaacaagaaaaaacacaaaaaacaggctgtaaaaacagaacctgagaagaagtcacagtcaaccaagctgtctgtggttcatgagaaaaaatcccaagaaggaaagccaaaagaacacacagagccaaaaagcctacccaagcaggcatcagatacaggaagtaacgatgctcacaataaaaaagcagtttccagatcagctgaacagcagccatcagagaaatcaacagaaccaaagactaaaccacaagacatgatttctgctggtggagagagtgttgctggtatcactgcaatatctggcaagccgggtgacaagaaaaaagaaaagaaatcattaaccccagctgtgccagttgaatctaaaccggataaaccatcgggaaagtcaggcatggatgctgctttggatgacttaatagatactttaggaggacctgaagaaactgaagaagaaaatacaacgtatactggaccagaagtttcagatccaatgagttccacctacatagaggaattgggtaaaagagaagtcacaattcctccaaaatatagggaactattggctaaaaaggaagggatcacagggcctcctgcagactcttcgaaacccatagggccagatgatgctatagacgccttgtcatctgacttcacctgtgggtcgcctacagctgctggaaagaaaactgaaaaagaggaatctacagaagttttaaaagctcagtcagcagggacagtcagaagtgctgctccaccccaagagaagaaaagaaaggtggagaaggatacaatgagtgatcaagcactcgaggctctgtcggcttcactgggcacccggcaagcagaacctgagctcgacctccgctcaattaaggaagtcgatgaggcaaaagctaaagaagaaaaactagagaagtgtggtgaggatgatgaaacaatcccatctgagtacagattaaaaccagccacggataaagatggaaaaccactattgccagagcctgaagaaaaacccaagcctcggagtgaatcagaactcattgatgaactttcagaagattttgaccggtctgaatgtaaagagaaaccatctaagccaactgaaaagacagaagaatctaaggccgctgctccagctcctgtgtcggaggctgtgtgtcggacctccatgtgtagtatacagtcagcaccccctgagccggctaccttgaagggcacagtgccagatgatgctgtagaagccttggctgatagcctggggaaaaaggaagcagatccagaagatggaaaacctgtgatggataaagtcaaggagaaggccaaagaagaagaccgtgaaaagcttggtgaaaaagaagaaacaattcctcctgattatagattagaagaggtcaaggataaagatggaaagccactcctgccaaaagagtctaaggaacagcttccacccatgagtgaagacttccttctggatgctttgtctgaggacttctctggtccacaaaatgcttcatctcttaaatttgaagatgctaaacttgctgctgccatctctgaagtggtttcccaaaccccagcttcaacgacccaagctggagccccaccccgtgatacctcgcagagtgacaaagacctcgatgatgccttggataaactctctgacagtctaggacaaaggcagcctgacccagatgagaacaaaccaatggaagataaagtaaaggaaaaagctaaagctgaacatagagacaagcttggagaaagagatgacactatcccacctgaatacagacatctcctggatgataatggacaggacaaaccagtgaagccacctacaaagaaatcagaggattcaaagaaacctgcagatgaccaagaccccattgatgctctctcaggagatctggacagctgtccctccactacagaaacctcacagaacacagcaaaggataagtgcaagaaggctgcttccagctccaaagcacctaagaatggaggtaaagcgaaggattcagcaaagacaacagaggaaacttccaagccaaaagatgactaaagaaatacaagttaaggtatctggtatctgcatgtaaaatcttcagctggtggatggtgacttttgaagaacaaaaggctttggcaacagaaaacaattgttctgggtgatttctagaatggtttttgttgagtctctgaacatcctaaatattggtttgttattcttttccagaaagaaaatgaatttgactggttcacctgtgtactgagtattgataaactttgaatttttttaattgccttcaattgggagagaaagctttatatttgtgtgaggacttctgcatcttacagtcagcacagaacacactgagacttgaatcaagtcagcaacagagcaaaataaagatgcaaacttcgttttttaaaaacatgatatctaaaaagcagaatgtgcagagtcttttctttgccaagcaaaacagtttccaccacatgtgtgctgacttgcagtatgttcccagcaggataggcaattcctggccaagaaaacaaaaatagatgccagaatgatctaatctaatctaatttcccttggccacatgaacatgaatgaatgacggactcac

SEQ ID NO: 5635 - protein, 791 aa, Homo sapiens; identical to SEQ ID NO: 5623

SEQ ID NO: 5636 - DNA, 784 bp, Homo sapiens
ggagcccgggtccctccgcgggcaggaaggggagggcccatcggggctaggggaaccccggcgcagacctggggtggggtcggaaaagctgtttcatcgcccgctcccgggccctccgctccctccctccctccctctctccctggcaggactccccgccaggcctccccgccactctccgcggcgcattccgggaggcagcggccgcagcggcctcgccatgtcccagcccggccagaagcccgccgcctccccgcggccccggcgagcagccgccgcccgccgcacccatgagcatgtcagtgaaaaaaccagtgaatcgccttccaaaccaggagaaaagaaaggatcagatgagaaaaaagcagcaagcctcggcagcagtcaatcctccagaacctatgctggtggaacagcctcggccaccaaggtgtcagcttcctctggtgcaaccagcaagtcttccagtatgaatcccacagaaaccaaggctgtaaaaacagaacctgagaagaagtcacagtcaaccaagctgtctgtggttcatgagaaaaaatcccaagaaggaaagccaaaagaacacacagagccaaaaagcctacccaagcaggcatcagatacaggaagtaacgatgctcacaataaaaaagcagtttccagatcagctgaacagcagccatcagagaaatcaacagaaccaaagactaaaccacaagacatgatttctgctggtggagagagtgttgctggtatcactgcaatatctggcaagccgggtgacaag

SEQ ID NO: 5637 - protein, 187 aa, Homo sapiens
MSQPGQKPAASPRPRRAAAARRTHEHVSEKTSESPSKPGEKKGSDEKKAASLGSSQSSRTYAGGTASATKVSASSGATSKSSSMNPTETKAVKTEPEKKSQSTKLSVVHEKKSQEGKPKEHTEPKSLPKQASDTGSNDAHNKKAVSRSAEQQPSEKSTEPKTKPQDMISAGGESVAGITAISGKPGD

SEQ ID NO: 5638 - DNA, 3088 bp, Homo sapiens
ggagcccgggtccctccgcgggcaggaaggggagggcccatcggggctaggggaaccccggcgcagacctggggtggggtcggaaaagctgtttcatcgcccgctcccgggccctccgctccctccctccctccctctctccctggcaggactccccgccaggcctccccgccactctccgcggcgcattccgggaggcagcggccgcagcggcctcgccatgtcccagcccggccagaagcccgccgcctccccgcggccccggcgagcagccgccgcccgccgcacccatgagcatgtcagtgaaaaaaccagtgaatcgccttccaaaccaggagaaaagaaaggatcagatgagaaaaaagcagcaagcctcggcagcagtcaatcctccagaacctatgctggtggaacagcctcggccaccaaggtgtcagcttcctctggtgcaaccagcaagtcttccagtatgaatcccacagaaaccaaggctgtaaaaacagaacctgagaagaagtcacagtcaaccaagctgtctgtggttcatgagaaaaaatcccaagaaggaaagccaaaagaacacacagagccaaaaagcctacccaagcaggcatcagatacaggaagtaacgatgctcacaataaaaaagcagtttccagatcagctgaacagcagccatcagagaaatcaacagaaccaaagactaaaccacaagacatgatttctgctggtggagagagtgttgctggtatcactgcaatatctggcaagccgggtgacaagaaaaaagaaaagaaatcattaaccccagctgtgccagttgaatctaaaccggataaaccatcgggaaagtcaggcatggatgctgctttggatgacttaatagatactttaggaggacctgaagaaactgaagaagaaaatacaacgtatactggaccagaagtttcagatccaatgagttccacctacatagaggaattgggtaaaagagaagtcacaattcctccaaaatatagggaactattggctaaacccatagggccagatgatgctatagacgccttgtcatctgacttcacctgtgggtcgcctacagctgctggaaagaaaactgaaaaagaggaatctacagaagttttaaaagctcagtcagcagggacagtcagaagtgctgctccaccccaagagaagaaaagaaaggtggagaaggatacaatgagtgatcaagcactcgaggctctgtcggcttcactgggcacccggcaagcagaacctgagctcgacctccgctcaattaaggaagtcgatgagggaaggggagtctccctgacttccagcaacaatccttgagtctgggactgccctggcctaagatgggccagtttctatcttcgactttcttggagggctcaccggccacagtgtggcacgataagctttgtgacggtgaacgcagaggagcaagagaagcagttcgtatcttccaggaccaagcaaaagctaaagaagaaaaactagagaagtgtggtgaggatgatgaaacaatcccatctgagtacagattaaaaccagccacggataaagatggaaaaccactattgccagagcctgaagaaaaacccaagcctcggagtgaatcagaactcattgatgaactttcagaagattttgaccggtctgaatgtaaagagaaaccatctaagccaactgaaaagacagaagaatctaaggccgctgctccagctcctgtgtcggaggctgtgtgtcggacctccatgtgtagtatacagtcagcaccccctgagccggctaccttgaagggcacagtgccagatgatgctgtagaagccttggctgatagcctggggaaaaaggaagcagatccagaagatggaaaacctgtgatggataaagtcaaggagaaggccaaagaagaagaccgtgaaaagcttggtgaaaaagaagaaacaattcctcctgattatagattagaagaggtcaaggataaagatggaaagccactcctgccaaaagagtctaaggaacagcttccacccatgagtgaagacttccttctggatgctttgtctgaggacttctctggtccacaaaatgcttcatctcttaaatttgaagatgctaaacttgctgctgccatctctgaagtggtttcccaaaccccagcttcaacgacccaagctggagccccaccccgtgatacctcgcagagtgacaaagacctcgatgatgccttggataaactctctgacagtctaggacaaaggcagcctgacccagatgagaacaaaccaatggaagataaagtaaaggaaaaagctaaagctgaacatagagacaagcttggagaaagagatgacactatcccacctgaatacagacatctcctggatgataatggacaggacaaaccagtgaagccacctacaaagaaatcagaggattcaaagaaacctgcagatgaccaagaccccattgatgctctctcaggagatctggacagctgtccctccactacagaaacctcacagaacacagcaaaggataagtgcaagaaggctgcttccagctccaaagcacctaagaatggaggtaaagcgaaggattcagcaaagacaacagaggaaacttccaagccaaaagatgactaaagaaatacaagttaaggtatctggtatctgcatgtaaaatcttcagctggtggatggtgacttttgaagaacaaaaggctttggcaacagaaaacaattgttctgggtgatttctagaatggtttttgttgagtctctgaacatcctaaatattggtttgttattcttttccagaaagaaaatgaatttgactggttcacctgtgtactgagtattgataaactttgaatttttttaattgccttcaattgggagagaaagctttatatttgtgtgaggacttctgcatcttacagtcagcacagaacacactgagacttgaatcaagtcagcaacagagcaaaataaaggttagataagtccttgtgtagcaaatttcgagcataagaaataaaatctaattaattcttagggt

SEQ ID NO: 5639 - protein, 431 aa, Homo sapiens; identical to SEQ ID NO: 5611

SEQ ID NO: 5640 - DNA, 3046 bp, Homo sapiens
ggagcccgggtccctccgcgggcaggaaggggagggcccatcggggctaggggaaccccggcgcagacctggggtggggtcggaaaagctgtttcatcgcccgctcccgggccctccgctccctccctccctccctctctccctggcaggactccccgccaggcctccccgccactctccgcggcgcattccgggaggcagcggccgcagcggcctcgccatgtcccagcccggccagaagcccgccgcctccccgcggccccggcgagcagccgccgcccgccgcacccatgagcatgtcagtgaaaaaaccagtgaatcgccttccaaaccaggagaaaagaaaggatcagatgagaaaaaagcagcaagcctcggcagcagtcaatcctccagaacctatgctggtggaacagcctcggccaccaaggtgtcagcttcctctggtgcaaccagcaagtcttccagtatgaatcccacagaaaccaaggctgtaaaaacagaacctgagaagaagtcacagtcaaccaagctgtctgtggttcatgagaaaaaatcccaagaaggaaagccaaaagaacacacagagccaaaaagcctacccaagcaggcatcagatacaggaagtaacgatgctcacaataaaaaagcagtttccagatcagctgaacagcagccatcagagaaatcaacagaaccaaagaaaaaagaaaagaaatcattaaccccagctgtgccagttgaatctaaaccggataaaccatcgggaaagtcaggcatggatgctgctttggatgacttaatagatactttaggaggacctgaagaaactgaagaagaaaatacaacgtatactggaccagaagtttcagatccaatgagttccacctacatagaggaattgggtaaaagagaagtcacaattcctccaaaatatagggaactattggctaaaaaggaagggatcacagggcctcctgcagactcttcgaaacccatagggccagatgatgctatagacgccttgtcatctgacttcacctgtgggtcgcctacagctgctggaaagaaaactgaaaaagaggaatctacagaagttttaaaagctcagtcagcagggacagtcagaagtgctgctccaccccaagagaagaaaagaaaggtggagaaggatacaatgagtgatcaagcactcgaggctctgtcggcttcactgggcacccggcaagcagaacctgagctcgacctccgctcaattaaggaagtcgatgagggaaggggagtctccctgacttccagcaacaatccttgagtctgggactgccctggcctaagatgggccagtttctatcttcgactttcttggagggctcaccggccacagtgtggcacgataagctttgtgacggtgaacgcagaggagcaagagaagcagttcgtatcttccaggaccaagcaaaagctaaagaagaaaaactagagaagtgtggtgaggatgatgaaacaatcccatctgagtacagattaaaaccagccacggataaagatggaaaaccactattgccagagcctgaagaaaaacccaagcctcggagtgaatcagaactcattgatgaactttcagaagattttgaccggtctgaatgtaaagagaaaccatctaagccaactgaaaagacagaagaatctaaggccgctgctccagctcctgtgtcggaggctgtgtgtcggacctccatgtgtagtatacagtcagcaccccctgagccggctaccttgaagggcacagtgccagatgatgctgtagaagccttggctgatagcctggggaaaaaggaagcagatccagaagatggaaaacctgtgatggataaagtcaaggagaaggccaaagaagaagaccgtgaaaagcttggtgaaaaagaagaaacaattcctcctgattatagattagaagaggtcaaggataaagatggaaagccactcctgccaaaagagtctaaggaacagcttccacccatgagtgaagacttccttctggatgctttgtctgaggacttctctggtccacaaaatgcttcatctcttaaatttgaagatgctaaacttgctgctgccatctctgaagtggtttcccaaaccccagcttcaacgacccaagctggagccccaccccgtgatacctcgcagagtgacaaagacctcgatgatgccttggataaactctctgacagtctaggacaaaggcagcctgacccagatgagaacaaaccaatggaagataaagtaaaggaaaaagctaaagctgaacatagagacaagcttggagaaagagatgacactatcccacctgaatacagacatctcctggatgataatggacaggacaaaccagtgaagccacctacaaagaaatcagaggattcaaagaaacctgcagatgaccaagaccccattgatgctctctcaggagatctggacagctgtccctccactacagaaacctcacagaacacagcaaaggataagtgcaagaaggctgcttccagctccaaagcacctaagaatggaggtaaagcgaaggattcagcaaagacaacagaggaaacttccaagccaaaagatgactaaagaaatacaagttaaggtatctggtatctgcatgtaaaatcttcagctggtggatggtgacttttgaagaacaaaaggctttggcaacagaaaacaattgttctgggtgatttctagaatggtttttgttgagtctctgaacatcctaaatattggtttgttattcttttccagaaagaaaatgaatttgactggttcacctgtgtactgagtattgataaactttgaatttttttaattgccttcaattgggagagaaagctttatatttgtgtgaggacttctgcatcttacagtcagcacagaacacactgagacttgaatcaagtcagcaacagagcaaaataaaggttagataagtccttgtgtagcaaatttcgagcataagaaataaaatctaattaattcttagggt

SEQ ID NO: 5641 - protein, 431 aa, Homo sapiens; identical to SEQ ID NO: 5611

SEQ ID NO: 5642 - DNA, 3031 bp, Homo sapiens
ggagcccgggtccctccgcgggcaggaaggggagggcccatcggggctaggggaaccccggcgcagacctggggtggggtcggaaaagctgtttcatcgcccgctcccgggccctccgctccctccctccctccctctctccctggcaggactccccgccaggcctccccgccactctccgcggcgcattccgggaggcagcggccgcagcggcctcgccatgtcccagcccggccagaagcccgccgcctccccgcggccccggcgagcagccgccgcccgccgcacccatgagcatgtcagtgaaaaaaccagtgaatcgccttccaaaccaggagaaaagaaaggatcagatgagaaaaaagcagcaagcctcggcagcagtcaatcctccagaacctatgctggtggaacagcctcggccaccaaggtgtcagcttcctctggtgcaaccagcaagtcttccagtatgaatcccacagaaaccaaggctgtaaaaacagaacctgagaagaagtcacagtcaaccaagctgtctgtggttcatgagaaaaaatcccaagaaggaaagccaaaagaacacacagagccaaaaagcctacccaagcaggcatcagatacaggaagtaacgatgctcacaataaaaaagcagtttccagatcagctgaacagcagccatcagagaaatcaacagaaccaaagactaaaccacaagacatgatttctgctggtggagagagtgttgctggtatcactgcaatatctggcaagccgggtgacaagaaaaaagaaaagaaatcattaaccccagctgtgccagttgaatctaaaccggataaaccatcgggaaagtcaggcatggatgctgctttggatgacttaatagatactttaggaggacctgaagaaactgaagaagaaaatacaacgtatactggaccagaagtttcagatccaatgagttccacctacatagaggaattgggtaaaagagaagtcacaattcctccaaaatatagggaactattggctaaaaaggaagggatcacagggcctcctgcagactcttcgaaacccatagggccagatgctcagtcagcagggacagtcagaagtgctgctccaccccaagagaagaaaagaaaggtggagaaggatacaatgagtgatcaagcactcgaggctctgtcggcttcactgggcacccggcaagcagaacctgagctcgacctccgctcaattaaggaagtcgatgagggaaggggagtctccctgacttccagcaacaatccttgagtctgggactgccctggcctaagatgggccagtttctatcttcgactttcttggagggctcaccggccacagtgtggcacgataagctttgtgacggtgaacgcagaggagcaagagaagcagttcgtatcttccaggaccaagcaaaagctaaagaagaaaaactagagaagtgtggtgaggatgatgaaacaatcccatctgagtacagattaaaaccagccacggataaagatggaaaaccactattgccagagcctgaagaaaaacccaagcctcggagtgaatcagaactcattgatgaactttcagaagattttgaccggtctgaatgtaaagagaaaccatctaagccaactgaaaagacagaagaatctaaggccgctgctccagctcctgtgtcggaggctgtgtgtcggacctccatgtgtagtatacagtcagcaccccctgagccggctaccttgaagggcacagtgccagatgatgctgtagaagccttggctgatagcctggggaaaaaggaagcagatccagaagatggaaaacctgtgatggataaagtcaaggagaaggccaaagaagaagaccgtgaaaagcttggtgaaaaagaagaaacaattcctcctgattatagattagaagaggtcaaggataaagatggaaagccactcctgccaaaagagtctaaggaacagcttccacccatgagtgaagacttccttctggatgctttgtctgaggacttctctggtccacaaaatgcttcatctcttaaatttgaagatgctaaacttgctgctgccatctctgaagtggtttcccaaaccccagcttcaacgacccaagctggagccccaccccgtgatacctcgcagagtgacaaagacctcgatgatgccttggataaactctctgacagtctaggacaaaggcagcctgacccagatgagaacaaaccaatggaagataaagtaaaggaaaaagctaaagctgaacatagagacaagcttggagaaagagatgacactatcccacctgaatacagacatctcctggatgataatggacaggacaaaccagtgaagccacctacaaagaaatcagaggattcaaagaaacctgcagatgaccaagaccccattgatgctctctcaggagatctggacagctgtccctccactacagaaacctcacagaacacagcaaaggataagtgcaagaaggctgcttccagctccaaagcacctaagaatggaggtaaagcgaaggattcagcaaagacaacagaggaaacttccaagccaaaagatgactaaagaaatacaagttaaggtatctggtatctgcatgtaaaatcttcagctggtggatggtgacttttgaagaacaaaaggctttggcaacagaaaacaattgttctgggtgatttctagaatggtttttgttgagtctctgaacatcctaaatattggtttgttattcttttccagaaagaaaatgaatttgactggttcacctgtgtactgagtattgataaactttgaatttttttaattgccttcaattgggagagaaagctttatatttgtgtgaggacttctgcatcttacagtcagcacagaacacactgagacttgaatcaagtcagcaacagagcaaaataaaggttagataagtccttgtgtagcaaatttcgagcataagaaataaaatctaattaattcttagggt

SEQ ID NO: 5643 - protein, 431 aa, Homo sapiens; identical to SEQ ID NO: 5611

SEQ ID NO: 5644 - DNA, 3127 bp, Homo sapiens
ggagcccgggtccctccgcgggcaggaaggggagggcccatcggggctaggggaaccccggcgcagacctggggtggggtcggaaaagctgtttcatcgcccgctcccgggccctccgctccctccctccctccctctctccctggcaggactccccgccaggcctccccgccactctccgcggcgcattccgggaggcagcggccgcagcggcctcgccatgtcccagcccggccagaagcccgccgcctccccgcggccccggcgagcagccgccgcccgccgcacccatgagcatgtcagtgaaaaaaccagtgaatcgccttccaaaccaggagaaaagaaaggatcagatgagaaaaaagcagcaagcctcggcagcagtcaatcctccagaacctatgctggtggaacagcctcggccaccaaggtgtcagcttcctctggtgcaaccagcaagtcttccagtatgaatcccacagaaaccaaggctgtaaaaacagaacctgagaagaagtcacagtcaaccaagctgtctgtggttcatgagaaaaaatcccaagaaggaaagccaaaagaacacacagagccaaaaagcctacccaagcaggcatcagatacaggaagtaacgatgctcacaataaaaaagcagtttccagatcagctgaacagcagccatcagagaaatcaacagaaccaaagactaaaccacaagacatgatttctgctggtggagagagtgttgctggtatcactgcaatatctggcaagccgggtgacaagaaaaaagaaaagaaatcattaaccccagctgtgccagttgaatctaaaccggataaaccatcgggaaagtcaggcatggatgctgctttggatgacttaatagatactttaggaggacctgaagaaactgaagaagaaaatacaacgtatactggaccagaagtttcagatccaatgagttccacctacatagaggaattgggtaaaagagaagtcacaattcctccaaaatatagggaactattggctaaaaaggaagggatcacagggcctcctgcagactcttcgaaacccatagggccagatgatgctatagacgccttgtcatctgacttcacctgtgggtcgcctacagctgctggaaagaaaactgaaaaagaggaatctacagaagttttaaaagctcagtcagcagggacagtcagaagtgctgctccaccccaagagaagaaaagaaaggtggagaaggatacaatgagtgatcaagcactcgaggctctgtcggcttcactgggcacccggcaagcagaacctgagctcgacctccgctcaattaaggaagtcgatgagggaaggggagtctccctgacttccagcaacaatccttgagtctgggactgccctggcctaagatgggccagtttctatcttcgactttcttggagggctcaccggccacagtgtggcacgataagctttgtgacggtgaacgcagaggagcaagagaagcagttcgtatcttccaggaccaagcaaaagctaaagaagaaaaactagagaagtgtggtgaggatgatgaaacaatcccatctgagtacagattaaaaccagccacggataaagatggaaaaccactattgccagagcctgaagaaaaacccaagcctcggagtgaatcagaactcattgatgaactttcagaagattttgaccggtctgaatgtaaagagaaaccatctaagccaactgaaaagacagaagaatctaaggccgctgctccagctcctgtgtcggaggctgtgtgtcggacctccatgtgtagtatacagtcagcaccccctgagccggctaccttgaagggcacagtgccagatgatgctgtagaagccttggctgatagcctggggaaaaaggaagcagatccagaagatggaaaacctgtgatggataaagtcaaggagaaggccaaagaagaagaccgtgaaaagcttggtgaaaaagaagaaacaattcctcctgattatagattagaagaggtcaaggataaagatggaaagccactcctgccaaaagagtctaaggaacagcttccacccatgagtgaagacttccttctggatgctttgtctgaggacttctctggtccacaaaatgcttcatctcttaaatttgaagatgctaaacttgctgctgccatctctgaagtggtttcccaaaccccagcttcaacgacccaagctggagccccaccccgtgatacctcgcagagtgacaaagacctcgatgatgccttggataaactctctgacagtctaggacaaaggcagcctgacccagatgagaacaaaccaatggaagataaagtaaaggaaaaagctaaagctgaacatagagacaagcttggagaaagagatgacactatcccacctgaatacagacatctcctggatgataatggacaggacaaaccagtgaagccacctacaaagaaatcagaggattcaaagaaacctgcagatgaccaagaccccattgatgctctctcaggagatctggacagctgtccctccactacagaaacctcacagaacacagcaaaggataagtgcaagaaggctgcttccagctccaaagcacctaagaatggaggtaaagcgaaggattcagcaaagacaacagaggaaacttccaagccaaaagatgactaaagaaatacaagttaaggtatctggtatctgcatgtaaaatcttcagctggtggatggtgacttttgaagaacaaaaggctttggcaacagaaaacaattgttctgggtgatttctagaatggtttttgttgagtctctgaacatcctaaatattggtttgttattcttttccagaaagaaaatgaatttgactggttcacctgtgtactgagtattgataaactttgaatttttttaattgccttcaattgggagagaaagctttatatttgtgtgaggacttctgcatcttacagtcagcacagaacacactgagacttgaatcaagtcagcaacagagcaaaataaaggttagataagtccttgtgtagcaaatttcgagcataagaaataaaatctaattaattcttagggt

SEQ ID NO: 5645 - protein, 431 aa, Homo sapiens; identical to SEQ ID NO: 5611

SEQ ID NO: 5646 - DNA, 743 bp, Homo sapiens
ccggcgcagacctggggtggggtcggaaaagctgtttcatcgcccgctcccgggccctccgctccctccctccctccctctctccctggcaggactccccgccaggcctccccgccactctccgcggcgcattccgggaggcagcggccgcagcggcctcgccatgtcccagcccggccagaagcccgccgcctccccgcggccccggcgagcagccgccgcccgccgcacccatgagcatgtcagtgaaaaaaccagtgaatcgccttccaaaccaggagaaaagaaaggatcagatgagaaaaaagcagcaagcctcggcagcagtcaatcctccagaacctatgctggtggaacagcctcggccaccaaggtcagtgatttcctgaacacgaaaagacccctactgtattctacagggatatgattagtgggtggggcctgtaggaatggcaaacagtgtccagatatcactgaaggttttttaacaaagtatcatttctgtgctagaagagagaatataatttcttaataatgatgtgaatgatttaaaacctagtaaaaccatttattgtataaatcttcttggcatataataagcgttaaataaatattaattattatgatgactatctgcagataatattaaacttttgaacatactgtgagtaaaaacgtagtgctcccactttagaaaataattcatatcctcctcatgggcattaaccacaccaggcgtgctg

SEQ ID NO: 5647 - protein, 87 aa, Homo sapiens
MSQPGQKPAASPRPRRAAAARRTHEHVSEKTSESPSKPGEKKGSDEKKAASLGSSQSSRTYAGGTASATKVSDFLNTKRPLLYSTGI

SEQ ID NO: 5648 - DNA, 653 bp, Homo sapiens
ccggcgcagacctggggtggggtcggaaaagctgtttcatcgcccgctcccgggccctccgctccctccctccctccctctctccctggcaggactccccgccaggcctccccgccactctccgcggcgcattccgggaggcagcggccgcagcggcctcgccatgtcccagcccggccagaagcccgccgcctccccgcggccccggcgagcagccgccgcccgccgcacccatgagcatgtcagtgaaaaaaccagtgaatcgccttccaaaccaggagaaaagaaaggatcagatgaggtgtcagcttcctctggtgcaaccagcaagtcttccagtatgaatcccacagaaaccaaggctgtaaaaacagaacctgagaagaagtcacagtcaaccaagctgtctgtggttcatgagaaaaaatcccaagaaggaaagccaaaagaacacacagagccaaaaagcctacccaagcaggcatcagatacaggaagtaacgatgctcacaataaaaaagcagtttccagatcagctgaacagcagccatcagagaaatcaacagaaccaaagactaaaccacaagacatgatttctgctggtggagagagtgttgctggtatcactgcaatatctggcaagccgggtgaca

SEQ ID NO: 5649 - protein, 162 aa, Homo sapiens
MSQPGQKPAASPRPRRAAAARRTHEHVSEKTSESPSKPGEKKGSDEVSASSGATSKSSSMNPTETKAVKTEPEKKSQSTKLSVVHEKKSQEGKPKEHTEPKSLPKQASDTGSNDAHNKKAVSRSAEQQPSEKSTEPKTKPQDMISAGGESVAGITAISGKPG

SEQ ID NO: 5650 - DNA, 3040 bp, Homo sapiens
ccggcgcagacctggggtggggtcggaaaagctgtttcatcgcccgctcccgggccctccgctccctccctccctccctctctccctggcaggactccccgccaggcctccccgccactctccgcggcgcattccgggaggcagcggccgcagcggcctcgccatgtcccagcccggccagaagcccgccgcctccccgcggccccggcgagcagccgccgcccgccgcacccatgagcatgtcagtgaaaaaaccagtgaatcgccttccaaaccaggagaaaagaaaggatcagatgagaaaaaagcagcaagcctcggcagcagtcaatcctccagaacctatgctggtggaacagcctcggccaccaaggtgtcagcttcctctggtgcaaccagcaagtcttccagtatgaatcccacagaaaccaaggccattccagtcagccaacagatggaaggaccacatcttcctaacaagaaaaaacacaaaaaacaggctgtaaaaacagaacctgagaagaagtcacagtcaaccaagccaaaaagcctacccaagcaggcatcagatacaggaagtaacgatgctcacaataaaaaagcagtttccagatcagctgaacagcagccatcagagaaatcaacagaaccaaagactaaaccacaagacatgatttctgctggtggagagagtgttgctggtatcactgcaatatctggcaagccgggtgacaagaaaaaagaaaagaaatcattaaccccagctgtgccagttgaatctaaaccggataaaccatcgggaaagtcaggcatggatgctgctttggatgacttaatagatactttaggaggacctgaagaaactgaagaagaaaatacaacgtatactggaccagaagtttcagatccaatgagttccacctacatagaggaattgggtaaaagagaagtcacaattcctccaaaatatagggaactattggctaaacccatagggccagatgatgctatagacgccttgtcatctgacttcacctgtgggtcgcctacagctgctggaaagaaaactgaaaaagaggaatctacagaagttttaaaagctcagtcagcagggacagtcagaagtgctgctccaccccaagagaagaaaagaaaggtggagaaggatacaatgagtgatcaagcactcgaggctctgtcggcttcactgggcacccggcaagcagaacctgagctcgacctccgctcaattaaggaagtcgatgagggaaggggagtctccctgacttccagcaacaatccttgagtctgggactgccctggcctaagatgggccagtttctatcttcgactttcttggagggctcaccggccacagtgtggcacgataagctttgtgacggtgaacgcagaggagcaagagaagcagttcgtatcttccaggaccaagcaaaagctaaagaagaaaaactagagaagtgtggtgaggatgatgaaacaatcccatctgagtacagattaaaaccagccacggataaagatggaaaaccactattgccagagcctgaagaaaaacccaagcctcggagtgaatcagaactcattgatgaactttcagaagattttgaccggtctgaatgtaaagagaaaccatctaagccaactgaaaagacagaagaatctaaggccgctgctccagctcctgtgtcggaggctgtgtgtcggacctccatgtgtagtatacagtcagcaccccctgagccggctaccttgaagggcacagtgccagatgatgctgtagaagccttggctgatagcctggggaaaaaggaagcagatccagaagatggaaaacctgtgatggataaagtcaaggagaaggccaaagaagaagaccgtgaaaagcttggtgaaaaagaagaaacaattcctcctgattatagattagaagaggtcaaggataaagatggaaagccactcctgccaaaagagtctaaggaacagcttccacccatgagtgaagacttccttctggatgctttgtctgaggacttctctggtccacaaaatgcttcatctcttaaatttgaagatgctaaacttgctgctgccatctctgaagtggtttcccaaaccccagcttcaacgacccaagctggagccccaccccgtgatacctcgcagagtgacaaagacctcgatgatgccttggataaactctctgacagtctaggacaaaggcagcctgacccagatgagaacaaaccaatggaagataaagtaaaggaaaaagctaaagctgaacatagagacaagcttggagaaagagatgacactatcccacctgaatacagacatctcctggatgataatggacaggacaaaccagtgaagccacctacaaagaaatcagaggattcaaagaaacctgcagatgaccaagaccccattgatgctctctcaggagatctggacagctgtccctccactacagaaacctcacagaacacagcaaaggataagtgcaagaaggctgcttccagctccaaagcacctaagaatggaggtaaagcgaaggattcagcaaagacaacagaggaaacttccaagccaaaagatgactaaagaaatacaagttaaggtatctggtatctgcatgtaaaatcttcagctggtggatggtgacttttgaagaacaaaaggctttggcaacagaaaacaattgttctgggtgatttctagaatggtttttgttgagtctctgaacatcctaaatattggtttgttattcttttccagaaagaaaatgaatttgactggttcacctgtgtactgagtattgataaactttgaatttttttaattgccttcaattgggagagaaagctttatatttgtgtgaggacttctgcatcttacagtcagcacagaacacactgagacttgaatcaagtcagcaacagagcaaaataaaggttagataagtccttgtgtagcaaatttcgagcataagaaataaaatctaattaattcttagggt

SEQ ID NO: 5651 - protein, 431 aa, Homo sapiens; identical to SEQ ID NO: 5611

SEQ ID NO: 5652 - DNA, 3079 bp, Homo sapiens
ccggcgcagacctggggtggggtcggaaaagctgtttcatcgcccgctcccgggccctccgctccctccctccctccctctctccctggcaggactccccgccaggcctccccgccactctccgcggcgcattccgggaggcagcggccgcagcggcctcgccatgtcccagcccggccagaagcccgccgcctccccgcggccccggcgagcagccgccgcccgccgcacccatgagcatgtcagtgaaaaaaccagtgaatcgccttccaaaccaggagaaaagaaaggatcagatgagaaaaaagcagcaagcctcggcagcagtcaatcctccagaacctatgctggtggaacagcctcggccaccaaggtgtcagcttcctctggtgcaaccagcaagtcttccagtatgaatcccacagaaaccaaggccattccagtcagccaacagatggaaggaccacatcttcctaacaagaaaaaacacaaaaaacaggctgtaaaaacagaacctgagaagaagtcacagtcaaccaagccaaaaagcctacccaagcaggcatcagatacaggaagtaacgatgctcacaataaaaaagcagtttccagatcagctgaacagcagccatcagagaaatcaacagaaccaaagactaaaccacaagacatgatttctgctggtggagagagtgttgctggtatcactgcaatatctggcaagccgggtgacaagaaaaaagaaaagaaatcattaaccccagctgtgccagttgaatctaaaccggataaaccatcgggaaagtcaggcatggatgctgctttggatgacttaatagatactttaggaggacctgaagaaactgaagaagaaaatacaacgtatactggaccagaagtttcagatccaatgagttccacctacatagaggaattgggtaaaagagaagtcacaattcctccaaaatatagggaactattggctaaaaaggaagggatcacagggcctcctgcagactcttcgaaacccatagggccagatgatgctatagacgccttgtcatctgacttcacctgtgggtcgcctacagctgctggaaagaaaactgaaaaagaggaatctacagaagttttaaaagctcagtcagcagggacagtcagaagtgctgctccaccccaagagaagaaaagaaaggtggagaaggatacaatgagtgatcaagcactcgaggctctgtcggcttcactgggcacccggcaagcagaacctgagctcgacctccgctcaattaaggaagtcgatgagggaaggggagtctccctgacttccagcaacaatccttgagtctgggactgccctggcctaagatgggccagtttctatcttcgactttcttggagggctcaccggccacagtgtggcacgataagctttgtgacggtgaacgcagaggagcaagagaagcagttcgtatcttccaggaccaagcaaaagctaaagaagaaaaactagagaagtgtggtgaggatgatgaaacaatcccatctgagtacagattaaaaccagccacggataaagatggaaaaccactattgccagagcctgaagaaaaacccaagcctcggagtgaatcagaactcattgatgaactttcagaagattttgaccggtctgaatgtaaagagaaaccatctaagccaactgaaaagacagaagaatctaaggccgctgctccagctcctgtgtcggaggctgtgtgtcggacctccatgtgtagtatacagtcagcaccccctgagccggctaccttgaagggcacagtgccagatgatgctgtagaagccttggctgatagcctggggaaaaaggaagcagatccagaagatggaaaacctgtgatggataaagtcaaggagaaggccaaagaagaagaccgtgaaaagcttggtgaaaaagaagaaacaattcctcctgattatagattagaagaggtcaaggataaagatggaaagccactcctgccaaaagagtctaaggaacagcttccacccatgagtgaagacttccttctggatgctttgtctgaggacttctctggtccacaaaatgcttcatctcttaaatttgaagatgctaaacttgctgctgccatctctgaagtggtttcccaaaccccagcttcaacgacccaagctggagccccaccccgtgatacctcgcagagtgacaaagacctcgatgatgccttggataaactctctgacagtctaggacaaaggcagcctgacccagatgagaacaaaccaatggaagataaagtaaaggaaaaagctaaagctgaacatagagacaagcttggagaaagagatgacactatcccacctgaatacagacatctcctggatgataatggacaggacaaaccagtgaagccacctacaaagaaatcagaggattcaaagaaacctgcagatgaccaagaccccattgatgctctctcaggagatctggacagctgtccctccactacagaaacctcacagaacacagcaaaggataagtgcaagaaggctgcttccagctccaaagcacctaagaatggaggtaaagcgaaggattcagcaaagacaacagaggaaacttccaagccaaaagatgactaaagaaatacaagttaaggtatctggtatctgcatgtaaaatcttcagctggtggatggtgacttttgaagaacaaaaggctttggcaacagaaaacaattgttctgggtgatttctagaatggtttttgttgagtctctgaacatcctaaatattggtttgttattcttttccagaaagaaaatgaatttgactggttcacctgtgtactgagtattgataaactttgaatttttttaattgccttcaattgggagagaaagctttatatttgtgtgaggacttctgcatcttacagtcagcacagaacacactgagacttgaatcaagtcagcaacagagcaaaataaaggttagataagtccttgtgtagcaaatttcgagcataagaaataaaatctaattaattcttagggt

SEQ ID NO: 5653 - protein, 431 aa, Homo sapiens; identical to SEQ ID NO: 5611

SEQ ID NO: 5654 - DNA, 3080 bp, Homo sapiens
ccggcgcagacctggggtggggtcggaaaagctgtttcatcgcccgctcccgggccctccgctccctccctccctccctctctccctggcaggactccccgccaggcctccccgccactctccgcggcgcattccgggaggcagcggccgcagcggcctcgccatgtcccagcccggccagaagcccgccgcctccccgcggccccggcgagcagccgccgcccgccgcacccatgagcatgtcagtgaaaaaaccagtgaatcgccttccaaaccaggagaaaagaaaggatcagatgagaaaaaagcagcaagcctcggcagcagtcaatcctccagaacctatgctggtggaacagcctcggccaccaaggtgtcagcttcctctggtgcaaccagcaagtcttccagtatgaatcccacagaaaccaagataaaataaaattatacctggggctgtgctcttatattaggccattccagtcagccaacagatggaaggaccacatcttcctaacaagaaaaaacacaaaaaacaggctgtaaaaacagaacctgagaagaagtcacagtcaaccaagctgtctgtggttcatgagaaaaaatcccaagaaggaaagccaaaagaacacacagagccaaaaagcctacccaagcaggcatcagatacaggaagtaacgatgctcacaataaaaaagcagtttccagatcagctgaacagcagccatcagagaaatcaacagaaccaaagactaaaccacaagacatgatttctgctggtggagagagtgttgctggtatcactgcaatatctggcaagccgggtgacaagaaaaaagaaaagaaatcattaaccccagctgtgccagttgaatctaaaccggataaaccatcgggaaagtcaggcatggatgctgctttggatgacttaatagatactttaggaggacctgaagaaactgaagaagaaaatacaacgtatactggaccagaagtttcagatccaatgagttccacctacatagaggaattgggtaaaagagaagtcacaattcctccaaaatatagggaactattggctaaaaaggaagggatcacagggcctcctgcagactcttcgaaacccatagggccagatgctcagtcagcagggacagtcagaagtgctgctccaccccaagagaagaaaagaaaggtggagaaggatacaatgagtgatcaagcactcgaggctctgtcggcttcactgggcacccggcaagcagaacctgagctcgacctccgctcaattaaggaagtcgatgagggaaggggagtctccctgacttccagcaacaatccttgagtctgggactgccctggcctaagatgggccagtttctatcttcgactttcttggagggctcaccggccacagtgtggcacgataagctttgtgacggtgaacgcagaggagcaagagaagcagttcgtatcttccaggaccaagcaaaagctaaagaagaaaaactagagaagtgtggtgaggatgatgaaacaatcccatctgagtacagattaaaaccagccacggataaagatggaaaaccactattgccagagcctgaagaaaaacccaagcctcggagtgaatcagaactcattgatgaactttcagaagattttgaccggtctgaatgtaaagagaaaccatctaagccaactgaaaagacagaagaatctaaggccgctgctccagctcctgtgtcggaggctgtgtgtcggacctccatgtgtagtatacagtcagcaccccctgagccggctaccttgaagggcacagtgccagatgatgctgtagaagccttggctgatagcctggggaaaaaggaagcagatccagaagatggaaaacctgtgatggataaagtcaaggagaaggccaaagaagaagaccgtgaaaagcttggtgaaaaagaagaaacaattcctcctgattatagattagaagaggtcaaggataaagatggaaagccactcctgccaaaagagtctaaggaacagcttccacccatgagtgaagacttccttctggatgctttgtctgaggacttctctggtccacaaaatgcttcatctcttaaatttgaagatgctaaacttgctgctgccatctctgaagtggtttcccaaaccccagcttcaacgacccaagctggagccccaccccgtgatacctcgcagagtgacaaagacctcgatgatgccttggataaactctctgacagtctaggacaaaggcagcctgacccagatgagaacaaaccaatggaagataaagtaaaggaaaaagctaaagctgaacatagagacaagcttggagaaagagatgacactatcccacctgaatacagacatctcctggatgataatggacaggacaaaccagtgaagccacctacaaagaaatcagaggattcaaagaaacctgcagatgaccaagaccccattgatgctctctcaggagatctggacagctgtccctccactacagaaacctcacagaacacagcaaaggataagtgcaagaaggctgcttccagctccaaagcacctaagaatggaggtaaagcgaaggattcagcaaagacaacagaggaaacttccaagccaaaagatgactaaagaaatacaagttaaggtatctggtatctgcatgtaaaatcttcagctggtggatggtgacttttgaagaacaaaaggctttggcaacagaaaacaattgttctgggtgatttctagaatggtttttgttgagtctctgaacatcctaaatattggtttgttattcttttccagaaagaaaatgaatttgactggttcacctgtgtactgagtattgataaactttgaatttttttaattgccttcaattgggagagaaagctttatatttgtgtgaggacttctgcatcttacagtcagcacagaacacactgagacttgaatcaagtcagcaacagagcaaaataaaggttagataagtccttgtgtagcaaatttcgagcataagaaataaaatctaattaattcttagggt

SEQ ID NO: 5655 - protein, 431 aa, Homo sapiens; identical to SEQ ID NO: 5611

SEQ ID NO: 5656 - DNA, 3176 bp, Homo sapiens
ccggcgcagacctggggtggggtcggaaaagctgtttcatcgcccgctcccgggccctccgctccctccctccctccctctctccctggcaggactccccgccaggcctccccgccactctccgcggcgcattccgggaggcagcggccgcagcggcctcgccatgtcccagcccggccagaagcccgccgcctccccgcggccccggcgagcagccgccgcccgccgcacccatgagcatgtcagtgaaaaaaccagtgaatcgccttccaaaccaggagaaaagaaaggatcagatgagaaaaaagcagcaagcctcggcagcagtcaatcctccagaacctatgctggtggaacagcctcggccaccaaggtgtcagcttcctctggtgcaaccagcaagtcttccagtatgaatcccacagaaaccaagataaaataaaattatacctggggctgtgctcttatattaggccattccagtcagccaacagatggaaggaccacatcttcctaacaagaaaaaacacaaaaaacaggctgtaaaaacagaacctgagaagaagtcacagtcaaccaagctgtctgtggttcatgagaaaaaatcccaagaaggaaagccaaaagaacacacagagccaaaaagcctacccaagcaggcatcagatacaggaagtaacgatgctcacaataaaaaagcagtttccagatcagctgaacagcagccatcagagaaatcaacagaaccaaagactaaaccacaagacatgatttctgctggtggagagagtgttgctggtatcactgcaatatctggcaagccgggtgacaagaaaaaagaaaagaaatcattaaccccagctgtgccagttgaatctaaaccggataaaccatcgggaaagtcaggcatggatgctgctttggatgacttaatagatactttaggaggacctgaagaaactgaagaagaaaatacaacgtatactggaccagaagtttcagatccaatgagttccacctacatagaggaattgggtaaaagagaagtcacaattcctccaaaatatagggaactattggctaaaaaggaagggatcacagggcctcctgcagactcttcgaaacccatagggccagatgatgctatagacgccttgtcatctgacttcacctgtgggtcgcctacagctgctggaaagaaaactgaaaaagaggaatctacagaagttttaaaagctcagtcagcagggacagtcagaagtgctgctccaccccaagagaagaaaagaaaggtggagaaggatacaatgagtgatcaagcactcgaggctctgtcggcttcactgggcacccggcaagcagaacctgagctcgacctccgctcaattaaggaagtcgatgagggaaggggagtctccctgacttccagcaacaatccttgagtctgggactgccctggcctaagatgggccagtttctatcttcgactttcttggagggctcaccggccacagtgtggcacgataagctttgtgacggtgaacgcagaggagcaagagaagcagttcgtatcttccaggaccaagcaaaagctaaagaagaaaaactagagaagtgtggtgaggatgatgaaacaatcccatctgagtacagattaaaaccagccacggataaagatggaaaaccactattgccagagcctgaagaaaaacccaagcctcggagtgaatcagaactcattgatgaactttcagaagattttgaccggtctgaatgtaaagagaaaccatctaagccaactgaaaagacagaagaatctaaggccgctgctccagctcctgtgtcggaggctgtgtgtcggacctccatgtgtagtatacagtcagcaccccctgagccggctaccttgaagggcacagtgccagatgatgctgtagaagccttggctgatagcctggggaaaaaggaagcagatccagaagatggaaaacctgtgatggataaagtcaaggagaaggccaaagaagaagaccgtgaaaagcttggtgaaaaagaagaaacaattcctcctgattatagattagaagaggtcaaggataaagatggaaagccactcctgccaaaagagtctaaggaacagcttccacccatgagtgaagacttccttctggatgctttgtctgaggacttctctggtccacaaaatgcttcatctcttaaatttgaagatgctaaacttgctgctgccatctctgaagtggtttcccaaaccccagcttcaacgacccaagctggagccccaccccgtgatacctcgcagagtgacaaagacctcgatgatgccttggataaactctctgacagtctaggacaaaggcagcctgacccagatgagaacaaaccaatggaagataaagtaaaggaaaaagctaaagctgaacatagagacaagcttggagaaagagatgacactatcccacctgaatacagacatctcctggatgataatggacaggacaaaccagtgaagccacctacaaagaaatcagaggattcaaagaaacctgcagatgaccaagaccccattgatgctctctcaggagatctggacagctgtccctccactacagaaacctcacagaacacagcaaaggataagtgcaagaaggctgcttccagctccaaagcacctaagaatggaggtaaagcgaaggattcagcaaagacaacagaggaaacttccaagccaaaagatgactaaagaaatacaagttaaggtatctggtatctgcatgtaaaatcttcagctggtggatggtgacttttgaagaacaaaaggctttggcaacagaaaacaattgttctgggtgatttctagaatggtttttgttgagtctctgaacatcctaaatattggtttgttattcttttccagaaagaaaatgaatttgactggttcacctgtgtactgagtattgataaactttgaatttttttaattgccttcaattgggagagaaagctttatatttgtgtgaggacttctgcatcttacagtcagcacagaacacactgagacttgaatcaagtcagcaacagagcaaaataaaggttagataagtccttgtgtagcaaatttcgagcataagaaataaaatctaattaattcttagggt

SEQ ID NO: 5657 - protein, 431 aa, Homo sapiens; identical to SEQ ID NO: 5611

SEQ ID NO: 5658 - DNA, 2998 bp, Homo sapiens
ccggcgcagacctggggtggggtcggaaaagctgtttcatcgcccgctcccgggccctccgctccctccctccctccctctctccctggcaggactccccgccaggcctccccgccactctccgcggcgcattccgggaggcagcggccgcagcggcctcgccatgtcccagcccggccagaagcccgccgcctccccgcggccccggcgagcagccgccgcccgccgcacccatgagcatgtcagtgaaaaaaccagtgaatcgccttccaaaccaggagaaaagaaaggatcagatgaggtgtcagcttcctctggtgcaaccagcaagtcttccagtatgaatcccacagaaaccaaggctgtaaaaacagaacctgagaagaagtcacagtcaaccaagctgtctgtggttcatgagaaaaaatcccaagaaggaaagccaaaagaacacacagagccaaaaagcctacccaagcaggcatcagatacaggaagtaacgatgctcacaataaaaaagcagtttccagatcagctgaacagcagccatcagagaaatcaacagaaccaaagactaaaccacaagacatgatttctgctggtggagagagtgttgctggtatcactgcaatatctggcaagccgggtgacaagaaaaaagaaaagaaatcattaaccccagctgtgccagttgaatctaaaccggataaaccatcgggaaagtcaggcatggatgctgctttggatgacttaatagatactttaggaggacctgaagaaactgaagaagaaaatacaacgtatactggaccagaagtttcagatccaatgagttccacctacatagaggaattgggtaaaagagaagtcacaattcctccaaaatatagggaactattggctaaaaaggaagggatcacagggcctcctgcagactcttcgaaacccatagggccagatgatgctatagacgccttgtcatctgacttcacctgtgggtcgcctacagctgctggaaagaaaactgaaaaagaggaatctacagaagttttaaaagctcagtcagcagggacagtcagaagtgctgctccaccccaagagaagaaaagaaaggtggagaaggatacaatgagtgatcaagcactcgaggctctgtcggcttcactgggcacccggcaagcagaacctgagctcgacctccgctcaattaaggaagtcgatgagggaaggggagtctccctgacttccagcaacaatccttgagtctgggactgccctggcctaagatgggccagtttctatcttcgactttcttggagggctcaccggccacagtgtggcacgataagctttgtgacggtgaacgcagaggagcaagagaagcagttcgtatcttccaggaccaagcaaaagctaaagaagaaaaactagagaagtgtggtgaggatgatgaaacaatcccatctgagtacagattaaaaccagccacggataaagatggaaaaccactattgccagagcctgaagaaaaacccaagcctcggagtgaatcagaactcattgatgaactttcagaagattttgaccggtctgaatgtaaagagaaaccatctaagccaactgaaaagacagaagaatctaaggccgctgctccagctcctgtgtcggaggctgtgtgtcggacctccatgtgtagtatacagtcagcaccccctgagccggctaccttgaagggcacagtgccagatgatgctgtagaagccttggctgatagcctggggaaaaaggaagcagatccagaagatggaaaacctgtgatggataaagtcaaggagaaggccaaagaagaagaccgtgaaaagcttggtgaaaaagaagaaacaattcctcctgattatagattagaagaggtcaaggataaagatggaaagccactcctgccaaaagagtctaaggaacagcttccacccatgagtgaagacttccttctggatgctttgtctgaggacttctctggtccacaaaatgcttcatctcttaaatttgaagatgctaaacttgctgctgccatctctgaagtggtttcccaaaccccagcttcaacgacccaagctggagccccaccccgtgatacctcgcagagtgacaaagacctcgatgatgccttggataaactctctgacagtctaggacaaaggcagcctgacccagatgagaacaaaccaatggaagataaagtaaaggaaaaagctaaagctgaacatagagacaagcttggagaaagagatgacactatcccacctgaatacagacatctcctggatgataatggacaggacaaaccagtgaagccacctacaaagaaatcagaggattcaaagaaacctgcagatgaccaagaccccattgatgctctctcaggagatctggacagctgtccctccactacagaaacctcacagaacacagcaaaggataagtgcaagaaggctgcttccagctccaaagcacctaagaatggaggtaaagcgaaggattcagcaaagacaacagaggaaacttccaagccaaaagatgactaaagaaatacaagttaaggtatctggtatctgcatgtaaaatcttcagctggtggatggtgacttttgaagaacaaaaggctttggcaacagaaaacaattgttctgggtgatttctagaatggtttttgttgagtctctgaacatcctaaatattggtttgttattcttttccagaaagaaaatgaatttgactggttcacctgtgtactgagtattgataaactttgaatttttttaattgccttcaattgggagagaaagctttatatttgtgtgaggacttctgcatcttacagtcagcacagaacacactgagacttgaatcaagtcagcaacagagcaaaataaaggttagataagtccttgtgtagcaaatttcgagcataagaaataaaatctaattaattcttagggt

SEQ ID NO: 5659 - protein, 431 aa, Homo sapiens; identical to SEQ ID NO: 5611

SEQ ID NO: 5660 - DNA, 2959 bp, Homo sapiens
ccggcgcagacctggggtggggtcggaaaagctgtttcatcgcccgctcccgggccctccgctccctccctccctccctctctccctggcaggactccccgccaggcctccccgccactctccgcggcgcattccgggaggcagcggccgcagcggcctcgccatgtcccagcccggccagaagcccgccgcctccccgcggccccggcgagcagccgccgcccgccgcacccatgagcatgtcagtgaaaaaaccagtgaatcgccttccaaaccaggagaaaagaaaggatcagatgaggtgtcagcttcctctggtgcaaccagcaagtcttccagtatgaatcccacagaaaccaaggctgtaaaaacagaacctgagaagaagtcacagtcaaccaagctgtctgtggttcatgagaaaaaatcccaagaaggaaagccaaaagaacacacagagccaaaaagcctacccaagcaggcatcagatacaggaagtaacgatgctcacaataaaaaagcagtttccagatcagctgaacagcagccatcagagaaatcaacagaaccaaagactaaaccacaagacatgatttctgctggtggagagagtgttgctggtatcactgcaatatctggcaagccgggtgacaagaaaaaagaaaagaaatcattaaccccagctgtgccagttgaatctaaaccggataaaccatcgggaaagtcaggcatggatgctgctttggatgacttaatagatactttaggaggacctgaagaaactgaagaagaaaatacaacgtatactggaccagaagtttcagatccaatgagttccacctacatagaggaattgggtaaaagagaagtcacaattcctccaaaatatagggaactattggctaaacccatagggccagatgatgctatagacgccttgtcatctgacttcacctgtgggtcgcctacagctgctggaaagaaaactgaaaaagaggaatctacagaagttttaaaagctcagtcagcagggacagtcagaagtgctgctccaccccaagagaagaaaagaaaggtggagaaggatacaatgagtgatcaagcactcgaggctctgtcggcttcactgggcacccggcaagcagaacctgagctcgacctccgctcaattaaggaagtcgatgagggaaggggagtctccctgacttccagcaacaatccttgagtctgggactgccctggcctaagatgggccagtttctatcttcgactttcttggagggctcaccggccacagtgtggcacgataagctttgtgacggtgaacgcagaggagcaagagaagcagttcgtatcttccaggaccaagcaaaagctaaagaagaaaaactagagaagtgtggtgaggatgatgaaacaatcccatctgagtacagattaaaaccagccacggataaagatggaaaaccactattgccagagcctgaagaaaaacccaagcctcggagtgaatcagaactcattgatgaactttcagaagattttgaccggtctgaatgtaaagagaaaccatctaagccaactgaaaagacagaagaatctaaggccgctgctccagctcctgtgtcggaggctgtgtgtcggacctccatgtgtagtatacagtcagcaccccctgagccggctaccttgaagggcacagtgccagatgatgctgtagaagccttggctgatagcctggggaaaaaggaagcagatccagaagatggaaaacctgtgatggataaagtcaaggagaaggccaaagaagaagaccgtgaaaagcttggtgaaaaagaagaaacaattcctcctgattatagattagaagaggtcaaggataaagatggaaagccactcctgccaaaagagtctaaggaacagcttccacccatgagtgaagacttccttctggatgctttgtctgaggacttctctggtccacaaaatgcttcatctcttaaatttgaagatgctaaacttgctgctgccatctctgaagtggtttcccaaaccccagcttcaacgacccaagctggagccccaccccgtgatacctcgcagagtgacaaagacctcgatgatgccttggataaactctctgacagtctaggacaaaggcagcctgacccagatgagaacaaaccaatggaagataaagtaaaggaaaaagctaaagctgaacatagagacaagcttggagaaagagatgacactatcccacctgaatacagacatctcctggatgataatggacaggacaaaccagtgaagccacctacaaagaaatcagaggattcaaagaaacctgcagatgaccaagaccccattgatgctctctcaggagatctggacagctgtccctccactacagaaacctcacagaacacagcaaaggataagtgcaagaaggctgcttccagctccaaagcacctaagaatggaggtaaagcgaaggattcagcaaagacaacagaggaaacttccaagccaaaagatgactaaagaaatacaagttaaggtatctggtatctgcatgtaaaatcttcagctggtggatggtgacttttgaagaacaaaaggctttggcaacagaaaacaattgttctgggtgatttctagaatggtttttgttgagtctctgaacatcctaaatattggtttgttattcttttccagaaagaaaatgaatttgactggttcacctgtgtactgagtattgataaactttgaatttttttaattgccttcaattgggagagaaagctttatatttgtgtgaggacttctgcatcttacagtcagcacagaacacactgagacttgaatcaagtcagcaacagagcaaaataaaggttagataagtccttgtgtagcaaatttcgagcataagaaataaaatctaattaattcttagggt

SEQ ID NO: 5661 - protein, 431 aa, Homo sapiens; identical to SEQ ID NO: 5611
